United States Patent Application Publication US 2024/0327476 A1 - sequence listing, part 92

SEQ ID NO: 177681 - DNA, 2178 bp, synthetic construct
  misc_feature 1..2178: note = Description of Artificial Sequence: Synthetic coding sequence
  source 1..2178: mol_type = other DNA
atggaccggggccaggtgctggagcagctgctgcccgagctgaccggactcttgagtctgctggaccacgagtatttatcagacacaacgttagagaagaagatggccgtggccagcatcctccagtcactccagcccttaccagcaaaggaagttagctacctgtacgtcaatactgcagatcttcacagcggcccctcgtttgtcgaatctttatttgaggaatttgattgcgatctgtccgatctgcgtgatatgcccgaggacgacggcgaaccttccaaaggggcatctccagagctggcaaaaagtcctcggctgcgaaatgcagcagacctgcctcccccattgcccaataagccgcctcccgaggattattacgaagaagcgctacccctggggccaggcaagtcccccgagtatatttcctcacacaacggatgcagccccagtcatagcatcgtagacggttactatgaggacgcggactcctcttacccagccacgagggtgaacggggaattaaagtcatcctataatgattccgatgccatgtcctcctcttatgagtcttacgacgaagaggaggaggaagggaagtctccacagcccagacatcaatggccatccgaggaagcatccatgcacttagtgcgtgagtgtcgcatctgcgcctttctccttaggaaaaaaaggttcgggcaatgggcgaaacagctcacagtcatccgcgaggatcagctcctttgctataagtcgtccaaggatagacagcctcatttgagactggcgctggacacttgctctattatttatgttcccaaggacagccggcataaacgccacgaacttcggttcacgcagggtgctactgaggtccttgttctggctctccaaagtcgcgagcaagcagaagaatggctaaaggtgatcagggaggtgagcaaaccggttggtggtgcagagggtgtggaggttcccagaagccccgtgttgttgtgtaaactggatctggacaaaagactctcccaggaaaaacagaccagcgattctgacagcgtgggggtgggggacaattgctctacgctgggcagaagagaaacttgcgaccacggaaaggggaaaaagtcctccctggccgagctgaaaggctccatgtcgcgggcagctggaaggaagatcactaggatcatagggtttagcaagaagaaaaccctcgccgatgatctgcagaccagctccaccgaagaggaggttccgtgttgtgggtacttgaacgttctagtgaaccaaggttggaaagagcggtggtgcagattgaagtgcaatactctttacttccataaggaccacatggatctgcgcactcatgtgaatgctatcgccctgcagggatgtgaagttgccccaggcttcgggccccgccacccgtttgccttcagaatcctgcggaataggcaggaggttgccattcttgaagccagctgctccgaagatatgggacggtggctcgggttgctcctagtggaaatggggtctcgcgtgactccggaagccctacattatgactacgtggacgtggagaccctgactagcatcgtcagtgcaggtaggaactccttcctgtatgcacgctcgtgtcaaaaccagtggcccgagcctcgggtttatgacgatgttccctacgagaagatgcaggatgaggaacccgagaggcccactggcgctcaggtgaagcgtcatgcttccagctgtagtgagaaatcacatagggtcgatcctcaggtgaaggtgaagcgccacgcaagcagcgctaaccagtacaagtacggtaaaaacagggcagaggaggacgcccgccgatatctcgtggagaaagagaagctggagaaagagaaggaaacaatccgtaccgagttaatcgccctacgccaggagaagagagagctgaaggaggctatccggagttcccctggagccaagttgaaagcactggaagaagctgtggcaacactagaagcacaatgccgagcaaaagaagaacgcaggatcgacctggaactgaagctggtcgccgtgaaggagcggctgcagcagagtttagctggggggcctgctctgggattgagcgtgtcaagcaagccaaagtccggagagtgggaaatgaaaaaaacctag

SEQ ID NO: 177682 - DNA, 2457 bp, synthetic construct
  misc_feature 1..2457: note = Description of Artificial Sequence: Synthetic coding sequence
  source 1..2457: mol_type = other DNA
atggagcggtacaaggccctggagcagctgctgaccgagctggacgattttttgaagatcttagaccaggagaatctgagctcaactgccctagttaaaaagagttgcctggctgaactgctgcgcctttacaccaagtcaagctcatctgacgaagaatacatatacatgaacaaggtgacaataaacaaacagcagaacgccgagtcacagggcaaggctccagaggagcagggattgctgccaaatggcgagcctagtcaacattccagtgctccccagaagtccctgccggatcttcctccacctaaaatgattcccgagagaaagcagttggcaatccctaagactgaatcacctgaaggatactacgaggaggctgagccttatgacacgagtctcaacgaagacggagaagcagtctcatcctcatacgagagttacgatgaagaagatggttccaaagggaagtctgctccgtatcaatggccctcaccagaggccgggatcgagctaatgagggacgcacgaatctgcgccttcctgtggagaaagaaatggttgggacagtgggcaaagcaactgtgcgtgatcaaagataaccggttgttatgctacaagagttctaaggatcattccccccagcttgacgtaaatctcctgggttccagcgtcatccacaaggagaaacaagtgaggaagaaggagcacaagttgaaaattacccctatgaatgcggacgtgatcgtgctcggtctgcagtctaaagaccaggcagaacagtggctgcgggtgatccaggaagtcagtggactgccgtccgagggcgcgtctgaagggaatcagtacaccccagacgcgcaacggtttaattgccaaaaaccagacattgcggaaaaatacctaagtgcttctgaatatgggtcttcagtcgacggacacccagaggtgcccgaaactaaggatgtcaagaagaaatgttccgcaggcctgaagctgtctaatttaatgaacctgggacggaagaagagtaccagtctcgagcctgtcgagcgaagtttggaaaccagcagctacttgaatgttctcgtgaactcacagtggaagagtcgctggtgctccgttcgcgataaccacctgcatttctaccaggaccggaatagatctaaggtagctcagcaaccactgagcctggtcggttgcgaggttgtgcctgacccaagccctgatcatttatacagcttcagaattttacataagggagaggagttggccaaacttgaggccaagagttctgaggaaatggggcattggctgggactgctgctaagcgaatcagggagtaagactgatccagaagaattcacctacgactacgttgacgctgaccgggttagctgcattgtatccgccgccaagaactccttactgcttatgcaacgcaaattcagcgagcctaacacatacatcgacggactgccgtcccaagacaggcaagaagaactctatgacgacgtcgacctctctgagctgacagccgccgtcgagcccactgaagaagccacacctgtggccgatgacccgaacgagagggagtccgacagggtctatctcgacctgacacctgttaagagcttcttacatggcccctcttccgcccaagctcaggcatcatctcctacactttcttgtctagataacgctacagaggcactccccgctgactccggccctggaccgacccccgacgagccctgtatcaaatgccctgaaaacttgggagagcaacagctggaatccttagaacccgaggatccaagcctccgtatcactactgtgaagatccagacagagcagcagcggattagcttccccccttcgtgtcccgacgcagttgtcgctacacctccaggggccagcccccctgtgaaagaccgcctgagagtgacttctgcagaaattaagttgggaaagaatcgaacggaggccgaggtgaaaagatacaccgaagagaaggaacgcctggaaaagaagaaagaggaaattaggggtcatttagcccagctccgtaaggagaaacgtgagttgaaagagacattgctgaagtgcaccgacaaagaggtcctggcctcgctagagcaaaaactaaaggaaatcgacgaggagtgtaggggcgaggagtcccgccgcgtggatctcgagttgtctattatggaagtgaaagacaacctgaagaaagcggaggccggccctgttacattaggtacaactgtagacactacccacctcgaaaatgtaagcccgcgacctaaggccgtaacgccagcatctgcacccgattgcacccctgtaaactcagccaccaccctgaagaatcgaccactatccgtggtcgtcacaggtaaaggcactgttcttcagaaggctaaggaatgggaaaagaagggcgctagctag

SEQ ID NO: 177683 - DNA, 2445 bp, synthetic construct
  misc_feature 1..2445: note = Description of Artificial Sequence: Synthetic coding sequence
  source 1..2445: mol_type = other DNA
atggagcggtacaaggccctggagcagctgctgaccgagctggacgattttttaaagatcctggatcaggaaaatcttagtagtaccgctctagttaagaagtcatgcctcgcagagctcctgcggctctataccaaaagctcttcctccgatgaagagtacatttacatgaataaggtgacaattaacaagcaacagaacgctgaatcccaaggaaaggcacccgaagagcagggtttactgcccaacggagagcctagccagcattcgtcggcccctcaaaaaagtctccctgacttacccccgcccaagatgatccctgagagaaaacagctggcaatcccaaagaccgagtctccggaaggttactatgaagaggctgaaccctacgacactagtcttaatgaggacggcgaggccgtgtcttccagctacgaaagctatgatgaggaggatgggagcaaaggaaaaagtgccccttatcagtggccatcccccgaggccggcattgagctgatgagggacgcgaggatctgcgcttttctctggcgcaagaaatggctcgggcagtgggctaagcaactgtgcgtgatcaaggacaatagactgctttgctacaaaagctctaaggatcatagtccccagctggacgtgaaccttctgggatccagcgtgatccataaagaaaagcaggtgcggaagaaagaacataaattgaagatcacccccatgaatgctgatgtcattgtccttggcctacagtctaaagaccaggcggagcaatggctcagggtcattcaggaggtgtccgggctgcccagcgaaggagcctctgagggaaatcaatacactccagacgcccagcggtttaattgccagaagcctgacattgccgagaagtatctgagtgccagcgaatatggcagctctgtcgacggtcatcctgaagttcctgagactaaagatgtcaaaaagaagtgtagcgccgggctgaaactcagtaaccttatgaacctcggaaggaaaaagtctacctcgttggagcccgtagagcgcagtctcgaaacgtcctcctacctgaatgttctggtgaactctcagtggaagagtcgctggtgttctgtaagagacaaccatttgcatttctaccaggataggaataggtctaaagtggcacagcaacctttgtcccttgtgggctgtgaagtggtcccggacccttcaccggaccatctgtactctttccgtatcctgcataagggggaggaactggcaaaacttgaggctaaatcttcagaggagatgggacattggttgggcctgctgctgagcgaaagcgggtcaaaaactgatcccgaggaattcacctatgactacgttgatgctgaccgagtgtcctgcattgttagcgcggcaaagaattcattgctcctgatgcagcggaagtttagcgagcctaacacttacattgatgggcttccttctcaagaccgccaggaggagctctatgacgatgtagatctgtccgagctgactgccgcagtcgagcccaccgaggaagcaacccccgtggctgatgaccctaacgaacgggagtctgatagagtgtaccttgacctcacacctgtgaagtcctttctgcacgggcctagttccgcacaggctcaggcctcctctccgaccctctcgtgtttggacaatgccacggaagcactccccgcagattccggaccaggccctacccctgacgaaccctgcattaagtgtcccgaaaatctgggggaacagcagttggaaagtttggagcctgaggatccttcgctccggataactactgtgaaaatccagacagaacaacagagaattagttttcccccttcttgtccagatgctgttgtcgccacacctcctggcgcttctccgcctgtgaaggaccgtcttagggtcacttctgccgaaataaaattaggcaaaaaccgtacagaagccgaggtaaaacgctatacggaagagaaggagcggctggagaaaaagaaggaagaaatcagaggtcacctggcacagctgcgcaaagagaagagggaattgaaagaaacactcctgaagtgcacggacaaagaggtgctggccagtctcgaacagaaattaaaagaaattgacgaagagtgcaggggcgaggaatccaggcgggttgatctggagctttcaattatggaggtgaaggataaccttaagaaggcggaggccggtccagtcacgctggggaccaccgtagacactacccatctggagaacccaaaagctgtaactcccgccagcgctccagactgcactccagtgaacagtgcaacgactctaaaaaacagacccctttctgtggtggtgacaggcaagggtactgtcttgcagaaggctaaggagtgggagaagaagggtgcatcttag

SEQ ID NO: 177684 - DNA, 2526 bp, synthetic construct
  misc_feature 1..2526: note = Description of Artificial Sequence: Synthetic coding sequence
  source 1..2526: mol_type = other DNA
cagcgggtgcgggccctggagcagctgctgaccgagctggacgactttctcaaaatactcgatcaggaaaatctcagcagcacagccttggttaagaaaagctgtcttgccgaactcttgaggctttacaccaagagttcctccagtgacgaggaatacatctacatgaataaggtaacaatcaacaaacaacagaacgctgagagccagggaaaggctccagaagagcaagggctgctgcccaacggagagccctcacaacactcctcagcaccacagaagtccctgcccgatctgcctcctcctaaaatgattcccgagaggaagcagctggcaattccaaagacagagtccccggaggggtactatgaagaggcagaaccctatgatacatcactgaacgggcacagcggaggcttcctgcccaccggggtgcctagatgggtccaagtgcctgagggagtgatctacgcgacaatcacactagaggatggtgaagccgtctcaagcagttacgaatcttacgatgaggaagatggttctaagggaaagtccgctccctatcagtggccaagcccagaggccggtattgaacttatgagggacgccaggatatgtgccttcctctggcgtaaaaagtggttgggccagtgggcgaaacagctctgcgtgatcaaggacaaccgtctgctctgttataaatcaagtaaggatcatagtcctcagctggacgtaaacctccttggcagctcggtgatccacaaagaaaagcaggtccggaaaaaggaacacaagttgaaaattacccctatgaacgccgacgtgattgtgcttggactgcagtccaaagaccaagccgagcagtggctacgggtgattcaagaagtatctggcctcccttctgaaggggcctcggaggggaaccagtacaccccagatgcgcagcggtttaattgccagaaacctgacatcgccgaaaagtatctgagtgctagcgagtacgggagctccgttgatggacaccccgaggtgcccgagactaaggacgtcaagaagaaatgcagtgctggcctcaaactgtctaatctgatgaacctgggaagaaaaaagtccacttcactagagcccgtggagcgttctttggagacctcttcgtatctcaatgttctggttaacagccaatggaagtctaggtggtgcagcgtgcgtgataaccacctgcatttttaccaggacagaaaccggagtaaggtcgcacagcagcccttgagtcttgtgggctgtgaggtggtccccgatccctcaccagaccacctatattcctttcgcatcctacacaaaggagaggaacttgctaagctcgaggccaagtcctcagaagaaatggggcactggctcgggctcctgctgagcgagagcgggtcaaagaccgatcccgaagagttcacctacgattatgtggacgctgatcgggtgtcttgtatcgtttcggccgctaagaactccctcttacttatgcagcgcaagttctccgagcctaacacttatattgacggactgcctagtcaagaccggcaggaagaactctacgacgatgtggacctcagcgagttgactgcagcagtagagccaactgaggaagcaacccccgtcgccgatgatcccaacgaaagagagagcgaccgcgtgtacctggacttgactcctgtcaaaagctttttgcatgggccctcatccgcccaggcccaggcatcctccccaactttgtcatgcctcgataatgcgactgaggctctacccgcggattcaggccccggaccaactcctgatgagccatgtatcaaatgccctgagaatttgggagagcagcagctggaaagtctggaacctgaggacccctctctgagaattaccacggtgaagattcagaccgaacagcagagaatatctttccccccctcttgtcccgacgctgtggttgccaccccccctggcgcctccccccccgttaaggaccggctgagggtgacctctgccgagattaagctggggaaaaacaggaccgaggctgaggtcaaaaggtatactgaggaaaaagaaaggctggagaaaaagaaggaagaaatcagaggacatctcgctcagctgaggaaagagaagagagagctcaaggaaactttactcaagtgcacggataaggaagtcctggcctccctggagcaaaagctgaaagagattgacgaagaatgcaggggcgaagagtcccgcagagtcgacttagagctctccatcatggaagtcaaagacaatctgaaaaaagcagaggcaggccctgtaactctcggaacgaccgtagacacaacacatctcgagaatcctaaggcggtgacgccggcttccgcaccagactgcactccagtgaactcagccactaccctcaagaaccgtccattgtccgtcgtcgttacggggaaaggaacagtacttcagaaagcaaaagagtgggagaaaaagggtgcatcatag

SEQ ID NO: 177685 - DNA, 939 bp, synthetic construct
  misc_feature 1..939: note = Description of Artificial Sequence: Synthetic coding sequence
  source 1..939: mol_type = other DNA
atggagcggtacaaggcccagggctgctgctgcctggtggtgcagcggaggatcagacaagtgtctgcctctttggaacagctactcaccgagctggatgatttcttaaagatcctggaccaggagaacctgagcagtactgccctcgtcaagaaaagctgtctggccgaacttttgcgcctttatacaaagagctcctcttctgacgaggagtatatctacatgaacaaggtgaccattaacaaacagcagaacgccgagtcccaggggaaggcccctgaagagcaggggctgctcccaaacggcgagccttcccaacatagcagtgcacctcagaagtccctgcccgacctcccccccccgaaaatgattcccgagcggaaacaacttgcaattcctaagaccgagtcgcctgaagggtattatgaggaagccgaaccgtatgacacatctctgaatgaagacggtgaggccgtttcttctagctacgagtcttatgatgaggaagacggatctaaagggaagagcgccccctaccagtggccttcaccggaggctgggattgagctgatgcgggatgcgaggatctgcgcctttctgtggcgaaagaaatggctcggacagtgggccaagcagctgtgcgttattaaagacaaccgcctactgtgctacaagtcctctaaggatcacagccctcaactggacgtaaacctactgggatccagcgtcattcataaggaaaagcaggtccggaagaaagaacacaagctgaaaatcacacccatgaacgctgacgtcatcgtgttaggcctccaatccaaggatcaggcggagcagtggctgagagtgattcaggaagtctccggactaccaagtgaaggcgcttcagaaggaaaccaatacaccccagacgctcagcggttcaattgtcagaaatag

SEQ ID NO: 177686 - DNA, 939 bp, synthetic construct
  misc_feature 1..939: note = Description of Artificial Sequence: Synthetic coding sequence
  source 1..939: mol_type = other DNA
atggagcggtacaaggcccagggctgctgctgcctggtggtgcagcgacgaataaggcaggtgagtgcttctttagagcagctcttgacagagctagatgatttcctgaaaattcttgaccaggaaaacctctcaagcacagccctggtcaaaaagagctgcctggcagagttgctgcgcttgtacacaaaatcaagctcttcagacgaggaatacatttatatgaacaaggtgaccattaacaagcagcagaacgctgagagtcaaggcaaagcgccagaggaacaaggactgctgcccaatggcgaaccttcccagcattcctcagccccccagaaaagtttacctgacttaccaccgccaaaaatgattcctgaaagaaagcagctggccattccaaagaccgaaagtccagaaggctactacgaggaggcggagccatatgacacctcactaaacgaggacggtgaagccgtgtccagcagctacgaatcctatgatgaagaagacggctccaagggaaagtctgccccgtaccaatggccctctcctgaagccggtatagaattaatgcgcgatgctagaatctgtgctttcctgtggcgcaagaagtggctgggacagtgggcaaagcaactgtgcgtgatcaaagacaatcggttactgtgttataagagcagcaaagatcattctccccagctggatgtgaaccttctggggtccagcgtgattcacaaagaaaagcaggttcgcaagaaggagcacaagctgaaaatcacccctatgaatgctgacgttattgtcctcggacttcagagcaaggaccaggcagagcagtggctcagggtcatccaagaggtgtctggactgcctagcgaaggagcctctgagggtaatcagtacacgccggacgcacaacggtttaactgccagaagtag

SEQ ID NO: 177687 - DNA, 2616 bp, synthetic construct
  misc_feature 1..2616: note = Description of Artificial Sequence: Synthetic coding sequence
  source 1..2616: mol_type = other DNA
atggagcggtacaaggccctggagcagctgctgaccgagctggacgacttccttaagattctggatcaggaaaacctgtcctccaccgctctagtgaaaaagagctgcctagcagagctattacgcctgtataccaagtcttcctcatcggatgaggagtatatctacatgaacaaggttactatcaacaaacagcagaatgccgaatcacaagggaaagcccccgaagagcagggtctgttgcctaatggtgagccttcccaacactcctcagccccccaaaaatcgttgccagatctcccccccccaaaaatgaggattttaactttgggccagatctcaggagctcagtcttttagtcccgatgggacccatctcaccggcacagaattccttggcggctggagttggcgaccctctcagatccggcttatgagccctgggacacactggggagacctgacagccactgagatccctgagagaaagcagctcgcaatccctaagacagaaagtcctgagggctattacgaggaggcagaaccttacgatacttcactgaatgaagacggcgaggccgtctcctcatcctacgagtcctacgacgaggaggacgggagtaagggtaaatctgcaccctatcagtggccatcaccagaggcggggatcgagctgatgcgggatgcccgcatatgtgcctttctgtggaggaagaaatggttggggcagtgggcaaaacagctgtgcgtgatcaaggataacagacttctgtgctataagtccagtaaagatcatagcccccaactcgacgtgaacctactagggtcatcggtgatccataaggaaaaacaggtgaggaagaaggagcacaaattgaagattaccccaatgaatgcagatgtgatagtattagggctccagagtaaggaccaggccgaacagtggctgcgggtaattcaggaggtgagtgggctaccttccgagggagctagcgagggaaaccagtatacccctgacgcccaaagattcaactgccagaagccagacatagctgagaaatatctgagcgctagtgaatatgggtctagcgtggacggacaccccgaggtgcctgaaactaaggatgtgaaaaagaaatgcagtgccggcctcaagctgagtaatctcatgaatttgggaagaaaaaaatctacttcactagaaccagtcgaacggtcgctggaaacatcctcctatctgaacgttctggttaactcccagtggaaaagccggtggtgtagcgtgcgcgataatcacctccacttctaccaggaccgaaatcgaagtaaagtggcccagcagccactgtctctggtgggctgcgaggtagttcctgacccctcacctgaccatttgtactccttccgcatactccataagggagaggagctggccaagctcgaggccaaatctagcgaagagatgggtcactggctcggcctcctgctgtccgaatctggtagcaaaaccgatcccgaagagtttacttacgattatgttgacgccgaccgggtttcctgcatcgtgtctgcggccaagaactcactgctgcttatgcagcgaaagtttagcgaacccaacacctacatcgatggactgccctcccaggatagacaagaagagctgtatgatgatgtggacctgtctgaattaaccgccgcggttgaaccaaccgaagaggctacacctgtcgccgacgacccgaatgagagggagtccgatcgagtgtatttggaccttacacccgtcaagtcatttctgcatggtccttcttcggcccaggcccaggcttcctcccctaccctgagctgtctggataatgccacagaagccctacctgccgatagtgggcctggcccaacaccggatgaaccctgcatcaaatgtcctgagaacctgggagaacagcagctggaatccctggagccggaagatcctagcctgagaattacgaccgtgaaaatacaaaccgaacaacagcggattagctttcccccctcctgccccgatgcagttgtggcgactccccccggcgcgagtcccccagtcaaagatagattgagggtaacctctgccgaaatcaaactggggaagaatcgcacagaagcagaggttaagcgttacacagaagagaaagaacggctggaaaaaaagaaggaagagattcgggggcaccttgcacagttgaggaaggaaaagcgagagctgaaagaaacgttgctgaaatgtaccgataaggaagtgctggcttctctggagcagaaactgaaagagatagatgaagaatgtcgaggcgaggaatcccgcagggtggatctggagctgagcattatggaagtcaaggacaacctgaagaaggccgaggctgggccagttaccttaggaacaacagtggatactacgcaccttgaaaatgtctctccaaggcccaaggcggtgacacccgcatctgcccctgactgcaccccagtgaactctgccacgacactgaaaaacaggccgctgagcgtggtcgtcactgggaagggaacagtgctacagaaagctaaagaatgggagaaaaagggggcctcttag

SEQ ID NO: 177688 - DNA, 1002 bp, synthetic construct
  misc_feature 1..1002: note = Description of Artificial Sequence: Synthetic coding sequence
  source 1..1002: mol_type = other DNA
atgtgcgaggaggagaccaccgccctggtgtgcgacaacggcagcgggctgtgcaaggctggtttcgctggggatgacgcccctcgtgccgtttttcctagcattgtcgggagaccccggcatcagatctggcaccactcattctacaacgagctacgcgtggcccccgaagagcaccctacacttcttaccgaagctcctttgaaccctaaggcaaatcgcgagaagatgacacagatcatgttcgagacgtttaatgtgccagctatgtacgtggcaatacaggcagttctctccctttatgcctcaggtcgtacaacaggtatcgtgctggattctggggacggggtgactcacaatgtgcctatctacgaaggatacgccttgccgcacgctataatgcgccttgacctcgctggaagggatctgactgattatctcatgaagatcctcacggaacgtgggtactcctttgtgacgactgctgaacgggaaattgtccgtgatatcaaagagaagctgtgctatgtggccctggacttcgaaaacgaaatggcaacagccgcttctagcagctctcttgagaagagctatgaactccctgatggtcaggtgatcactattgggaacgagaggttcaggtgtcccgagaccctgttccagcccagcttcattggcatggaatcggccggaatccacgagacaacttacaacagcatcatgaaatgtgacatcgatatcagaaaggatctatatgccaacaacgtactgtctggcgggactaccatgtatccaggaattgccgatcggatgcagaaagagatcacggcgcttgcgccaagcactatgaagattaagatcattgcaccacccgaacggaagtacagtgtttggatcgggggatctattctggcgtctttaagcacttttcagcagatgtggatttctaaaccagaatatgacgaggccggcccctccatcgtccatcgcaagtgtttttag

SEQ ID NO: 177689 - DNA, 1113 bp, synthetic construct
  misc_feature 1..1113: note = Description of Artificial Sequence: Synthetic coding sequence
  source 1..1113: mol_type = other DNA
atgagcctgcaccagttcctgctggagcccatcacctgccacgcctggaaccgggaccggacacagatagccttatcccccaataaccatgaggtccacatttataagaaaaatggtagccagtgggtaaaggctcatgaattgaaggaacataatggccacatcaccggcatagattgggctccaaaatctgataggattgtaacatgtggcgctgatagaaacgcatatgtctggtctcagaaggacggggtgtggaagcccaccctggtgattctccgaatcaaccgtgcggctacctttgttaaatggtcaccactggaaaataaatttgccgtgggaagtggtgcgaggctgattagcgtttgttatttcgagagcgagaatgactggtgggtaagtaagcatatcaagaagcccattagaagtacagtgctgtctttagactggcatcccaataatgtcttattggccgcgggatcttgcgacttcaaatgtcgtgtcttttctgcctacatcaaagaagtggacgaaaaacccgcgtcaaccccctgggggagtaaaatgccttttggacaactcatgagcgaatttggagggagcggcactgggggttgggtccacggcgtttcattttccgcctctggaagccggctggcatgggtatctcatgatagtaccgtgtccgtcgctgacgcgagcaagtctgtacaggtgtccacgctcaagaccgagtttctcccactgctgtcagtgagcttcgtctccgaaaactcagtagtggctgcaggacacgattgttgtcctatgttgtttaattatgatgaccgagggtgcctcactttcgtatcaaaactagatatccccaaacagtcaatccaaaggaacatgagtgccatggagagatttaggaacatggacaaaagggccaccacagaagataggaatacagctctggagaccctgcaccagaactctattacccaggttagcatctacgaagtcgacaaacaagattgtagaaagttttgtactaccggcatcgacggagcaatgaccatctgggacttcaaaacactggagagttcgattcaggggctacggatcatgtag

SEQ ID NO: 177690 - DNA, 1038 bp, synthetic construct
  misc_feature 1..1038: note = Description of Artificial Sequence: Synthetic coding sequence
  source 1..1038: mol_type = other DNA
atgcacgagcggttcatccactgcttctgcatcgactgggcccccaagtctgacagaattgttacctgtggtgccgatcggaatgcctatgtgtggagtcagaaagatggcgtgtggaagcctacactcgtgattctcagaataaatcgtgccgccacttttgtgaagtggtctccacttgagaacaagttcgcggtcggtagcggcgccagactgattagcgtctgctattttgagtctgaaaatgactggtgggtgtctaaacacattaagaagcctattaggtcaaccgtactaagcctagactggcaccctaataacgtgctcttggcagccggatcttgcgacttcaaatgtagggtctttagcgcttacatcaaggaggtggatgagaaaccggcctcaacaccctgggggtccaaaatgcctttcggtcagctcatgtccgagttcggcgggagcggcaccggaggatgggtgcacggtgtgtccttctccgcctccggatcccggcttgcatgggtgtcccacgattctacagtcagcgttgccgacgctagtaagagcgttcaggtcagcacgctcaagaccgagtttctgcctctcctcagtgtgtctttcgtgagcgaaaacagcgtagtggccgctggacatgattgctgccccatgctgtttaactacgacgatcgcggatgcctgactttcgtgtccaaacttgatatcccaaagcagtctatccagcgtaatatgtccgccatggaaaggttccggaatatggacaagcgggctaccaccgaagacaggaacactgcattggaaacactccaccaaaacagtataactcaggtgagtatatatgaggtcgacaaacaggactgtcgcaagttctgcacaaccggcattgacggggcgatgacgatatgggactttaaggaaccctcccggcacgggctcccgcagctgccggggggggcacaccagctcccgcggctggagcaggggcctcaccccgactgtcacctgccacagcagccttag

SEQ ID NO: 177691 - DNA, 1119 bp, synthetic construct
  misc_feature 1..1119: note = Description of Artificial Sequence: Synthetic coding sequence
  source 1..1119: mol_type = other DNA
atggcctaccacagcttcctggtggagcccatcagctgccacgcctggaacaaggacaggacacagatcgccatttgccctaacaaccacgaggtccatatctacgaaaaatccggggcgaagtggacaaaagtgcacgagctgaaggaacataatgggcaagtgacgggaattgattgggcacctgagagcaaccgcatcgttacttgtggtacagacagaaatgcttacgtgtggactctgaagggtaggacatggaaacctacactggtcattctgcgcatcaacagggctgctaggtgtgtgcgatgggctccaaacgagaacaagtttgcggtaggtagcggaagtagagtcatttcaatctgttattttgaacaggagaacgactggtgggtatgcaagcacattaagaagcctatacggtctacagtgctgtctctagactggcaccccaataatgtgctcctagcagctggcagctgcgatttcaagtgcaggatcttctcggcctacattaaggaggtggaagagcgcccagcccccaccccctggggatccaagatgccattcggcgagcttatgtttgagtctagctccagttgtggatgggttcacggagtgtgctttagcgcatccggctccagagtggcttgggtctctcacgactcaactgtgtgcctcgccgatgctgataagaagatggcagtggccacgttagcctctgagacactcccactgctagctctgaccttcattacagacaattcgctcgtcgcagcgggacatgactgcttcccagtgttgtttacttacgacgccgccgccggaatgctgagctttggtgggcgtttagatgtgcccaaacagtccagccaaagaggccttaccgcacgggaaagattccagaatctggataagaaagcaagcagtgaagggggcaccgctgctggcgctggtttagactcactgcacaagaactccgtatcacagattagcgttctttctggcggaaaggccaaatgtagccagttctgcacaacggggatggacggcgggatgagcatctgggatgtaaaaagcctcgaaagcgcactgaaggatctgaagatcaagtag

SEQ ID NO: 177692 - DNA, 309 bp, synthetic construct
  misc_feature 1..309: note = Description of Artificial Sequence: Synthetic coding sequence
  source 1..309: mol_type = other DNA
atggcctaccacagcttcctggtggagcccatcagctgccacgcctggaacaaagacagaacccagatagctatctgccccaataaccacgaagtgcacatctacgagaagtctggcgccaaatggacaaaagtgcacgagcttaaggaacataatgggcaggtcaccgggattgactgggccccagaatcaaaccggatcgttacttgtggcacagatcgcaatgcttatgtctggacactgaaaggaaggacatggaagccaaccctggtgattctgcgaattaacagagccgctcggtgcgtttag

SEQ ID NO: 177693 - DNA, 393 bp, synthetic construct
  misc_feature 1..393: note = Description of Artificial Sequence: Synthetic coding sequence
  source 1..393: mol_type = other DNA
atggcctaccacagcttcctggtggagcccatcagctgccacgcctggaacaaagatcgcacccaaattgccatttgccccaacaatcacgaggttcacatctacgaaaaaagcggcgcaaagtggacaaaggtgcatgaattgaaggagcacaacggacaggttacgggaattgattgggcaccagaatctaaccgcattgtaacatgcggcacagacaggaacgcgtacgtgtggactctcaaggggaggacatggaagccaactcttgtgatcctgaggataaatagggccgcacggtgtgtgagatgggcgcctaatgagaacaaattcgccgtcggttcaggatcccgcgtaatttcaatatgctatttcgaacaggaaaacgactag

SEQ ID NO: 177694 - DNA, 252 bp, synthetic construct
  misc_feature 1..252: note = Description of Artificial Sequence: Synthetic coding sequence
  source 1..252: mol_type = other DNA
atggcctaccacagcttcctggtggagcccatcagctgccacgcctggaacaaagaccgcacgcagattgcaatttgtcccaataaccatgaagtccatatttacgagaaaagtggagctaaatggacaaaggtgcatgagttaaaagaacacaacggccaggtcacggggatcgactgggcacccgagagcaaccggatcgtgacatgcgggaccgaccggaatgcttacgtctggaccctaaaggggtag

SEQ ID NO: 177695 - DNA, 402 bp, synthetic construct
  misc_feature 1..402: note = Description of Artificial Sequence: Synthetic coding sequence
  source 1..402: mol_type = other DNA
atggcctaccacagcttcctggtggagcccatcagctgccacgcctggaacaaagataggactcaaatcgctatctgtcccaataaccacgaagtgcacatctatgaaaagtcaggagctaagtggacaaaagtccatgaactgaaagagcacaacgggcaggtcaccggaattgactgggcaccggagagcaaccgcatagtgacttgcggcacggaccggaatgcttatgtctggacactgaagggccggacatggaagcctacactggtcatccttcggataaacagggcagcccgttgcgttagatgggcacctaacgagaacaaatttgccgtgggctccggaagtcgggtcatctctatctgttactttgaacaggagaacgactggtgggtgtag

SEQ ID NO: 177696 - DNA, 66 bp, synthetic construct
  misc_feature 1..66: note = Description of Artificial Sequence: Synthetic coding sequence
  source 1..66: mol_type = other DNA
atggcctaccacagcttcctggtggagcccatcagctgccacgcctggaacaaggacaggacctag

SEQ ID NO: 177697 - DNA, 402 bp, synthetic construct
  misc_feature 1..402: note = Description of Artificial Sequence: Synthetic coding sequence
  source 1..402: mol_type = other DNA
atggcctaccacagcttcctggtggagcccatcagctgccacgcctggaataaggaccgcacgcaaatcgccatttgtcccaacaaccatgaggtccatatctacgagaagagcggggcgaaatggacgaaagtccacgagctgaaggagcacaatgggcaggttaccgggatcgattgggcccccgagtccaatagaattgtgacttgtggtacagatcgcaatgcctacgtttggacactgaaggggcgtacgtggaagcctaccctggtgatactgagaattaatcgggctgctcggtgcgtgagatgggcccctaacgaaaacaagttcgccgtcggtagtggctctagagtcatctccatttgctatttcgagcaggagaacgattggtgggtctag

SEQ ID NO: 177698 - DNA, 327 bp, synthetic construct
  misc_feature 1..327: note = Description of Artificial Sequence: Synthetic coding sequence
  source 1..327: mol_type = other DNA
atggcctaccacagcttcctggtggagcccatcagctgccacgcctggaataaggatcgcacccagatcgcaatttgcccaaataatcatgaagtgcacatctatgaaaagagcggtgccaaatggaccaaagtccacgagttgaaggagcacaacggccaagtcaccggaattgactgggcaccagaaagcaatagaatcgtgacttgtggcactgaccgcaatgcatacgtttggacgctgaaaggcaggacttggaaacctacgttagtcattttgcgaattaatagagcggccagatgcgtcaggtgggcacccaacgagtag

SEQ ID NO: 177699 - DNA, 1119 bp, synthetic construct
  misc_feature 1..1119: note = Description of Artificial Sequence: Synthetic coding sequence
  source 1..1119: mol_type = other DNA
atggcctaccacagcttcctggtggagcccatcagctgccacgcctggaacaaagatagaacgcagattgccatttgcccaaacaaccacgaggtgcatatctatgagaagagtggggccaaatggacaaaagtgcacgaattgaaggaacacaacggacaggtcacaggaatcgactgggctcccgaatccaataggattgtgacctgtggaactgatcggaatgcttacgtttggacactaaaggggcgcacttggaaacccaccttagtgatactgcggatcaatagggcagcccggtgcgtaagatgggcccctaacgagaataaatttgctgtagggagcggatcccgcgtcatcagcatttgttacttcgagcaggaaaacgattggtgggtatgtaagcatatcaagaagccaattcgatcaactgtgctgtcacttgactggcaccccaacaacgtgttgctggctgcaggatcatgtgatttcaaatgccggattttcagtgcctatatcaaggaggtcgaagagcggcctgcccctaccccgtgggggtccaagatgccttttggcgagctgatgttcgaaagctctagttcatgtgggtgggtccatggcgtgtgcttctccgctagtggttcacgggtagcctgggtgtctcacgacagcaccgtgtgtctggccgacgctgataagaagatggctgttgctactttggcctctgagacgctcccacttcttgccctcactttcattacggataactcgttggtggcagctggccatgactgcttccctgtgctgtttacctatgacgctgctgctggaatgctctcttttggcggccggttggatgtgcctaaacaatcgtcgcaacgaggattgactgcgcgggagaggtttcaaaacctagacaaaaaagcatccagtgaaggcggaacagccgccggtgccggcctcgatagcttacacaagaacagtgtttcacagatttcagtgctgagtggggggaaagcaaaatgctcccagttctgcacaactggcatggacggcgggatgtctatttgggatgtgaagtctctagaatcggccttgaaagaccttaagatcaagtag

SEQ ID NO: 177700 - DNA, 387 bp, synthetic construct
  misc_feature 1..387: note = Description of Artificial Sequence: Synthetic coding sequence
  source 1..387: mol_type = other DNA
atggcctaccacagcttcctggtggagcccatcagctgccacgcctggaacaaagacagaactcagattgcaatctgccccaacaaccacgaagtacatatctacgaaaaatcaggggccaagtggactaaggtgcatgagctgaaagagcacaatggccaggtgacaggcatcgactgggccccagaatcaaacagaatcgtcacttgtgggacagatcgcaatgcgtatgtctggacgctaaagggtagaacctggaaacctaccttagttatcctgaggataaaccgagccgctagatgcgttcgttgggcccccaatgagaacaaatttgccgtaggcagtgggagccgcgtgattagcatctgttatttcgaacaggaatag

SEQ ID NO: 177701 - DNA, 402 bp, synthetic construct
  misc_feature 1..402: note = Description of Artificial Sequence: Synthetic coding sequence
  source 1..402: mol_type = other DNA
atggcctaccacagcttcctggtggagcccatcagctgccacgcctggaacaaggatagaacacagatcgctatatgtccaaataaccatgaggtccatatttacgagaaaagtggcgcgaaatggactaaggtgcatgagttaaaggagcataatggacaggtgacaggcatcgattgggcgcccgaatcgaatcgtatcgttacctgcgggactgataggaacgcctacgtgtggactctgaagggccggacatggaagcccaccctggtgattcttcgcattaaccgggctgcgagatgtgtgcggtgggctcccaatgagaataaattcgctgttggtagtggaagcagagtaatttcaatctgctacttcgaacaagagaacgactggtgggtttag

SEQ ID NO: 177702 - DNA, 903 bp, synthetic construct
  misc_feature 1..903: note = Description of Artificial Sequence: Synthetic coding sequence
  source 1..903: mol_type = other DNA
atgatcctgctggaggtgaacaaccggatcatcgaggagaccctggctttgaagtttgaaaacgccgccgctggtaataagccagaagccgttgaagtcacattcgctgactttgacggagtgctttaccacataagcaacccgaacggggataaaacgaaagtaatggtgtctatctctctcaagttttacaaggagctgcaggctcatggagctgatgagcttttaaaacgagtgtacggatcatttctggtaaaccctgagagtggatacaatgtatcacttctgtacgacctcgagaatttacccgcttctaaggattccattgttcatcaggccggaatgctgaagcgtaattgttttgcatctgtctttgagaaatattttcaatttcaggaggagggaaaggaaggagaaaatcgtgccgtaattcactaccgagacgacgaaacaatgtatgtggagagcaagaaagaccgtgtaactgtggtcttttccacagtcttcaaggatgatgatgacgtggtcatcggcaaggtgttcatgcaggagttcaaggagggcagaagggctagccacacggccccacaggtcttattcagtcaccgagaaccccctctggagctgaaggacacagacgcagcagtgggcgataacatcggctatattactttcgttctatttccacgacacacgaacgcatccgcccgagacaatacaataaatctaatacacactttccgggactacttgcactatcatatcaagtgttccaaggcttatattcacactcgaatgagggcaaaaacatcagattttttaaaagtattaaacagggctcgaccagacgccgaaaagaaggagatgaagacaatcaccggaaagaccttttcttccagatag

SEQ ID NO: 177703 - DNA, 903 bp, synthetic construct
  misc_feature 1..903: note = Description of Artificial Sequence: Synthetic coding sequence
  source 1..903: mol_type = other DNA
atgatcctgctggaggtgaacaaccggatcatcgaggagaccctggcactcaagttcgaaaatgccgcggcggggaacaagccagaggccgtggaggttacattcgctgactttgacggggtgttgtaccatatttctaaccccaatggagataagactaaggtgatggtgagtatttccctcaagttttataaagagctacaggcacatggagccgatgagctcctgaaaagggtgtacggctctttcctggtgaatcccgaatcagggtacaacgtgagcctgctgtatgatctcgagaacctgcccgcctccaaagattccatagtacaccaggcaggtatgctaaagcgcaactgttttgcctccgtgtttgaaaaatattttcagtttcaggaggagggtaaagagggggagaacagggccgtgattcactatagggacgacgagaccatgtatgtggagagcaagaaggacagggtaacagtggttttctcgacagtgttcaaagatgatgacgacgtcgttataggcaaggtgtttatgcaggagtttaaagaagggagacgggcatcccacaccgcaccccaagttcttttttcacatcgggagcccccacttgagctaaaggatacagatgctgctgtgggcgacaacataggatacatcactttcgtcctcttccctaggcatacaaatgcctctgcccgtgataacaccattaatttgatccatacattccgggactacttacactatcatattaagtgttccaaagcatacattcacactcgtatgcgggccaaaactagtgatttcctgaaggttttgaatagagctcggccagacgctgagaaaaaggagatgaagacaattactggcaaaacattctcctcaaggtag

SEQ ID NO: 177704 - DNA, 273 bp, synthetic construct
  misc_feature 1..273: note = Description of Artificial Sequence: Synthetic coding sequence
  source 1..273: mol_type = other DNA
atgatcctgctggaggtgaacaaccggatcatcgaggagaccctggctttgaaatttgaaaacgctgctgctgggaataaacctgaagccgtcgaggtaacctttgctgactttgacggtgtgctctaccacatctccaatcccaacggagacaaaactaaagtgatggttagtatctccctcaagttctacaaggagctccaggcacatggagcagatgaactcctgaagagggtctatggctcctttctcgtgaaccctgagtccggctag

SEQ ID NO: 177705 - DNA, 864 bp, synthetic construct
  misc_feature 1..864: note = Description of Artificial Sequence: Synthetic coding sequence
  source 1..864: mol_type = other DNA
atgtgcgacgaggacgagaccaccgccctggtgtgcgacaacggcagcggccttgtgaaggccggtttcgcgggcgatgatgctcctcgcgctgtgtttcccagcatcgtgggacgcccgaggcaccagggcgtcatggtcggcatgggccagaaggattcttacgtgggggacgaagctcagtcaaagcgggggatcctgacacttaaatatcctatcgagcacggtatcataaccaattgggatgacatggaaaaaatttggcaccacacgttttataacgagctacgagttgctcctgaggagcaccctacactcttgactgaagccccgctgaacccaaaggctaatcgtgaaattgtccgagacatcaaggagaaattatgttacgtagccttggatttcgaaaatgaaatggctaccgcagcaagctcttcgtcactggagaagtcatacgagctccctgacgggcaagtgattactatcgggaatgaaaggttccgctgcccagaaaccctttttcagccgtcgttcatcggtatggaatctgccggaattcatgagaccacatataatagcattatgaagtgcgacatagacatacggaaggacctgtacgcaaacaatgtcatgtccggaggaaccacaatgtatcccggcattgccgataggatgcagaaggagataactgccctcgctccttcgaccatgaaaataaaaataatagctccccccgaaagaaagtattctgtctggattgggggctcgattctggctagcctcagcacatttcagcaaatgtggataacaaaacaggaatatgacgaggctggcccgtcgatagtccacagaaagtgtttttag

SEQ ID NO: 177706 - DNA, 765 bp, synthetic construct
  misc_feature 1..765: note = Description of Artificial Sequence: Synthetic coding sequence
  source 1..765: mol_type = other DNA
atgtgcgacgaggacgagaccaccgccctggtgtgcgacaacggctctgggctcgttaaggccgggtttgctggtgacgacgcccctagggccgtgtttccaagcattgtggggcggccaagacatcagggagtgatggtgggcatggggcagaaagactcctacgttggggacgaagctcagtcgaagcgtggtatactcactctcaagtacccaatcgagcacgggattataacaaattgggacgacatggagaaaatatggcatcataccttctacaatgaattgcgcgtggcacccgaggagcacccaacactgctgacagaggcgccccttaacccgaaagccaatcgcgaaaagatgacccagataatgttcgaaacgtttaacgtccctgcaatgtacgtggccatacaagcagtgctcagcctctacgcctctggtagaaccactggaatcgtgctcgacagcggagatgggatcatgaaatgcgacattgacattcgtaaggatctctacgccaataacgttatgtccgggggaaccacaatgtatcccggaatcgccgaccggatgcagaaagaaatcactgccttggctccatctacgatgaaaataaagattatcgcgccaccagaaagaaagtattcagtgtggataggaggcagtatattggcatcactatccacttttcaacagatgtggataacgaaacaggaatacgacgaggccggaccatctatcgtacaccgcaagtgtttctag

SEQ ID NO: 177707 - DNA, 1029 bp, synthetic construct
  misc_feature 1..1029: note = Description of Artificial Sequence: Synthetic coding sequence
  source 1..1029: mol_type = other DNA
atgtgcgacgaggacgagaccaccgccctggtgtgcgacaacggcagcgggctggtgaaggcaggctttgcgggagacgacgccccgagggcagtcttcccgagcatcgtcggaaggccacggcaccaaggcgtgatggtgggcatgggccagaaggactcttacgtgggcgatgaggcgcagagcaagagggggattcttaccttaaagtacccaatagagcacggcattattacgaaagccaaccgagagaaaatgacccagataatgtttgagacgttcaatgtgccagcaatgtacgtcgctattcaggcagtcctaagcctgtacgcttctggaagaaccactggcatagtccttgactccggggatggcgtgacacacaacgtccctatttacgagggttatgcactgcctcatgcgattatgcggctcgatctggccgggagagaccttacagattacctcatgaagatcctcacagaacgtgggtattctttcgttactaccgcagaacgtgagatcgtcagggatattaaggagaagctgtgctacgtggcgctcgacttcgaaaacgagatggctaccgctgcctcttcctcatctttagaaaaatcttatgagctgccggatggccaggttatcacaatcgggaatgagcggtttagatgcccagaaaccctgttccagccatccttcattggcatggaatcagccggtatccatgagacaacctacaattctattatgaaatgtgacatcgacattcgcaaggacctgtacgccaacaacgtgatgtcaggcgggaccactatgtatcctggtatcgcagaccggatgcagaaagaaatcacagctctggccccatccaccatgaagattaaaattatcgcaccaccagagcgcaaatattcagtgtggataggcggaagcatattggcttcgctttctacattccagcagatgtggatcaccaagcaggaatatgacgaggctggaccatctattgtacacaggaagtgcttctag

SEQ ID NO: 177708 - DNA, 870 bp, synthetic construct
  misc_feature 1..870: note = Description of Artificial Sequence: Synthetic coding sequence
  source 1..870: mol_type = other DNA
atgtgcgacgaggacgagaccaccgccctggtgtgcgacaacggctcaggtttggtgaaagctggatttgctggcgatgatgctcccagggctgtatttccaagcatcgtgggaaggccacgccaccagggagtgatggtaggaatgggacagaaagactcatatgttggggacgaggctcagtcaaaacggggcatcctaacactgaaataccctatagagcatggtattatcacaaattgggatgacatggaaaagatctggcatcataccttctataatgaactgcgggtagcccctgaggaacatccaactctgctgaccgaggccccgctgaacccaaaggcgaaccccgaacgtgaaatcgttagagatataaaggagaaattgtgttacgtggcactggacttcgaaaacgagatggcaactgcggcaagctcttcatccttagaaaaatcttatgaacttcccgatggccaggtgataactattggaaacgaacgattcagatgcccggagaccctttttcaacctagctttataggtatggagagcgctgggatccacgagactacctacaactccatcatgaagtgcgacatcgatatacgaaaagacctatatgccaataatgtgatgtccggagggacaaccatgtatccgggtatcgccgaccgcatgcaaaaagaaataactgccctggcaccctccaccatgaagatcaagataatcgcaccccccgagaggaagtactctgtatggatcgggggcagcatcctcgcttctctgagcacatttcagcaaatgtggattactaagcaggagtatgatgaggccggcccttccattgtgcataggaagtgtttctag

SEQ ID NO: 177709 - DNA, 1134 bp, synthetic construct
  misc_feature 1..1134: note = Description of Artificial Sequence: Synthetic coding sequence
  source 1..1134: mol_type = other DNA
atgtgcgacgaggacgagaccaccgccctggtgtgcgacaacggcagcggtctcgttaaggccggctttgccggggatgacgctcctcgagcagtgttcccaagcatagtgggaaggccaaggcaccagggcgtcatggttggaatgggacagaaagatagctacgtgggcgatgaggcacaaagcaagagaggaattctcacacttaaataccctatcgagcacggtatcatcacaaactgggacgacatggaaaaaatttggcaccacaccttctataacgagcttcgcgttgcaccagaggagcatccgacattactgaccgaagcacccctgaaccctaaggccaatcgggagaaaatgacacagatcatgtttgagacctttaatgttccagccatgtacgtggctatccaggcggtgctgtcactgtacgccagtgggaggacaacaggaatagtgctggacagcggcgacggggtcactcacaatgtgcccatttatgaagggtatgctttgccacatgccattatgcggcttgatctcgctggcagagatttgactgactatctcatgaaaattctgactgagcgaggctattctttcgtgacgacagccgagagggaaattgtgcgggacattaaggagaagttgtgctatgtggcactcgactttgagaacgagatggccacagcagcttcatctagctctctggagaagtcgtatgaactgcccgatgggcaggtgattaccattggaaatgaacgattccgttgtcccgagacactctttcagccgagcttcataggcatggagtcagccggaattcatgagacaacttacaactccattatgaagtgcgatatagatataaggaaggatctttacgcaaataacgtcatgtctgggggtaccacaatgtaccccggaatcgcagatcgcatgcagaaggagatcacagctctggcaccctcaaccatgaaaataaagatcatagccccccctgaaaggaagtactccgtgtggattggaggaagtattctggcctccttgtccacctttcagcaaatgtggatcaccaagcaggaatacgacgaggctggaccctctatcgtgcatcggaagtgtttctag

SEQ ID NO: 177710 - DNA, 1146 bp, synthetic construct
  misc_feature 1..1146: note = Description of Artificial Sequence: Synthetic coding sequence
  source 1..1146: mol_type = other DNA
atggcccccggcgagaaggagagcggcgagggccccgccaagagcgcactgcgcaagattcgcactgccacactggtgatcagtcttgctcggggctggcagcagtgggctaacgaaaattccattcgccaggctcaggagccaactggctggcttccgggaggtacccaagactccccccaagcacctaagcccatcacaccaccgacctcccaccagaaggcccaatctgcaccaaagtctcccccccggctgcctgagggtcacggagacggccaatcaagcgaaaaggccccagaggtgtcccacataaagaaaaaagaggtctcaaaaactgtggtgtcgaagacctacgagcggggcggagacgtatcccatctgtctcatcggtacgagcgagatgctggcgtgttagaacccggccagcccgagaatgacatcgaccggatcctgcactctcacggctctccaactcgaaggaggaagtgcgcaaacctggtatctgagctgacaaaaggttggcgagtaatggagcaggaggaaccgacttggcgttcagatagtgtggataccgaggactccggctacggtggtgaggccgaggagcggcccgagcaggatggtgttcaggtcgccgtggtgcgcattaaacgacctttacccagccaagtcaatagatttacagagaaactgaactgtaaggcccagcaaaagtatagtcctgtcggcaacctcaaaggccggtggcaacagtgggccgacgaacatattcagtcgcagaaactcaacccattcagtgaagagtttgattacgagctcgctatgagcactaggttgcacaaaggtgacgaaggctacggtcgacctaaagaagggacaaagaccgctgaacgcgctaagagggccgaagagcacatttatagggagatgatggacatgtgctttatcatctgtaccatggccaggcaccgccgggacgggaagatacaagtgacattcggtgaccttttcgataggtacgtgagaataagtgataaagttgttggcatccttatgcgtgcaaggaagcacgggttggtcgacttcgagggagagatgctgtggcaaggtcgcgacgatcatgtggtaattacgctcctaaagtag

SEQ ID NO: 177711 - DNA, 2685 bp, synthetic construct
  misc_feature 1..2685: note = Description of Artificial Sequence: Synthetic coding sequence
  source 1..2685: mol_type = other DNA
atgaaccagatcgagcccggcgtgcagtacaactacgtgtacgacgaagatgaatatatgattcaggaggaggagtgggatagggacttgctgcttgaccccgcctgggagaaacagcagcggaagacttttactgcttggtgcaactcacatttacggaaggccggcacccagatcgagaatatcgaagaggactttcgtaacggtttgaaactgatgctgttgttggaagttatctccggcgaacgacttcctaagccagaccgtggaaagatgaggttccacaaaatcgctaatgtaaacaaggctctggattatatagccagcaagggggtaaaattagtgagcataggagctgaagaaatcgttgacggaaatgttaagatgaccctgggcatgatatggactataattcttcggttcgcaatccaagatatctctgttgaggagacctctgccaaagagggccttctcctctggtgtcagaggaagaccgccccataccgcaatgtaaacatacagaactttcacactagttggaaagacggcctgggattgtgcgctctgatacacagacaccggccggatctaattgattacagcaagctcaacaaggacgaccctataggcaatattaacttagcaatggagatcgccgaaaagcatcttgacattcctaagatgctcgacgccgaggacatagtcaatacacccaagccagacgaaagagctattatgacctatgtaagttgcttttatcacgcctttgccggggctgaacaagctgaaactgccgccaataggatctgtaaggtacttgccgtgaaccaagagaatgaaagattaatggaggagtacgaacgtctggcttcagagctcctggagtggataagaaggaccataccttggttggaaaaccggactcccgaaaagacaatgcaagcgatgcaaaagaaactggaagacttcagagactaccgccggaaacacaaacctcctaaggttcaagaaaagtgtcaactagagatcaattttaatactttacagactaagctgcgtatctccaaccgccccgcctttatgccttcagagggcaagatggtaagcgacatcgctggcgcctggcaacggttagaacaggctgagaagggctacgaggaatggctcctcaatgaaattaggcgactggaacgactggagcacttagccgagaaattccggcagaaggcctctacgcatgagacttgggcatacgggaaagagcagatcctgcttcagaaagattacgagagtgcgtccctgaccgaagtcagggcactgctacggaagcatgaggctttcgagagcgacctcgccgcccatcaggatagagttgagcagatagcggccattgctcaggagttgaacgagctggattatcacgacgcggtgaatgttaacgataggtgccagaagatatgcgatcaatgggacagacttggaactttgactcagaaaaggcgcgaagccctagaaagaatggagaaattgctggagacaattgaccagcttcatctcgagttcgctaagagggccgccccctttaacaattggatggaaggagctatggaggacctccaagatatgtttatcgtccactcaattgaggagattcagtccttgatcaccgcacacgagcagttcaaggcaaccctccctgaggcagatggagaacgccagtctatcatggcaattcagaatgaagtcgaaaaggtcattcagtcttacaatatccggatttcctctagtaacccttattcaacagtcaccatggacgaattaagaacaaagtgggataaggtaaagcaacttgtacccattcgcgaccaatcccttcaggaagaactcgctcgccagcacgcgaatgagcgcctgagaaggcagtttgcagctcaggcaaatgccatcggcccatggatccagaataaaatggaggagattgccaggagtagcatacagataaccggcgctctggaggaccagatgaatcagctcaagcagtatgaacacaacataattaattacaagaacaacatcgacaaactggaaggcgaccatcaactgatccaggaggctttggtgttcgataacaaacatactaattataccatggagcatattcgggtaggatgggaactgctgttgacaaccatcgcaagaacgattaatgaagtggagacacagatactgacccgtgatgccaagggaataacccaagaacaaatgaacgaattccgggcatcttttaaccatttcgatagaaggaagaacggcctgatggatcacgaggactttagggcctgcctcatctccatgggatatgacctgggcgaggccgaatttgcccgcattatgacgctggtggatcccaacggccagggcacagtgacctttcaaagcttcattgacttcatgacacgggaaaccgcagatacagacactgctgaacaggttattgcttctttccgaatcctcgcatcggataaaccgtacatcctcgccgaggaattgagacgggagctaccccccgaccaagcccaatactgtataaagcgaatgcctgcctattcagggcccggcagcgtccctggtgcactagactacgcggcgttctccagtgctctgtatggcgaatcggatctgtag

SEQ ID NO: 177712 - DNA, 2685 bp, synthetic construct
  misc_feature 1..2685: note = Description of Artificial Sequence: Synthetic coding sequence
  source 1..2685: mol_type = other DNA
atgaaccagatcgagcccggcgtgcagtacaactacgtgtacgacgaggatgagtatatgatacaggaagaggaatgggatagggatctactcctggacccagcttgggaaaaacagcagcggaaaacattcaccgcctggtgcaactcccacctgagaaaagccggaacccaaatcgagaacatcgaggaggacttcagaaacggtctcaaacttatgctcctccttgaagttatcagtggggaacggctacccaagcccgaccgtggcaaaatgaggttccataagattgccaacgtgaacaaagcattggattatatagctagcaaaggtgtcaagttggtgtctataggggccgaggaaatcgtggacggcaatgtgaagatgacgcttggtatgatctggaccatcatcttacgcttcgctatccaggatatcagcgtggaggagacctcagctaaggaagggctgctgttgtggtgtcagaggaagacagctccttaccgaaatgtgaacatccaaaatttccatactagctggaaggatggattgggcctatgcgctttgatacaccggcatagaccagacttgattgactactcgaaactgaacaaagatgatccgattggcaacatcaacctggccatggaaattgccgagaagcatctagacatacctaagatgctcgacgccgaagatttagtgtacactgcacgccctgacgaacgggccatcatgacatacgtgtcctgctactaccatgctttcgctggggctcagaaagctgaaacagcggctaatagaatctgtaaggtgctggcagtgaatcaagagaacgagaggctgatggaggaatacgaaagactggcctctgagcttttagagtggatcaggagaacaattccgtggctcgaaaatagaacacctgagaaaaccatgcaggccatgcagaaaaagctcgaggattttagagactaccggcgcaagcacaagcccccaaaagtgcaggaaaagtgccagctggaaatcaatttcaacaccctgcaaacaaagctgagaatttccaacagacccgcgtttatgccaagcgaggggaagatggtaagtgacatagctggggcatggcagcggctggaacaggctgagaagggatacgaggaatggttgctgaatgaaatacggcggctggaaagattggagcatctcgctgagaagtttaggcagaaggcatcaactcatgaaacgtgggcctatggtaaggagcagattctgcttcagaaagactacgagtccgcaagtttgacagaagtgcgggcattgcttcgcaagcacgaggcctttgagtcagatctcgccgcccatcaggacagagtcgagcagattgcggcaattgcgcaagagttgaacgagttggattaccacgacgctgtgaacgtcaatgaccggtgccagaagatctgcgatcaatgggatcgactgggcacccttacacaaaaacgccgcgaagctcttgaacgaatggaaaagctcctcgaaactatagaccagctccacctggagttcgccaagcgggctgctcctttcaataactggatggagggggcaatggaagatttgcaggacatgttcattgttcacagcatcgaggagatacaatcactcataactgctcatgaacaatttaaagccactctaccggaggccgacggtgagcgccaaagcataatggccattcagaacgaggtcgaaaaggtaattcaatcctataacatccggatttctagttctaacccctacagtactgtcaccatggatgagctccggaccaaatgggacaaggtgaagcaactcgtgccaatacgagatcagagtctccaggaagaattggcacggcagcacgcaaacgaacggttgagaagacaatttgccgcacaggccaacgctattgggccctggattcagaacaagatggaagaaatcgcccgctcctctatccagattaccggagccctggaggaccagatgaaccaactgaagcagtacgagcataatattattaattataagaacaacatagacaagcttgagggagaccaccagctcattcaggaggctctggtgttcgataacaagcacaccaattacaccatggagcacatccgcgtcggatgggagcttctactcacgacaatcgcacggactattaatgaagtcgaaacccagattctcacccgggatgccaagggaataacccaggaacaaatgaatgagttccgggcctctttcaatcattttgatcgcagaaagaatgggctgatggaccacgaggactttagagcctgtctgatttctatggggtacgacctgggagaggcagaatttgctcgaatcatgacactggtcgaccctaacggacaagggacagttaccttccagagctttatcgatttcatgacaagagaaaccgccgatacagacactgccgaacaggtgatagcaagtttccgcattcttgcctccgataagccctatattttggctgaagagcttcgtagagaacttccacccgaccaggcccagtactgtatcaaacggatgcctgcttacagcggcccaggttcggtccccggcgccttggactacgccgctttctcttcagcactgtacggtgagtcagatctgtag

SEQ ID NO: 177713 - DNA, 1992 bp, synthetic construct
  misc_feature 1..1992: note = Description of Artificial Sequence: Synthetic coding sequence
  source 1..1992: mol_type = other DNA
agcaccctgagcagcgtggagggcccccccgagagcagcacctgctcttatcaggaaatgcggcggtcatcagtcaatagctccgctatggcggaaaccgctgccaatagaatctgcaaggtactcgccgtgaatcaggagaacgaacgactgatggaagagtatgagaggctggcctccgagctacttgaatggatacgtagaaccataccctggctggagaatcgcacgccggaaaaaactatgcaggctatgcagaaaaaattagaggatttcagggactatagacgcaagcataaaccccccaaggtgcaggaaaagtgtcagctggaaatcaatttcaatacactacagactaagttgcgtatctcaaatcgacctgccttcatgccaagcgaagggaagatggtgtccgacattgccggagcttggcagcgcctggaacaggcggagaaggggtatgaggaatggctgttaaacgagatccgccgtctggagcggctggagcatctcgcggagaagtttagacagaaagcctctactcacgaaacctgggcatacggtaaggaacaaatactgttgcaaaaggactatgagagcgcgtcactcactgaggtgcgtgcactcttgcggaaacacgaggcattcgagtctgatctggccgctcaccaggaccgggtggagcaaattgctgctatagcccaggaactcaatgaactagactaccatgacgctgtgaacgtgaatgaccggtgccaaaagatctgcgaccagtgggataggctgggcacccttacccaaaaacggcgcgaggctctggagcgcatggaaaagctcttagaaaccatcgaccagctacacctggaattcgccaaacgcgccgcaccctttaataactggatggagggcgctatggaagatctgcaggacatgtttatcgtgcattccatcgaggagatccagagccttatcacagctcacgagcagtttaaagcgactctaccggaagctgacggcgaacggcagtccattatggccatacagaatgaagtggagaaagtcatccagtcatataacatccgtatcagctcctccaacccatactcaacagtcactatggacgagctgcgaacgaagtgggacaaagtgaagcagcttgtccccatccgggatcagtctctccaagaagagcttgcccgacagcacgctaacgagcgcctgaggcgccagttcgcagcacaggcgaatgccataggcccctggatccagaacaagatggaggagatcgcaagatcctctattcagattacaggagctcttgaggatcagatgaaccaactcaagcagtacgaacacaatattattaactacaagaacaacattgataagctggaaggcgaccaccagctgatccaggaagctctggtgttcgataacaagcatacaaattataccatggagcatatccgagttggttgggaactgttgcttactaccattgctcgcaccatcaatgaggtagaaactcagattttaacacgcgacgctaagggcatcacccaagagcagatgaatgagttcagagcttcgttcaatcacttcgacaggcgcaagaacgggctgatggatcatgaagacttcagagcatgtctgattagtatgggatacgacctgggggaagctgagttcgcccggattatgaccctggttgatccaaatggccaggggacagtcactttccagtccttcattgatttcatgacccgggaaaccgcagataccgacacggccgagcaggtcattgccagctttcggattctcgcgagtgacaaaccatacatcctggcagaagagctcaggagggagctgcctccagaccaagcccaatactgcattaaacgaatgcctgcctatagcggaccaggatccgtgccaggagctcttgattacgccgcctttagtagtgcactctatggcgaaagtgatctgtag

SEQ ID NO: 177714 - DNA, 1167 bp, synthetic construct
  misc_feature 1..1167: note = Description of Artificial Sequence: Synthetic coding sequence
  source 1..1167: mol_type = other DNA
atggagaagctgctggagaccatcgaccagctgcacctggagttcgctaagcgggcagcgccgttcaataattggatggaaggcgctatggaagacctccaggatatgtttatcgtccattccatagaggagatccagtccctcattacagctcatgagcagttcaaagcaaccttgcccgaggcagatggggagcggcagagcataatggctatacagaacgaggtggagaaggttatccaatcttacaacatccggatcagtagtagcaatccatatagcaccgtgaccatggacgagctaagaacaaagtgggataaggtcaagcaactggtccctattagggatcagtccctgcaagaggagctcgcccggcaacacgccaatgaaaggttgcgccgtcagttcgcagcacaggccaatgcgataggaccttggattcaaaataagatggaggagatagccaggtcttccatacagattacaggcgcacttgaggaccagatgaatcagttgaagcagtatgagcacaacatcattaattataagaacaatattgacaagctggagggggatcaccagctgattcaagaagccctggtcttcgataacaaacacacaaactacaccatggagcatattagagtggggtgggagctgttgttaaccaccatcgcccggacgattaacgaagttgaaacacagatcctgacccgcgacgcaaagggaattactcaggagcaaatgaatgagtttcgggcctctttcaaccactttgataggcgaaagaatggtctcatggaccatgaagattttcgcgcttgtttaataagcatgggatacgacctgggcgaggccgagtttgcccgtattatgacactagtggatcccaatggccagggtactgtgacctttcaatctttcatcgacttcatgactcgagagacagccgatactgacaccgcagaacaggtgattgctagctttaggatcctggctagcgacaagccatacatcttggctgaagagttgagaagagagttacctcctgaccaagctcagtactgtatcaaaaggatgcccgcctactcaggtccaggaagcgtccctggggctttggattacgcagctttctctagcgcgctttacggggagagcgacctctag

SEQ ID NO: 177715 - DNA, 1131 bp, synthetic construct
  misc_feature 1..1131: note = Description of Artificial Sequence: Synthetic coding sequence
  source 1..1131: mol_type = other DNA
atgttcaacccccacgccctggacgtgcccgccgtgatcttcgacaacggctcaggcctttgcaaagcagggctctccggagaaattggtccccggcatgtaataagctctgttttgggtcattgcaaattcaacgtccctctcgcccggctaaatcaaaaatatttcgtgggccaggaagctctctataagtatgaagctttgcatctgcactatcccatcgaaagaggcctggttacaggttgggacgacatggaaaaattgtggaagcacctgttcgaaagagagttgggcgtaaagccgtcgcagcagcccgtccttatgaccgaacctagtctcaatccacgggagatccgcgaaaagctcgctgagatgatgttcgagaccttctctgtaccaggcttctacctaagcaatcacgccgtagcagccttatacgcatcggcttgcgtgacagggctggtagtagacagtggggacggagtcacttgcacagtccccatctttgaaggatactcactgccccacgccgtgacaaaattgtgtatggctggaagagacataaccgagcatcttacaaggctgctgtttgccagcggcttcaacttcccatgcattctcaataaggctgtagttaataatattaaggagaaactgtgctatatagccctggagcccgagaaggagctccgcaaatcacgaggtgaggtgctgggcgcctacagacttcccgacggccatgtcatccacttcggcgatgaactgtaccaggtgccggaggtgctgtttgcaccagaccagctgggaatccacagccctggtctctcgaagatggtatccagttcaatcatgaagtgcgacaccgacattcagaacaagctatacgctgacattgtgctgtcgggcggcacaaccctgctcccggggttggaagaaagactgatgaaggaggtggagcaactggctagcaagggaactccaataaagattaccgcttctcccgatcgatgctttagcgcctggattggcgcatctattatgacgtccatgtcgtctttcaagcagatgtgggtgacaagcgccgattttaaggagtatgggacgtctgtggtgcagaggagatgcttttag

SEQ ID NO: 177716 - DNA, 1134 bp, synthetic construct
  misc_feature 1..1134: note = Description of Artificial Sequence: Synthetic coding sequence
  source 1..1134: mol_type = other DNA
atgttcaacccccacgccctggacagccccgccgtgatcttcgacaatggcagtggtttctgcaaggctggcttgtccggggagtttggcccccggcatatggtttcctcaattgtcggacatctgaagttccaggcccccagcgcggaggcaaaccagaaaaagtacttcgtgggtgaggaagccctgtataaacaagaagccttacagctgcacagcccatttgaaagggggcttatcactggatgggatgacgtcgaacggttgtggaaacacctctttgagtgggagctgggcgtgaagcctagcgatcagcccttgcttgcaactgagccctcgttaaaccctcgggagaatcgggagaaaatggctgaagtgatgtttgagaattttggtgtccccgcattctacctgtccgatcaagctgtactcgcactctacgcctccgcgtgcgtgactgggctggttgtggattcaggtgacgcagtaacatgtacagttcccatttttgaagggtacagcctgccacacgccgtgactaaactacacgttgcaggcagggacatcacggagcttcttatgcagctattgctagcgtcaggtcatacctttccctgccagttggataaaggactcgtcgatgatattaaaaagaagctctgttatgtggcactggagcccgaaaaggagctatcccggaggccagaggaggtcctgagggaatataagcttcccgacggtaacatcatttctctgggggatcccttacatcaggcgccagaagcattattcgtgccccaacagcttgggagtcagtcgcctgggttaagcaacatggtgagtagcagtatcacgaagtgtgatacggacatccagaaaatccttttcggcgaaatcgtgctgtccggggggactaccctgtttcacgggctcgatgatagattactgaaagagctggagcagttggcgagtaaggacacccccatcaagatcacggctccccccgaccgatggttctcaacctggatcggcgcctcaatcgtaaccagtttgagctccttcaagcaaatgtgggttaccgctgctgacttcaaggagtttggtacgtccgttgtgcaacgcaggtgcttttag

SEQ ID NO: 177717 - DNA, 987 bp, synthetic construct
  misc_feature 1..987: note = Description of Artificial Sequence: Synthetic coding sequence
  source 1..987: mol_type = other DNA
atgttcaacccccacgccctggacagccccgccgtgatcttcgacaacggctctggattctgcaaggctggcctgtccggagaatttgggcctagacatatggtgagctccattgtaggtcacctgaagttccaggcaccttccgccgaggctaatcagaagaagtatttcgtgggcgaagaggccctgtacaagcaggaagcccttcagttgcatagtccttttgagcgggggttgattacagggtgggacgacgtggaaagactgtggaagcacctctttgagtgggagcttggggtcaagcccagcgatcagccactcctggcgactgaaccgtctttgaatccacgtgagaatcgggaaaagatggccgaggtgatgttcgaaaattttggcgttccggctttttacttgtctgatcaagccgttctcgcgctatatgcctcagcctgtgttactgggctagtggtggactcgggtgatgccgtgacgtgcaccgtgcctatcttcgaggggtactccctgcctcacgccgtcaccaagctccatgtggctggacgcgatatcaccgagctcttgatgcaactcctcctggctagtgggcatacatttccttgtcagttagacaaaggattagtcgacgatattaaaaagaaactctgttacgtggccttggaaccagaaaaagagctgtccaggcgaccagaggaggtcctcagggaatacaagctgccagacggaaacattatctctttaggggatcctttacaccaggcccccgaagcccttttcgtcccacagcagctgggatcacagtctcccggtctctcgaacatggtatcctccagcatcaccaaatgcgataccgatatacagaagatcctcttcggagaaatcgtgttaagtgggggtactaccctgttccacggactcgacgaccggctgctgcatctggactggagcctccatagacatctcagcgagtag

SEQ ID NO: 177718 - DNA, 1752 bp, synthetic construct
  misc_feature 1..1752: note = Description of Artificial Sequence: Synthetic coding sequence
  source 1..1752: mol_type = other DNA
atggagagcaagggcgccagcagctgccggctgctgttctgcctgttgatttctgctactgtgttcaggccgggactcgggtggtatactgtcaactctgcctatggggatacaataatcatcccatgtaggctggacgtaccacaaaatttgatgtttggcaagtggaaatacgagaaacccgacggttcacctgtcttcatcgcgttcaggagctctaccaaaaaaagcgtgcaatacgacgatgtccccgagtataaagataggctgaacctgtcagaaaattatactctctctatcagcaacgctagaatctctgacgagaagaggtttgtatgtatgcttgtcacagaagataacgtcttcgaggctcccaccatcgttaaggtgttcaaacagcccagcaagccagaaatcgtatcgaaggccttgttcctggagacggagcagctcaaaaagctgggggactgcatttcagaggatagctatcccgacggtaacattacctggtatcgtaacggcaaggtgctgcatcccttggaaggagccgtcgtaatcatctttaaaaaagaaatggacccagtgacacaactttatacgatgacctccactctcgaatacaaaacaactaaggcagacatacagatgccattcacttgctcagtcacgtactacgggccgtcgggtcagaaaaccatccattccgagcaggctgttttcgatatatactaccctactgaacaggtcactatccaagttttgcctcccaaaaatgctatcaaggagggagacaacattaccttgaagtgtctgggaaacggaaacccaccacccgaggagttcctcttctatctacccggtcagccggaaggtataagaagtagtaatacgtatacgcttacagatgttcggcgcaacgcaacgggggactacaagtgctcccttattgacaagaagtccatgatagctagcactgccataaccgttcactatctggacctttctttaaacccttcgggggaggtcacaaggcagatcggagatgcattgcctgtttcttgcaccattagcgcttcccgcaatgccactgtggtgtggatgaaagataatatcaggttaagatcttctccaagtttttcctccctgcattaccaggatgccggaaattacgtgtgcgagactgcactgcaagaagtggagggcctgaagaagcgggaaagcctgaccctgatagtcgaggggaagcctcagatcaagatgacaaagaagacagatccctctggcctctccaagactataatctgtcacgtggagggctttcccaaacctgctatccagtggacaatcaccggatcgggatctgtaattaaccagaccgaggagtccccctacatcaacggcaggtactacagtaaaataattatctcgccggaggaaaatgtcacgctgacttgtaccgctgaaaaccagcttgagaggaccgtgaactcgctgaatgtgtcagcaatttccattcccgagcatgacgaagctgatgagatctcagatgagaatcgcgaaaaagtaaacgatcaggcaaagctgattgttggaatcgtggtggggctgctgcttgctgccctggtggctggtgttgtttactggctgtatatgaagaaaagcaagaccgcatcgaagcacgtgaataaagacctgggcaatatggaggaaaataagaaacttgaagaaaacaaccacaaaaccgaagcttag

SEQ ID NO: 177719 - DNA, 918 bp, synthetic construct
  misc_feature 1..918: note = Description of Artificial Sequence: Synthetic coding sequence
  source 1..918: mol_type = other DNA
atggaccccgtgacccagctgtacaccatgaccagcaccctggagtacaagaccactaaagcagatattcagatgccatttacttgttcagtgacctactatggtccctccggtcaaaaaacaatccactccgaacaagctgtatttgacatctattaccttgacctttctctgaaccccagcggcgaagtaactcgccagatcggcgatgccctgcctgtgagttgcactatctctgcttctcgcaatgccactgtggtgtggatgaaggacaacatccggcttcggtcatcaccaagcttttctagcctccactaccaggatgcgggaaattacgtttgtgaaaccgctcttcaagaggtggagggtctcaagaaacgcgagagcctaacattgatcgtagaggggaagccacaaatcaaaatgacgaagaaaactgaccccagtgggctaagcaaaactataatctgccacgtcgagggttttcccaaaccagctattcagtggactatcacgggatcaggatctgtgattaatcaaacggaggagtccccatatattaacggacggtactactctaaaattataatcagccccgaagaaaatgtcaccttaacttgtaccgcggagaatcagctcgagaggaccgtcaatagtctgaatgtgagcgccattagcattccggaacacgatgaggctgacgagatttctgacgagaacagggagaaagtcaacgaccaggccaagctcatcgtgggcatcgtggtcggtttgctactggccgccctggttgccggagtcgtgtattggctttacatgaagaaaagtaagaccgcatctaagcacgttaataaggaccttggcaatatggaagagaacaagaaactggaagagaataaccacaagactgaggcctag

SEQ ID NO: 177720 - DNA, 1035 bp, synthetic construct
  misc_feature 1..1035: note = Description of Artificial Sequence: Synthetic coding sequence
  source 1..1035: mol_type = other DNA
tgactgggcgactgcatcagcgaggacagctaccccgacggcaacataacatggtatcgtaacggaaaggttctgcatccactagaaggcgcagtggtgattatctttaagaaagagatggacccagtgacccaattgtatacaatgacctccaccctggagtataaaactaccaaagctgatatccagatgccttttacctgctctgtgacatattatggaccctctgggcaaaagacgatccattcagagcaggcggtgttcgacatttactatctggatctgtctcttaaccctagcggtgaggtcacaaggcagattggcgatgccttgccggtgagctgcaccatatccgctagccggaatgcaaccgtcgtgtggatgaaagataacattagactgaggagctctcctagcttctcgagcctgcactaccaggacgctgggaactatgtgtgcgagactgctcttcaagaggtagagggactcaaaaagcgggagtcactgacactgatcgtggagggcaaacctcagattaagatgaccaaaaagaccgacccatctggcctctctaagaccattatttgccatgtagaagggttccccaagccagcgatacagtggactatcactggcagtgggtctgtcattaaccaaacagaagagtctccttacatcaatggtaggtattattccaagatcattattagccccgaggagaacgtcaccctgacttgtacggcagaaaaccaactcgaacgaacagtaaatagcctaaacgtgagtgcaatttccatccccgaacatgatgaggctgacgaaatctcggacgagaaccgcgaaaaagtgaatgatcaagccaaactcatcgtggggattgtcgtgggattgctcctagcagccttggtcgccggggtggtatattggctgtatatgaagaaatcgaaaacggcgtccaaacacgtcaataaagacctgggaaatatggaagaaaacaaaaaactggaggagaataaccataaaacagaagcgtag

SEQ ID NO: 177721 - DNA, 1713 bp, synthetic construct
  misc_feature 1..1713: note = Description of Artificial Sequence: Synthetic coding sequence
  source 1..1713: mol_type = other DNA
atggagagcaagggcgccagcagctgccggctgctgttctgcctgcttatttctgctacagttttccgccctgggctcgggtggtacactgtgaactccgcctacggcgatactatcatcatcccttgccgactggatgtcccccagaacttgatgtttggcaaatggaaatatgaaaagccagacggctccccagtttttattgcttttcgctcaagcactaagaaaagcgtccagtacgatgacgtcccagagtacaaagaccggctgaatctgtcagaaaactacactttgagcattagcaacgcgcgcatcagcgacgaaaagagattcgtgtgtatgctcgtgacggaagacaacgttttcgaggcacccaccatcgttaaggtgttcaagcagccgtccaaacccgaaattgtaagtaaagctctgtttctggaaaccgagcagctaaagaagctgggggactgtatcagcgaagacagttacccagacggcaatatcacgtggtacaggaatggcaaggtcttgcaccccctggagggcgctgttgtaattatttttaaaaaggaaatggaccccgttacccagctttacaccatgacaagcactctggaatataagaccacgaaagccgatattcagatgccgtttacctgctccgtgacatactatgggccaagcggccagaaaaccattcattcagagcaggccgtgtttgacatctactatccaacagagcaggtgaccatccaggtactgcccccaaagaatgctattaaggagggagataacattacccttaaatgcctgggaaacgggaaccctcccccagaggaattcttgttctacctgccaggtcagccagagggaattcggtcatcaaacacttacactttaacagatgtgcgtcgcaacgctacaggagattataaatgcagcctcattgacaaaaaatcaatgatcgcgagcacagccattaccgtgcactatctcgatctgtccctgaacccctcgggtgaagtgaccagacagattggcgatgcccttccagtcagctgtacaataagcgcttcccgtaatgctaccgtggtgtggatgaaagacaatatccgcctgcggtcgtcgccatccttctcatcactgcactatcaggatgctgggaattacgtctgtgaaacggctttacaagaagttgagggtttgaaaaagcgcgaatcattgaccttgatagttgaaggcaagccacagatcaagatgacaaagaagaccgacccctctggcctgtctaaaaccatcatctgccatgtcgaaggatttcctaagccagccattcaatggactatcactggcagcgggtctgtcatcaatcagacagaggagtccccatatattaatggtaggtattacagcaagatcataattagtccagaagaaaacgtaactctcacctgcaccgccgagaaccagctggaacgcacagtcaattcattgaacgtgtctgcgaacgagaatagagagaaagttaatgaccaggctaaactgattgtgggaattgttgtggggctgctcctcgccgccttggttgcgggagtcgtctactggctctacatgaaaaagtctaaaacagcaagtaagcacgtcaacaaagacctgggcaacatggaggaaaacaaaaagcttgaggagaacaatcacaaaaccgaagcatag

SEQ ID NO: 177722 - DNA, 1074 bp, synthetic construct
  misc_feature 1..1074: note = Description of Artificial Sequence: Synthetic coding sequence
  source 1..1074: mol_type = other DNA
atggaggtgctgcggccccagctgatccggatcgacggccggaactaccggaaaaatccagtgcaggaacaaacataccagcacgaagaagatgaggaagacttctatcagggaagtatggagtgcgcagacgagccatgtgatgcctacgaggtggagcagaccccacagggcttccgttccacacttagagctccatctctcctttacaaacacatcgtgggaaaacgcggcgatacccggaagaaaatagaaatggagactaaaactagcatcagtatacccaagcctggacaagacggagaaatcgtgattacgggccaacatcggaacggtgtgatatccgcaaggacacgcattgatgtgttgcttgacacattccggagaaagcaacccttcacacacttcttagcatttttcctgaatgaggtggaggtccaagaaggcttcttgaggtttcaggaggaggtacttgctaagtgctcaatggatcatggtgtggactcctcgatcttccaaaaccctaagaaactgcatctgaccattggcatgctagtgctactctctgaagaggaaatccagcagacttgtgaaatgttgcaacagtgcaaggaggagttcatcaacgatatctctggaggtaagcccttggaagttgagatggccggtattgagtacatgaatgatgacccgggcatggtggatgtcctgtacgcaaaggtacacatgaaagatggatcgaatcggctccaggagctcgtggacagagttcttgaacgcttccaggcttctggcctaatcgttaaagaatggaacagcgtcaaattgcacgcaacagtgatgaatactctgtttcggaaagaccctaacgcagagggcagatataacctttatactgcggaggggaaatacatcttcaaggagcgggagtcttttgacggacgcaatatcctcaagctgtttgagaatttctattttgggtcattaaagttgaacagcatacacatctcccagaggtttacggtggacagttttgggaattacgctagttgcggacagattgacttcagctag

SEQ ID NO: 177723 - DNA, 1074 bp, synthetic construct
  misc_feature 1..1074: note = Description of Artificial Sequence: Synthetic coding sequence
  source 1..1074: mol_type = other DNA
atggaggtgctgcggccccagctgatccggatcgacggccggaactaccgcaagaaccccgtgcaggagcaaacttaccagcacgaagaggacgaagaagacttctaccagggttcaatggagtgcgctgatgagccttgcgacgcatacgaggtggagcagactccgcagggtttccgtagtacccttcgagctccctcactcctttacaagcacatagtgggtaagcggggggatacccgcaaaaaaatcgagatggagaccaagacgtcaatttcaattcccaaaccagggcaggatggcgaaatcgtgatcaccgggcaacaccgtaacggcgtgatctctgccagaacaaggatcgatgtgctgttagataccttccgtcggaagcaaccctttacccacttcttggccttcttccttaacgaggtcgaagtccaggagggcttccttcgattccaggaagaggtgctcgccaagtgctccatggaccacggcgtcgactcatccattttccagaaccccaagaaactccacctcaccataggcatgctggtgttactcagcgaggaagaaatccagcaaacctgtgaaatgcttcaacaatgcaaagaggagttcatcaatgacatatcagggggaaaaccactagaagtcgagatggccgggattgagtatatgaacgatgaccctggcatggtggatgtgctctacgccaaggttcatatgaaagatggatccaaccgactccaagagctggttgatcgtgtcctagagagattccaagccagcgggctgatagtgaaagagtggaactctgtaaagctgcatgcaacagtcatgaatactctgttccgtaaggaccccaatgccgagggacgctataacctgtacactgccgagggcaaatacatctttaaggagagggagagcttcgacggacggaatattcttaaactctttgaaaatttttactttggatcactaaaactaaactctatacacataagccagcggtttactgtagatagttttggcaactacgccagctgcgggcagattgacttttcttag

SEQ ID NO: 177724 - DNA, 1203 bp, synthetic construct
  misc_feature 1..1203: note = Description of Artificial Sequence: Synthetic coding sequence
  source 1..1203: mol_type = other DNA
atggaggtgctgcggccccagctgatccggatcgacggccggaactatcgcaagaatcccgtccaggagcagacttatcagcacgaggaagatgaagaagacttctatcaaggatccatggaatgtgccgacgagccttgcgatgcttacgaagttgagcagaccccccagggcttccggtctaccctacgggccccaagcctcctatacaatctgattcacctgaatactagcaacgattgcggatttcagaagatcacactcgactgccagaatatctacacctggaaatcacgccatattgtgggcaagaggggtgatacccgcaaaaagatagaaatggagaccaaaacaagtatcagtattcccaaaccaggccaggacggagagatcgtgatcaccgggcagcaccgcaacggtgtgatcagcgccagaaccaggatcgacgtattgcttgacaccttccggagaaaacagccctttactcatttccttgcattcttcctgaatgaggtcgaggtgcaggaggggtttctgagatttcaggaggaggtcctcgccaagtgttcaatggaccatggagtcgactccagcatcttccagaatcccaagaaactgcacctcactattggaatgttggttttactgagtgaagaggagattcaacagacctgtgagatgctccagcagtgtaaagaggagttcattaacgatatcagcggagggaagcctctggaggtagagatggccggaatcgagtacatgaacgatgacccggggatggtggacgtgctgtacgccaaagtgcacatgaaggatggcagcaacaggctccaggaactggtcgaccgggtgctggagaggtttcaggcttcagggctaatcgtgaaagagtggaatagtgtgaagctgcacgccacagtgatgaatactttgttcaggaaggaccccaatgccgagggacgctataatctctacaccgccgagggaaagtatatcttcaaagagcgcgagtcttttgacggtcgtaacattctaaaatccttcgctctgctaccaaggctagaatacaacgatgcaatctcggctcattgcaatctgtgcctgcctggctcatccgactccccagccagcgcatcccaggtagcaggcatcacgggagtcagcgacgcatactcccagtccctacccggtaagtcgtag

SEQ ID NO: 177725 - DNA, 1074 bp, synthetic construct
  misc_feature 1..1074: note = Description of Artificial Sequence: Synthetic coding sequence
  source 1..1074: mol_type = other DNA
atggaggtgctgcggccccagctgatccggatcgacggccggaactaccgaaagaatccagtccaagagcagacctaccagcacgaggaagatgaagaggatttttatcagggttccatggagtgtgcagacgaaccctgcgacgcctatgaggtcgagcagactccacaaggctttcggagcacccttcgcgcaccctccctgctatataagcacatagtcggtaagcgaggcgacacccgaaagaaaattgagatggagactaagaccagcatcagtatccccaaaccaggtcaagacggagagatagtaattaccggccagcatcgcaacggcgttatatctgctcgtacaaggatcgatgtgctcctggataccttccgccgtaaacaaccattcacacacttcctggctttcttcctgaacgaagttgaggtacaagagggattcctgcgcttccaggaggaggtcttggcgaaatgcagcatggaccatggtgtggacagttctattttccagaatcccaagaaactgcatttgactatcggcatgttggtgctactctcagaggaggagattcagcagacttgtgaaatgctgcagcaatgcaaagaagaattcatcaatgatatttccggcggaaaaccgctggaagttgaaatggccggcatcgaatatatgaatgacgaccccggcatggtggatgtactatacgccaaagtgcacatgaaggatggttccaataggctgcaagagttagtcgacagggtcttggaaagattccaggcctcaggtctgatagtgaaggaatggaacagcgtgaaactgcacgctactgtgatgaatacactgtttcgcaaagacccaaacgctgaaggtcgctataacttatacaccgcagaaggaaagtatatctttaaagaacgagagagctttgacggtaggaacattctgaaactgtttgagaatttttatttcggttccctcaagctgaacagcatccacatctcccagcgttttaccgtggatagcttcggcaattacgccagctgtgggcagatagatttcagttag

SEQ ID NO: 177726 - DNA, 1203 bp, synthetic construct
  misc_feature 1..1203: note = Description of Artificial Sequence: Synthetic coding sequence
  source 1..1203: mol_type = other DNA
atggaggtgctgcggccccagctgatccggatcgacggccggaactaccggaaaaatcctgtgcaggaacagacatatcagcatgaggaggatgaggaggacttttaccaagggtctatggagtgtgctgacgagccctgtgatgcgtatgaagtggagcagacccctcagggattcaggtctactctgcgagctccttctctcctatacaatctgattcatctgaacacatccaatgattgtggattccagaagatcacactcgactgtcagaatatctacacctggaaatcaagacatattgtcggcaaacggggggacacacgcaaaaagatagagatggaaacaaagacttcgatctccatccctaagcccggacaggatggggaaatcgttattactggccaacatcgcaacggagttattagcgctcggacccggatcgatgtgctgcttgacacgttcagacggaagcaaccattcacccactttctcgcctttttcctgaacgaagtcgaagtccaggaaggatttttgcgcttccaggaggaagtactggccaaatgctcaatggaccacggagtggattcctcaatcttccagaaccctaaaaaactccacctgaccattggaatgctggtgctactcagcgaggaggaaatccaacagacctgtgagatgctgcagcagtgtaaggaggagttcatcaatgacatctctgggggcaaaccattagaggttgagatggccggcatcgagtacatgaacgacgatcctggtatggtagatgtcctgtatgcaaaagtacacatgaaagacgggagtaatcgcttgcaggagcttgtggatcgcgtacttgaaaggtttcaggccagcggtctcatcgtgaaagaatggaatagcgtgaagctgcacgccaccgtgatgaatacgctgtttaggaaagacccaaatgccgagggtagatataatctgtacaccgccgagggcaaatatatcttcaaagagcgggagagcttcgatggaagaaatattctgaagagctttgcgctgctcccccggctggagtacaatgatgccatttccgcacactgcaacctgtgcctaccaggaagtagcgacagcccagccagcgccagccaagtcgctggaataacgggtgtctccgatgcatatagccagagtttgcctgggaaatcctag

SEQ ID NO: 177727 - DNA, 1074 bp, synthetic construct
  misc_feature 1..1074: note = Description of Artificial Sequence: Synthetic coding sequence
  source 1..1074: mol_type = other DNA
atggaggtgctgcggccccagctgatccggatcgacggccggaactatagaaagaacccggttcaggaacagacctaccagcatgaagaggacgaagaagacttctaccaggggagtatggagtgcgcagacgaaccatgcgacgcgtacgaagtagaacaaacgccacagggttttcgttctaccctgcgcgccccaagcttactctataagcacattgttggaaagagaggcgatactcgcaaaaagattgagatggagacaaaaacctccatctctataccaaagcctggtcaggacggtgagatcgtaatcacgggccagcaccgcaacggagtgatctctgcccggactagaatcgacgtgctcctcgatacgttccgcagaaaacagcccttcacgcactttttggcatttttcctcaatgaggttgaggtgcaggagggtttcctccggtttcaggaggaagtgctggcgaagtgttccatggaccacggcgtcgactcgtcgatcttccaaaacccaaagaaactacatctgacaatcgggatgctggtcctcctgtccgaggaagagatacaacagacatgcgagatgctgcagcaatgtaaagaggagtttatcaacgatatctccggcggcaaacccctggaggtcgaaatggcggggatcgaatatatgaacgatgatcctggcatggttgatgtgctctatgccaaggtccacatgaaggacggctcaaaccgcctgcaggagcttgtggaccgggtgctggaacggttccaggcttcgggtctgatcgtgaaggagtggaactctgtcaagcttcacgctactgtaatgaacactctgttcaggaaagaccccaatgctgaaggccgctataacctatataccgcagaaggcaaatatatcttcaaggagcgcgaaagctttgatggccggaacattctgaagctattcgagaacttctacttcggcagtttgaagctcaattcaatccatatctcccaaaggttcacagtggattccttcggaaactatgcgagctgcggccaaatcgacttctcttag

SEQ ID NO: 177728 - DNA, 879 bp, synthetic construct
  misc_feature 1..879: note = Description of Artificial Sequence: Synthetic coding sequence
  source 1..879: mol_type = other DNA
tgatacaagcacatcgtgggcaagcggggcgacacccggaagaagatcgaaatggagaccaagacaagcatcagcatccccaaacctggtcaagatggtgagattgtgatcactggtcagcacagaaacggtgtgatttccgccaggacaagaatcgatgtgttgcttgacaccttccgccgtaaacagccatttacccacttcttggcgttctttttgaatgaagtggaggtgcaggaagggtttttgcggtttcaggaagaagtgcttgcgaagtgctctatggaccacggcgtggactcatctattttccaaaatccaaaaaagctgcacctaaccataggtatgctggtgctcctcagtgaggaagaaatccaacaaacttgcgagatgttacagcagtgtaaagaggagttcatcaatgatataagtgggggaaagcccctggaggtggagatggcggggatcgagtatatgaacgatgacccgggcatggtggatgtgttgtatgcaaaggtgcacatgaaggatggttctaatcgtttacaggaactcgtggacagagttctggaaaggtttcaggcaagcggccttattgttaaggaatggaattctgtaaagctacatgctacagttatgaatacgctctttcgtaaggatccaaacgccgagggccgatacaatttatacacggcagaaggcaaatatatcttcaaggaaagagaaagttttgacggcaggaatatcttaaaatcttttgccctgttaccccgcctcgagtacaatgatgcaatcagtgcgcattgtaacctatgcttacctgggtcttcagactcccccgcctcagcctcgcaggtagccgggattaccgtagtgtag

SEQ ID NO: 177729 - DNA, 828 bp, synthetic construct
  misc_feature 1..828: note = Description of Artificial Sequence: Synthetic coding sequence
  source 1..828: mol_type = other DNA
atggagaccaagaccagcatcagcatccccaagcccggccaggacggtgagatcgtaataaccgggcagcatcgcaacggagtgatcagtgcgcgcactaggatagacgttctgttagacactttccgcagaaagcagcctttcactcacttcctcgcattcttccttaacgaagtggaggtgcaggagggttttctccgattccaagaagaagtgctggcgaaatgttcaatggatcacggtgtggattcttcaatcttccagaatcctaagaaactgcacttgactatcggaatgcttgtcctgctcagtgaggaagaaatacagcagacctgcgagatgctgcaacagtgtaaggaagagtttataaacgacatatcgggcggcaagcccctggaagtggagatggccggtattgagtacatgaatgacgacccagggatggtggacgtgctgtacgccaaagtgcatatgaaggatggaagcaacaggctgcaggaactggtcgaccgggtgcttgagcgctttcaggccagcggcctgattgtcaaggagtggaatagtgtgaagctgcacgcaacagtcatgaacaccttattcagaaaggacccgaatgccgagggaagatacaatctttacacagccgagggcaagtatatcttcaaggagagggaatcatttgatgggagaaacattttaaaatcttttgccctcctgccaaggctcgaatataatgacgcaatctcagcccattgcaatttatgtctcccgggtagcagcgacagtcccgcttccgcgtctcaagtcgccggcataacagtggtgtag

SEQ ID NO: 177730 - DNA, 372 bp, synthetic construct
  misc_feature 1..372: note = Description of Artificial Sequence: Synthetic coding sequence
  source 1..372: mol_type = other DNA
atggaggtgctgcggccccagctgatccggatcgacggccggaactacagaaagaacccagtacaggagcaaacctatcagcacgaggaggatgaagaagatttctatcagggatcaatggagtgcgcagacgagccctgcgatgcctacgaggtagaacagaccccacaagggtttcggtcaactcttagggccccaagcctgctctacaagcacattgtaggcaagcgcggggatactagaaaaaaaatcgagatggagacaaagactagcatttcaatccccaagccgggacaagacggcgagatcgtgatcaccgggcagcatcggaacggggttatatcagctcggacaagaatcgatgtgctctag

SEQ ID NO: 177731 - DNA, 312 bp, synthetic construct
  misc_feature 1..312: note = Description of Artificial Sequence: Synthetic coding sequence
  source 1..312: mol_type = other DNA
atggaggtgctgcggccccagctgatccggatcgacggccggaactaccgcaagaacccagtgcaggagcagacataccagcatgaggaggacgaggaggacttttatcagggttctatggagtgtgcagatgagccgtgtgatgcctacgaggtggaacagacaccacagggattccggagtacactgcgggctccttccctgctttacaagcacatagtgggcaaaaggggagacaccagaaagaagatcgagatggagacaaagacatctatctcaatacccaaacccggtcaggatggcgagatctag

SEQ ID NO: 177732 - DNA, 459 bp, synthetic construct
  misc_feature 1..459: note = Description of Artificial Sequence: Synthetic coding sequence
  source 1..459: mol_type = other DNA
atggaggtgctgcggccccagctgatccggatcgacggccggaactaccgcaagaatccagtgcaggagcaaacctatcaacacgaagaggatgaggaggatttttaccagggatctatggaatgcgctgatgagccgtgtgatgcgtacgaagttgagcaaacacctcagggcttccggtctacactcagggcgcccagtcttctttataagcacatcgtgggcaagaggggtgatacgcgaaaaaaaatcgaaatggaaaccaagacctctatcagtattcccaagccaggacaggacggtgagattgttattactgggcagcacagaaatggggttatctccgcccggacaaggatcgacgtcctactagacactttccgtcgaaagcagccttttacccacttcctggcctttttccttaacgaagttgaagtgcaggaggggtttctgcgctag

SEQ ID NO: 177733 - DNA, 171 bp, synthetic construct
  misc_feature 1..171: note = Description of Artificial Sequence: Synthetic coding sequence
  source 1..171: mol_type = other DNA
atggaggtgctgcggccccagctgatccggatcgacggccggaactacaggaaaaaccccgtccaggagcagacgtaccagcacgaagaggacgaagaggatttctaccagggaagcatggaatgcgctgatgaaccatgtgatgcttacgaagtcgaacagactccatag

SEQ ID NO: 177734 - DNA, 1140 bp, synthetic construct
  misc_feature 1..1140: note = Description of Artificial Sequence: Synthetic coding sequence
  source 1..1140: mol_type = other DNA
atgatgaagtaccccggcacctggccctgccagggcatcatcggcatttcatttggggagtcagtcatggaagtgctgcggccacaactaataaggatcgatggaagaaattatcggaagaacccagtgcaagagcaaacataccagcatgaggaggacgaagaggacttttatcaaggaagcatggagtgtgcagacgagccctgtgacgcctacgaggtggagcagactccccaaggtttccgtagcactttgcgcgcaccaagtctgttgtataaacatatagttggaaagaggggcgacaccagaaagaaaatcgagatggaaacgaaaacctccattagcatccccaagcccggccaggacggagagatcgtcattaccggccaacaccgaaatggcgtgattagtgcgcggactcgcattgatgtccttctggacacatttcgacggaagcaacctttcacccattttttggcatttttcctgaacgaggttgaggtacaggagggctttctgagatttcaggaggaggtgctggctaagtgttcaatggaccacggcgtcgactcgtccattttccagaaccctaagaagctgcatctcacgattggtatgcttgtcctcctgtctgaggaggaaatccaacagacatgtgagatgctgcagcagtgcaaagaagagttcatcaatgatattagcggaggtaagccactggaagtcgagatggcaggaatcgagtatatgaacgacgatcctggtatggtcgacgtgttgtatgccaaggttcatatgaaagacgggagcaaccggctccaggaattagtggaccgagtcctggagagattccaagcttcggggctgattgtgaaggagtggaatagcgtaaagctccacgctactgtgatgaatacactcttccgcaaagatcccaacgccgaggggcggtataatctttacaccgctgaaggaaaatatatctttaaggaaagagaatcctttgatgggaggaacatcctaaagctgttcgagaacttctacttcggctccctgaagctgaattcgatccatatttcacagaggttcacggtagattctttcggtaattatgccagttgtggtcagatcgacttctcatag

SEQ ID NO: 177735 - DNA, 2274 bp, synthetic construct
  misc_feature 1..2274: note = Description of Artificial Sequence: Synthetic coding sequence
  source 1..2274: mol_type = other DNA
atgcccgccctgcccctggaccagctgcagatcacccacaaggaccccaaaactggtaaactgaggaccagccccgcactccaccccgagcaaaaagccgataggtattttgtcctgtataagccaccacctaaggacaacattcctgcccttgtggaagagtaccttgagagggctacattcgtagccaacgacctggattggttactggccttgccccatgacaagttctggtgccaggtgatcttcgacgagaccttgcaaaaatgcctcgactcctatcttaggtatgttccgagaaagttcgacgaaggggttgcttccgctcctgaggtggttgatatgcaaaagcgcctgcatagaagcgtgttcttgacctttctgcgcatgagtacccataaggagtccaaagatcatttcataagcccttcagctttcggagagatcctatataataattttctgtttgatattccgaagatccttgatctttgtgtgttgttcggaaagggtaattctcctttgctccaaaaaatgatcggtaacatcttcactcaacagccttcctattactcagatctcgatgagacccttcccactattcttcaggtgttcagtaacatcctacagcattgcggactccagggtgacggagcgaataccactccccagaaactagaagagagaggcagactgactccctccgatatgcctctcctggaactaaaagacatcgtgctatatctctgcgatacctgcacgacactctgggcatttctcgacatcttccctctggcatgccaaactttccagaagcacgatttttgttatagattagcttccttttacgaggccgcaatacctgagatggagtctgccatcaagaagagacgtctggaagacagcaaactgctgggagacctctggcagcgactgagtcactccagaaagaaactgatggagatctttcacatcatcctaaaccaaatctgcttgttaccgatcctggagtcgtcatgtgataatattcaggggttcatagaggagttccttcaaatcttttcaagcctgcttcaggagaaaaggtttctgagggattatgacgctctattcccagtcgcggaggatatttccctactccagcaggcttcttccgtgctcgatgaaacaaggaccgcctacatcctccaggctgtggagtcagcttgggaaggcgtggataggcggaaggcaaccgatgctaaggatccctcagttatcgaggagcccaacggagagcccaacggagtcaccgttacagctgaggctgtgtcccaggccagctcgcaccctgaaaattcagaggaagaagagtgtatgggcgccgccgcagctgtcggccctgctatgtgtggcgtggaactagatagcctgataagccaggtaaaagacttgcttccagacctgggcgaggggttcatactagcatgtttagaatattatcactacgaccccgagcaggtcatcaataacatactggaagagcgactggccccaacccttagccagctcgaccggaatctggatcgcgaaatgaaacctgatccaactccgctcctcaccagccgacacaatgtctttcaaaatgatgaatttgacgtttttagtcgcgacagcgtcgatctgtctcgggtgcacaaaggtaagagtactcggaaggaggagaacactcgcagccttctcaacgacaagagggctgttgccgcccaaagacaaaggtacgagcagtattccgtggtagtcgaggaggtgccactgcagccgggagaaagtttgccataccactcggtatactacgaagacgagtacgacgacacatacgatggcaatcaagttggagccaacgatgccgattctgatgatgagctgattagcaggaggccgtttactatcccacaagttctgcggacgaaagtgcccagagagggccaggaggaggacgacgacgatgaagaagatgacgccgacgaggaggcaccgaaaccagatcattttgtgcaggaccctgccgtgctgagagaaaaggccgaggcaaggagaatggccttcctcgcaaaaaaaggctatcgccatgattcatccaccgccgtggcgggctctccacggggtcacggacaatcccgtgagacaacccaggaaaggcgtaaaaaagaggcaaacaaagctactcgcgcaaatcacaatagacgcaccatggcagatcggaagcgcagcaaaggcatgataccttcttag

SEQ ID NO: 177736 - DNA, 2274 bp, synthetic construct
  misc_feature 1..2274: note = Description of Artificial Sequence: Synthetic coding sequence
  source 1..2274: mol_type = other DNA
atgcccgccctgcccctggaccagctgcagatcacccacaaggacccaaagacaggcaaacttcggacctcacctgccctgcacccagaacagaaggcagatcggtatttcgtgttgtataaaccccctccgaaggataacattcccgcgttagtggaggaataccttgaacgggctaccttcgtggctaacgatctagactggcttctcgctttacctcacgacaagttttggtgtcaggtaatctttgatgagaccttgcagaagtgtctcgattcgtacctgagatacgtgcctcgcaaatttgatgaaggggtggctagcgcaccagaggtggtggatatgcagaagcggctgcaccggtcagtgttcctgactttcctgcggatgagtacccataaagaaagtaaggaccattttatctcccccagcgccttcggcgagatcctgtacaataacttccttttcgacatcccaaagatcctggatctgtgcgtgcttttcggaaaggggaatagtcccctgctgcagaagatgatcggtaacattttcacgcagcaaccttcatactactcagatctcgacgaaaccttaccaacgatcctccaggtcttctccaatattctgcagcattgcggcctgcagggggacggggcaaacaccacccctcagaaacttgaggaaaggggtcggttgaccccaagcgatatgccccttcttgagctaaaagatatagtactgtacctgtgtgacacttgcactactctatgggctttcctggacatcttcccattggcttgccaaacctttcagaagcacgatttctgctatcgtttagcctctttctacgaggctgcgatccccgaaatggaatccgcgattaagaaacgaaggctggaggacagcaaactcttaggtgacctgtggcaacgcctcagccactcccggaagaaactgatggagatcttccacatcatcctcaatcagatctgcctgctgcctatcttggaatcaagttgtgataatattcaggggtttattgaagagtttctgcagatcttttcctcactcctccaggagaagcggttccttcgtgactatgatgctttattccccgtagctgaagatatttcattactccaacaggcatcgagcgtgctggatgaaactcggacagcctatatactgcaggctgtagagtccgcgtgggagggtgtggatcggcggaaagcaacagacgccaaggatccatccgtcatcgaggagcccaatggcgagcccaacggtgtgacagtcaccgccgaggcagtctcacaggccagcagtcacccggaaaactcagaagaagaggagtgtatgggtgccgccgcagcagtaggccctgccatgtgcggcgtcgagctagattcccttatttcccaggtgaaggatctgttgccggacctaggagaaggattcatcctagcttgcctggaatattaccattacgaccccgagcaagttatcaacaatatcctggaggaacgtctggcacctaccctgtctcagttagacaggaacttggatagagagatgaagccggatcccaccccactgctgacatctcgacataatgtgtttcagaatgacgagtttgacgtattttccagggattccgttgacctcagccgagtccacaaagggaagagtacgaggaaagaagagaataccagatctctactaaacgataagagagccgttgccgcacagcggcagagatatgaacagtatagtgtcgtggtggaggaagtccccctccagccaggggaatccctgccctaccactccgtatactacgaggacgagtacgatgacacgtatgacggaaaccaggtgggggccaatgatgctgactccgacgacgaattgatatcacgtcgcccctttacaattcctcaggtccttagaactaaggtgccccgcgaagggcaagaggaggatgatgatgacgaggaggacgacgctgatgaggaggcacccaagcccgaccattttgtacaggatcccgctgtgctgcgcgaaaaggcagaggcccggcgaatggctttcttagccaagaaaggataccggcacgatagctctactgcagtagctgggtcccccaggggccacgggcagtccagggaaactacccaggaacgcaggaagaaggaagctaacaaggctactagagctaatcataatcggcgtacaatggcagacagaaagcgtagcaaaggtatgatcccctcctag

SEQ ID NO: 177737 - DNA, 723 bp, synthetic construct
  misc_feature 1..723: note = Description of Artificial Sequence: Synthetic coding sequence
  source 1..723: mol_type = other DNA
atgcccgccctgcccctggaccagctgcagatcacccacaaggaccccaaaactggtaagctacgcacaagtcctgctctgcatcctgaacagaaggccgaccgctatttcgttctctataagcccccgccaaaagataatattcctgcactggtagaggagtatctagaacgggcaacttttgtcgctaatgatctggactggttgttggctctgccccacgacaaattttggtgccaggttattttcgacgagactctacagaagtgtttggattcctaccttcggtacgtgccccgcaaatttgacgagggggttgctagcgcacctgaggtagtcgatatgcagaaaagattacaccggagtgtgttcttgacgttcttgcgtatgagcacgcacaaagagtctaaagatcacttcatcagcccgtcggcttttggcgaaatcctgtataataattttctgtttgacatacctaagatcctcgatctctgtgtcctctttggcaagggcaatagcccgcttctgcagaagatgataggtaacatcttcacacagcagccatcatattactccgacctcgacgagaccttgcccacgattctgcaagtgttcagtaacatactgcagcattgcggcttgcagggagacggcgctaacaccacgccccaaaagctggaggagaggggacggctcaccccgtctgacatgcctctactctag

SEQ ID NO: 177738 - DNA, 2046 bp, synthetic construct
  misc_feature 1..2046: note = Description of Artificial Sequence: Synthetic coding sequence
  source 1..2046: mol_type = other DNA
atgcccgccctgcccctggaccagctgcagatcacccacaaggacccaaaaaccggtaaactgcgcacgtccccagctctcgttatttttgatgaaactctgcagaagtgtctcgactcatacctgcggtatgtccccaggaagtttgacgaaggcgtggcctctgccccagaggtagtagatatgcagaagaggctacaccgcagtgtttttctgacctttctccgaatgtcaacacataaggagtctaaaattttggatctatgcgttctttttgggaaaggtaattcacccttattgcagaagatgataggcaatatattcactcagcagccttcttactactctgacctggatgagaccctccccaccatcctgcaagtgtttagcaacattcttcagcattgtggactccagggggacggagctaataccaccccccagaagctggaggagcggggaagactgaccccctctgatatgcctctgctggagctcaaagatattgtactctatctgtgtgatacttgcaccacactgtgggcattcctggacatctttcctttggcttgccaaacttttcaaaagcatgatttttgttatcgattggcatcattctacgaggcggcaatacccgagatggaatcagcaattaaaaagcgaaggctggaggattccaaactgcttggagacctgtggcagcggctgagtcattctcgaaaaaaactcatggaaatttttcacatcattttaaatcagatatgcctgttgccaattctggagtcctcttgtgacaatattcaggggtttatcgaagagttcttgcagatcttcagttccctgctgcaagaaaaaaggttcctgagggattatgacgccctgtttcccgtggcagaggatatcagcctgctgcagcaagcctcttccgtcctggatgaaaccaggacagcttacatcttgcaggctgtggaatcagcctgggaaggagtggatcggcgcaaggcaaccgacgctaaagatccaagtgtcatagaggaacccaatggagaacctaacggcgtgactgtcacggctgaagccgtgtcccaggcatcctctcatcccgaaaacagcgaggaggaggaatgcatgggggccgccgcagccgtgggaccggccatgtgcggcgtggaactggattcgctgatctcacaagttaaggatctgctgcccgatctgggcgaaggattcattctcgcctgtctcgaatattaccactatgaccccgaacaggtgatcaacaatattctggaagagaggttggcccctactttgtcccagctcgaccgcaacctggatcgcgagatgaaacctgatccaacacccctgcttacaagtagacataacgtgtttcagaatgatgaattcgatgtcttctccagggattccgtagatctgagcagggttcataaaggtaaaagcacaagaaaagaggaaaatacccgctccctattaaacgacaagagggccgtcgcggcccaacggcaacgctacgagcaatatagcgtggtggtggaagaggtccccttacagcctggtgaatcactgccataccactccgtctactatgaggacgaatacgatgatacctatgacgggaaccaggtcggtgcgaatgacgcagatagtgacgacgagcttatatcgcggcgacctttcactattccccaggtgctgcgtacgaaagtgcctagagagggccaggaggaggatgacgacgatgaggaggacgatgctgacgaggaagctcctaaacccgaccacttcgtgcaggaccctgctgttctgcgcgagaaagccgaagcgcgaaggatggccttcctcgcaaagaagggctaccgacacgactccagcacagccgttgcaggatcccctcgagggcatggccaatctagagaaacaacacaggagcgtcggaagaaggaggccaacaaggcaacacgtgccaaccacaatcgccgtaccatggctgatcgcaagagaagtaaagggatgattccctcttag

SEQ ID NO: 177739 - DNA, 531 bp, synthetic construct
  misc_feature 1..531: note = Description of Artificial Sequence: Synthetic coding sequence
  source 1..531: mol_type = other DNA
atggccctgccccggctgaccggcgccctgcggagcttcagcaacgtcaccaaacaagacaattataatgaagaggtggctgacctgaagataaaacggagcaagctccatgagcaggtccttgaccttgggctgacgtggaagaagatcatcaagtttctcaatgagaaacttgagaaaagtaagatgcagtccatcaacgaggacctgaaggacatattgcatgcggccaaacagattgtcggcacagataatggtagagaagctatcgagtctggagctgccttcctgtttatgacctttcatcttaaagattcagttggccataaagaaaccaaagccatcaagcagatgttcgggccatttccctcatcctctgctacagccgcatgtaacgccacaaataggataatttcacacttttcacaggacgatctgacagctttggttcagatgaccgagaaagagcatggcgatagggtgttctttggcaagaacctggcattcagctttgacatgcacgacctgtag

SEQ ID NO: 177740 - DNA, 336 bp, synthetic construct
  misc_feature 1..336: note = Description of Artificial Sequence: Synthetic coding sequence
  source 1..336: mol_type = other DNA
atggccctgccccggctgaccggcgccctgcggagcttcagcaacgtaaccaaacaggacaattataacgaggaagtggcagatttgaagattaaaaggtccaagcttcacgaacaggtgctggacctggggctgacgtggaagaagataattaaatttttgaacgaaaaattggagaaaagcaaaatgcagagtatcaatgaggatctcaaagatatccttcacgccgccaagcaaatcgaggtcaattgccccttccagaagcgcagactggatggaaaagaggaggatgagaagatgagtagggcttctgatagatttcgcgggctccgatag

SEQ ID NO: 177741 - DNA, 6609 bp, synthetic construct
  misc_feature 1..6609: note = Description of Artificial Sequence: Synthetic coding sequence
  source 1..6609: mol_type = other DNA
atggccctgccccggctgaccggcgccctgcggagcttcagcaacgtcaccaagcaggacaactacaatgaagaagtggcagacttgaaaatcaaacgttcgaagttacacgagcaagtacttgatctgggtctgacctggaaaaagattataaagtttttgaacgagaagcttgagaaatctaaaatgcagagtatcaacgaagatcttaaagatatcctgcatgcagctaagcaaattgttgggaccgacaatggaagggaagccatagagtcaggtgccgcctttctgtttatgaccttccacttgaaagacagtgttggccacaaggagaccaaggcgattaaacagatgtttggcccatttccctcgtctagtgcaaccgcggcctgtaacgcaacaaatagaattatcagtcacttctctcaggatgacttgactgcactggtgcagatgaccgaaaaagaacacggagatcgcgttttctttggaaaaaatctcgccttctcattcgatatgcatgacctggaccactttgatgaactccccattaacggggaaacccagaagacaatatccttggactacaagaagttccttaatgaacatttgcaggaggcgtgtacccccgaactgaagccggtagagaagaccaacggatccttcctctggtgcgaagtggagaagtatctaaactccactctaaaagagatgacggaggttccaagagtagaggatctgtgctgcaccctgtatgacatgctggcttctataaagtcaggagacgagctgcaagacgagctgtttgagttgctcggtcctgagggcctcgaactgattgagaagcttctccagaatagaattaccattgtggataggttcctcaattctagcaatgatcataggttccaggcccttcaggataactgcaaaaaaattctgggagaaaacgctaagccgaattacggatgccaggtaaccattcaatccgagcaggagaaacagttgatgaaacagtaccgccgggaggaaaagagaattgcccgcagagagaaaaaggctggcgaagatcttgaggtgagcgagggacttatgtgctttgaccccaaggaattaaggatacaacgcgagcaggccttgctgaatgcacgctctgtgcctatcctgagtagacagagagacgcagacgtggagaagatccattacccgcacgtctacgattcacaggcggaggccatgaaaacctccgcattcatcgccggggctaagatgatcttgcctgagggaatccaaagggagaacaataaactttatgaagaggtccgcatcccttactccgagcctatgcccttaagctttgaggagaaacccgtttacatccaggacctggacgagattggccagctggcctttaaaggcatgaagcgcctgaaccggattcaaagcatcgtgttcgagaccgcatacaataccaacgaaaatatgctgatctgtgctcctacaggcgcgggtaagacaaatatagcaatgctgaccgtgctgcacgagatacgacagcattttcagcagggcgtcattaagaagaacgagtttaagattgtctatgtggcccctatgaaggctctcgctgcggaaatgaccgattacttctctagacgtttagagcctctcggtataatcgtcaaggaactcaccggcgatatgcaactgagtaagtcagaaatactgaggacacagatgttagtaacgactcctgagaagtgggatgttgtaacacgcaagagtgtgggggacgttgccttaagccagatcgtgcggctgctgattctggatgaagtgcatctgttacacgaggatcgcgggcccgtacttgaatcgattgtggcacgtactttaagacaggttgaaagtactcagtcaatgattaggatcctcggactttccgctaccctgcccaattacttggatgtggcaactttccttcacgttaatccatacatcggattatttttctttgacgggcgatttcgccccgtgccactgggccagacatttctcggaattaaatgtgccaataagatgcagcaacttaacaacatggacgaggtgtgctatgagaatgtgctcaagcaggtgaaagccgggcaccaggtcatggtcttcgttcatgctaggaacgcgaccgtgcgaacggcgatgtcactcatcgagagagccaaaaactgcgggcatattcccttctttttcccaactcagggtcacgactatgttctggctgaaaagcaagtgcaacgcagtcgtaataagcaggtgcgggagcttttccccgatggattctccatccaccacgccggaatgttgcgccaggatcggaatcttgtggaaaatctattctctaacggccacataaaagtgctagtgtgcaccgctaccctagcgtggggcgtgaatctgcccgctcacgccgtcatcatcaaaggcacccagatttatgccgctaaaaggggatcatttgtggaccttgggatcctagacgtgatgcagatcttcggacgggcggggcggccacagtttgacaaatttggggagggtattataatcactacccatgacaagctgtctcattacctgacattgctgactcagagaaatccaatagaaagccagttcctagagtctctggctgataatctgaatgccgagattgcactgggaactgtgactaatgtggaagaggccgtgaaatggatctcttacacttacctgtatgtgcgcatgagggcgaaccccttggcatacggcatcagccacaaggcgtatcagatcgatcctaccttgcgtaagcatcgagagcagctggtcatagaggtgggccgaaaactcgacaaagcccagatgatccgttttgaagaaagaacaggatattttagtagcacagacttagggaggacagccagccactattatattaaatacaacactatcgagactttcaatgagctgtttgacgcccacaagacagagggcgatatctttgcgatagtgtccaaagcagaagaatttgatcagatcaaagtgcgggaagaagaaattgaggaactggatacattgctctcaaatttctgcgaactgagcacgccagggggagttgaaaatagctacggcaaaataaatattctgttgcagacatatatctctagaggtgagatggacagtttctctttgattagcgatagcgcatacgtggctcaaaatgcggcacgtatcgttagggctttgttcgaaatcgctctgcgtaagcgttggcctaccatgacttacaggctgctcaatctgtcaaaagtgatagacaagaggctgtggggatgggccagccctctgcgccagttttcaatactgccaccccacattctgacacggctggaggaaaagaaactcacagtggacaaactcaaagacatgcggaaggatgaaataggtcatattctacaccacgtgaacatcgggttgaaggtgaaacagtgtgttcaccaaataccatcagtgatgatggaggcctccatacagcccataacgcggacagtgctccgagtcacgctgtccatctacgctgattttacctggaacgaccaggtgcacggcaccgtcggagagccttggtggatttgggttgaggatccaacgaacgaccacatctatcacagtgaatacttcctggccctcaagaaacaggtgatctctaaggaagcccagctgttggtcttcactatccctatcttcgagccactgccgtcacagtactacatacgcgccgtatctgataggtggctgggagccgaggctgtttgcattataaattttcagcacctaatactgccagagcgtcaccctccccataccgaactgctggatctccagcctctcccaatcaccgccctcggatgtaaggcctatgaagctctttacaacttttcacacttcaaccccgttcagacacagatctttcacacactttatcacactgattgcaacgtgctcctgggggcgcctacgggctcaggcaagactgtggcggccgagctggctattttcagggtgttcaacaagtacccaacgagcaaggcagtctacatagcaccactcaaggccctggtaagggaacgcatggacgactggaaagttcgcattgaagaaaaacttggcaaaaaagtcattgaactgaccggtgatgtcacccctgacatgaagagcattgctaaagctgacctgatcgtgactacccccgagaagtgggacggcgtgagcaggtcgtggcagaacagaaactatgtgcagcaggtgactatcttaattatcgatgaaatacatttgttgggcgaggagcgcgggccggtgctggaggtaattgtctctcgaaccaattttatttccagtcatactgaaaaacctgtccgcatcgtgggactttcaacggctcttgcgaatgcgcgggacctcgccgattggcttaacatcaaacagatgggcctgttcaattttaggccaagtgtgcggccagtaccactggaagtgcacatccagggattccctggccaacactactgcccaaggatggcttctatgaacaaacccgcctttcaggccattcgttctcactccccagccaagcccgtgttgatttttgtttccagccggaggcagactaggctgaccgcacttgaactgattgcctttctggctaccgaagaggacccgaagcagtggctgaacatggatgaacgagaaatggagaatatcatagcaactgtcagggactcgaatttgaagctcaccctggccttcggaatcggcatgcatcacgccgggctccatgagcgcgatcgtaagaccgtggaagaactgtttgttaactgtaaggtgcaggtactgatcgctacttctacgctcgcttggggcgtgaattttccagctcacctggtgattatcaaggggaccgagtactacgatggcaagactcggagatacgtggacttccccataaccgacgtgctgcagatgatgggccgcgccggacgcccacaattcgatgaccagggtaaggccgtgatcctggttcacgatattaagaaagacttttataaaaagttcctgtacgagcctttccctgtcgaatcaagcctgttaggggtgctctccgatcacctaaacgccgaaattgccggagggacaattacctcgaagcaggatgcccttgattatataacttggacctatttctttagacgtcttatcatgaacccgtcatattataacctgggcgatgtttcccatgactccgtgaacaagtttttgtctcacttaattgaaaagagtctcatagaattggagctatcctactgtattgagatcggcgaagacaacagaagtattgaaccccttacttatggccgcatcgcttcttattactacctgaagcaccagaccgtcaaaatgtttaaggatagattgaagccagagtgtagcacagaggagctactgagcatactctccgacgcagaggagtacaccgatctgccagtccggcacaacgaggaccacatgaattcagagctggcaaaatgtcttcccattgaaagtaatccacattctttcgacagcccacataccaaggctcacctcttgctgcaggcccatctgagccgtgctatgctcccctgtcccgactacgacacggatacaaaaactgtgctggaccaagctttgcgggtttgtcaggctatgctggatgtggccgccaatcagggatggttggttacggtgcttaatataactaacctgatccagatggtaatacagggcagatggctgaaagattcatcgctgttgacgctgccaaacatcgagaaccatcatctccacctcttcaagaaatggaaacctatcatgaaggggccccacgctaggggtaggacttccattgaatctctgcccgagctaatccacgcatgtggggggaaagaccatgtcttttcttcgatggttgaaagcgagcttcacgccgcaaagactaaacaggcttggaactttcttagccatctgccagttatcaatgtggggatttctgtaaaaggaagctgggatgacttggtcgaaggacacaacgaactgtcggtttcgactcttacggcggacaagagggatgataataaatggatcaaattgcacgcggatcaagagtatgtcctccaagtgagcttgcagcgcgttcacttcgggtttcacaaagggaagcccgaaagctgtgccgttacacctcgctttcccaaaagcaaggatgaggggtggttcttaatactgggtgaagtcgacaagagggagctgatcgctctaaaacgcgtgggctacatacgcaaccaccacgtggcctctctgtcattttataccccagagatcccaggaagatacatctacacgctgtacttcatgagtgattgctatttaggcctcgaccagcagtacgacatatacctcaacgttacacaggcctccctgtccgcacaggtgaataccaaagtctctgattccctaaccgatttggccctgaaatag

SEQ ID NO: 177742 - DNA, 816 bp, synthetic construct
  misc_feature 1..816: note = Description of Artificial Sequence: Synthetic coding sequence
  source 1..816: mol_type = other DNA
atggaggacagccacaagagcaccaccagcgagaccgccccccagccaggctccgctgtgcagggcgcgcatataagccacatcgcgcaacaagtcagctctttgtccgagagtgaagagtcccaagactccagcgattccattggctctagccagaaagcccacggaatcctggcgaggcggccaagctacaggaaaattctgaaagatctgagttccgaagacactagagggcgaaagggagacggtgagaatagtggcgtgtctgccgccgtgacgtccatgagcgtgcccacgccaatctatcagacaagttctggccaatatatagccattgcaccaaacggcgctctacagctagcgagcccgggaacagatggagtgcagggccttcagaccctgacaatgacaaattctggctctacccaacaggggaccaccatcctacagtacgcccaaacaagcgacggtcagcagattctcgtgccaagcaatcaagtagtggtgcagacagcaagcggggatatgcagacttatcagattagaacaacgccttccgcgacttccctgccacagacagtcgtcatgactagccccgtgactctcacaagccagactaccaaaacggacgatccacagctgaagcgcgagatccggttgatgaagaacagggaggcggcccgagaatgtcgaagaaagaagaaagagtacgtgaagtgcctggaaaatagagtggccgtgctcgagaaccagaataagaccctcattgaagaactgaagactctcaaggatctctatagcaataaaagcgtctag

SEQ ID NO: 177743 - DNA, 411 bp, synthetic construct
  misc_feature 1..411: note = Description of Artificial Sequence: Synthetic coding sequence
  source 1..411: mol_type = other DNA
atgaccaacagcggcagcacccagcagggcaccaccatcctgcagtatgctcagactagcgacggtcaacagattttggtaccctccaaccaggtcgtagttcaaaccgcttcgggtgatatgcagacatatcagatccggacaacaccatcggcgaccagcctgccccagaccgtagtgatgacctctccagtgaccctcacctctcagactacgaagactgatgacccgcagttgaagagggaaatccgtctcatgaaaaacagagaagctgccagagagtgtcgaagaaaaaagaaggagtatgttaaatgtctcgaaaatcgtgtggcagtcctggaaaatcaaaataagacactgatcgaggaacttaaaacgctgaaggacctgtacagcaacaaatccgtatag

SEQ ID NO: 177744 - DNA, 603 bp, synthetic construct
  misc_feature 1..603: note = Description of Artificial Sequence: Synthetic coding sequence
  source 1..603: mol_type = other DNA
atggaggacagccacaagagcaccaccagcgagaccgccccccagcctggctccgccgtgcagggggcgcatattagccatatcgcccagcaggtgtcatctctgagcgagtctgaagaatcacaagactcttccgactccatcggttcctctcagaaggcgcatggcatcctggcacgccgaccaagctatcgtaaaatcctcaaagacctgagttccgaggatacaagaggaagaaaaggtgatggtgagaatagtggggtgagcgcagccgtgacttcaatgtccgtgccaacccccatctatcagacctcttctggccagtacatagccatagcaccaaacggcgctcttcagctcgcaagccccggcacggatggcgtgcaggggttgcagacactcaccatgactaacagcggctccactcagcagggtaccacaatcttacagtacgcccagacatcggacggccagcaaatcctcgtgccttccaaccaggttgtggtccagaccgcttctggagacatgcagacctatcagattagaaccaccccgtctgccacatccctgccacagaccgtggtgatgacttcacctgtatag

SEQ ID NO: 177745 - DNA, 513 bp, synthetic construct
  misc_feature 1..513: note = Description of Artificial Sequence: Synthetic coding sequence
  source 1..513: mol_type = other DNA
atggaggacagccacaagagcaccaccagcgagaccgccccccagcccggaagcgcagtccagggagcccacatttctcatatcgcccaacaggtatcaagcctgagcgaaagtgaagagtcgcaggactcatcggattccatcggttccagccagaaggcccatgggattctcgccagacggccatcctacaggaaaatattgaaggaccttagtagtgaagatacccgcggcaggaagggagacggcgagaactctggggtttccgcggctgtgacttcaatgtctgtgccaacgccaatttatcagacaagcagtggacagtacatagccatcgctcccaacggagccctccagcttgcttcgcccggtacagatggagtccagggtttgcagacactgaccatgacaaattcaggcagcacccagcagggaacaaccattctgcagtacgctcagactagtgatggccaacaaatattagtgccttctaaccaggtggtggttcagtag

SEQ ID NO: 177746 - DNA, 321 bp, synthetic construct
  misc_feature 1..321: note = Description of Artificial Sequence: Synthetic coding sequence
  source 1..321: mol_type = other DNA
atgatgctgcagcaccccggccaggtgagcgccagcgaggaggagttgcgcttcgccatccagaacaaacacctgtgccatcgcatgtcgagtgctttagagtccgtgaccgtgagcgatcgccccctgggcgtgagcattaccaaggccgaagtggccccagaagaagatgagcgtaagaagcgccggcgagagcggaataaaatcgccgcggctaagtgtcgcaacaagaaaaaggagaaaacagaatgcctgcaaaaactgcctcgcccattttgggtgcagaaaacctgtatttgggctgtggatagctgcaaatag

SEQ ID NO: 177747 - DNA, 546 bp, synthetic construct
  misc_feature 1..546: note = Description of Artificial Sequence: Synthetic coding sequence
  source 1..546: mol_type = other DNA
atgatgctgcagcaccccggccaggtgagcgccagcgaggtgagcgcatccgctatcgtgccatgtctctcccctccggggtcactggtgttcgaagacttcgccaatttgaccccctttgtcaaggaggagctgcgcttcgccatacagaacaagcacctgtgccacaggatgtcctctgcattggaaagcgtgaccgtgtctgaccggccattgggggtatccattactaaggccgaggtagctcccgaagaggatgaacgaaagaagcgccggagggagcgaaacaaaatcgctgccgccaaatgccggaataaaaaaaaggagaagacagagtgcctacagaaagaatcagagaaactggagagcgttaatgcggaactgaaagcgcagattgaagagctgaaaaacgagaagcagcacttgatatacatgcttaacctgcaccgacccacctgtatcgtgcgcgctcaaaatggtcgaacccctgaagatgaaaggaatctttttatccaacagatcaaggagggcacactgcagtcctag

SEQ ID NO: 177748 - DNA, 528 bp, synthetic construct
  misc_feature 1..528: note = Description of Artificial Sequence: Synthetic coding sequence
  source 1..528: mol_type = other DNA
atgatgctgcagcaccccggccaggtgagcgccagcgaggtgagcgcttctgcaatcgtcccttgtcttagccctccaggctctctggtctttgaagactttgcaaaccttactcctttcgttaaagaagagttgagatttgcgatacaaaataaacacctctgccaccgcatgagctccgccctggagtctgttactgtttccgaccgaccccttggtgtttctataaccaaagcagaggtggcccccgaggaggacgagcgcaagaagcgtaggagagagcgtaacaagatcgccgctgccaagtgtcgcaacaagaaaaaagagaagactgaatgtctccaaaaggagagtgagaagctggagtctgtcaatgctgaacttaaagcacagattgaagagttgaaaaacgagaaacagcaccttatctacatgctcaatctgcacagacccacgtgtatagttcgggcccaaaatggccggacgcctgaagacgagcggaacttatttattcaacaaattaaatag

SEQ ID NO: 177749 - DNA, 408 bp, synthetic construct
  misc_feature 1..408: note = Description of Artificial Sequence: Synthetic coding sequence
  source 1..408: mol_type = other DNA
atgatgctgcagcaccccggccaggtgagcgccagcgaggtgagcgcctccgccatcgtcccttgcctgagccctcctgggtccctggtgttcgaagatttcgcgaacctgactcctttcgtaaaagaggaactacgatttgctattcagaataagcacctctgtcatcgtatgagcagcgcactcgagagtgtgactgtctcagaccgaccattgggtgtgtccattaccaaagccgaagtggcccccgaagaggatgaacgaaagaaaaggaggagagagcgtaacaagatcgcggctgcaaagtgtagaaataaaaagaaagagaagaccgagtgtctgcaaaaactcccaaggcccttctgggtgcagaagacgtgcatatgggccgttgactcctgcaagtag

SEQ ID NO: 177750 - DNA, 375 bp, synthetic construct
  misc_feature 1..375: note = Description of Artificial Sequence: Synthetic coding sequence
  source 1..375: mol_type = other DNA
atgagcagcgccctggagagcgtgaccgtgagcgaccggcccctgggtgtgtctattaccaaggcggaggtggcccctgaggaggacgaacggaaaaaacgtaggcgggagcgtaacaaaattgccgcagctaaatgcaggaacaaaaagaaagagaagaccgagtgtctccagaaggaatccgagaaacttgagtcagtaaatgcagagttgaaggcacagattgaggaactgaaaaatgaaaagcaacacctgatttacatgctgaatttgcataggccgacttgtatcgtgagggcccagaacggtcggacgcccgaggacgagcggaacctgtttattcagcaaattaaagaggggaccctccagtcttag

SEQ ID NO: 177751 - DNA, 546 bp, synthetic construct
  misc_feature 1..546: note = Description of Artificial Sequence: Synthetic coding sequence
  source 1..546: mol_type = other DNA
atgatgctgcagcaccccggccaggtgagcgccagcgaggtgagcgcttccgccatcgttccatgcttgtcacctccaggctccctcgtgtttgaagatttcgctaatctgacccccttcgtgaaggaggagcttaggttcgccatacagaataagcatttgtgccaccgtatgtcctccgccctcgagagcgtgacagtgtcggataggccgcttggagtctctatcacaaaagccgaggttgctccggaagaggacgaacgtaagaagagacgcagagaaaggaacaaaatcgccgctgccaagtgccggaacaaaaaaaaggaaaagactgagtgtttgcagaaggaatcagagaagcttgagagtgttaacgccgagctgaaggcccagatcgaggaattgaagaatgaaaagcagcaccttatctatatgctgaacctgcacagacccacatgcatcgttcgtgcgcagaacgggagaaccccggaggacgaaagaaatctgttcattcaacagattaaggagggcactctgcagagctag

SEQ ID NO: 177752 - DNA, 408 bp, synthetic construct
  misc_feature 1..408: note = Description of Artificial Sequence: Synthetic coding sequence
  source 1..408: mol_type = other DNA
atgatgctgcagcaccccggccaggtgagcgccagcgaggtgagcgcttccgcaatcgtgccgtgcctgtcccccccaggatctctggtgtttgaggacttcgccaacctcacaccgttcgttaaagaagagcttagattcgctatccaaaataagcatctttgccaccggatgagctccgctctggagtcagtgacagtgtccgataggcccctgggggtgtctattaccaaagccgaggtagcaccggaagaggacgagagaaaaaagaggagaagggagagaaacaaaattgccgctgccaagtgccggaacaagaagaaggagaagaccgaatgcctgcagaagctcccccggcccttttgggtgcagaagacttgcatctgggccgtggatagctgtaagtag

SEQ ID NO: 177753 - DNA, 1056 bp, synthetic construct
  misc_feature 1..1056: note = Description of Artificial Sequence: Synthetic coding sequence
  source 1..1056: mol_type = other DNA
atgaccgagatgagcttcctgagcagcgaggtgctggtgggcgacttaatgtcgccgttcgaccagagcggcctgggggccgaggaatctttgggactgctagacgattacctcgaagtggccaaacactttaagccccacggcttcagctctgataaggcaaaggctggtagcagcgagtggctggccgtagacggattggtgtcgccaagcaacaattccaaagaggacgcttttagcggaacagactggatgctcgagaaaatggatctcaaagaatttgatctcgatgccttgctgggaattgatgatctggaaactatgcccgacgaccttttgactaccttggacgatacctgcgacctgttcgcacctcttgtgcaggagactaataagcaacccccccaaaccgtcaatcccattggacacctcccagagtccttaacgaagcccgaccaagttgcccccttcactttcctgcagccactcccgttatccccaggagtactttcgagcacccccgaccattctttctcgctggagctgggatcagaagtggacattaccgagggggatagaaaacctgattacacagcctacgtcgccatgatcccacagtgtatcaaggaagaggatacgccttctgacaatgacagcggcatatgcatgagtcccgaatcttatctgggcagcccccagcattctccttctacccgcggcagccctaaccgctccctgccttctccaggggtgctgtgcggaagcgctcggcccaagccttatgatcccccaggggagaagatggttgcagctaaagtaaagggcgagaagcttgataaaaaattgaaaaagatggagcaaaacaagactgccgcaacccgctaccgccagaagaaacgcgccgagcaggaggccctgactggcgagtgcaaggaactagagaagaagaacgaggccctgaaagaacgcgccgacagtctcgccaaagaaatccaatacctgaaggacctgatcgaagaagtgcgcaaggcaagggggaagaaacgggttccatag

SEQ ID NO: 177754 - DNA, 1056 bp, synthetic construct
  misc_feature 1..1056: note = Description of Artificial Sequence: Synthetic coding sequence
  source 1..1056: mol_type = other DNA
atgaccgagatgagcttcctgagcagcgaggtgctggtgggcgacctgatgtccccattcgatcagtctgggttgggcgcagaggaatccctgggcctactggacgactatctggaggtcgcaaaacattttaaacctcatggcttctctagcgacaaggccaaggctgggtcatccgagtggttggcggtcgacggactggtatcccccagtaacaactcaaaggaagacgcattctctggcactgattggatgctcgaaaaaatggatttaaaagagtttgatctagacgcgctgttggggatcgatgacctagagacaatgcctgatgatttgctgaccactttggacgacacctgcgacctattcgcaccccttgtgcaagagacgaataaacagccgccacaaaccgtgaatcccattggtcatcttcccgagtcattgacaaagccagaccaggtggctccattcacttttctccagcctttgcccctctcacccggagtgctcagctctactcctgatcactcctttagcctggagctcggatctgaggtggatatcacagaaggggataggaagcctgattataccgcctacgtggccatgatccctcaatgcatcaaggaggaggatactcctagtgacaacgattccggaatttgtatgtccccggagtcatacttgggcagccctcagcattcgccgtcaacacgaggatcccccaacaggagtctcccatctccaggtgtgttgtgcggaagcgcgcggcccaaaccatacgaccctccaggtgagaaaatggtagccgcgaaagtcaagggggagaaactggataagaaactaaagaagatggagcagaataaaaccgccgccacccgataccgacagaagaagagggctgagcaggaggctttgacaggcgaatgtaaggagctggagaaaaagaacgaagctctgaaagagcgggccgatagcttagccaaggagattcagtacctcaaggacctgatcgaagaggtgcgaaaagctcggggaaaaaaaagagtgccgtag

SEQ ID NO: 177755 - DNA, 1056 bp, synthetic construct
  misc_feature 1..1056: note = Description of Artificial Sequence: Synthetic coding sequence
  source 1..1056: mol_type = other DNA
atgaccgagatgagcttcctgagcagcgaggtgctggtgggcgacctgatgagtcctttcgatcagagcggcctcggtgccgaggaaagcctcgggcttttagatgattacttagaagtagccaagcacttcaagccccacggatttagcagtgataaggccaaggccggaagctcggaatggctggccgtcgatggtttggtgtccccatctaataactccaaggaggacgctttttccggaaccgactggatgctggagaaaatggacctaaaggagttcgatctggacgcgcttctcgggattgatgacctcgaaactatgccggatgacttactgacaactctcgatgatacctgcgacctttttgccccgcttgtgcaggaaaccaacaaacagccacctcagactgtgaatcccatcggacacttgccagagtctctcactaagccggatcaggtggctccattcacattcttacaaccacttcctctttccccaggagttttgtcttcaactcctgaccatagcttttcactggagctcgggtctgaggtggatatcaccgaaggcgaccgtaagcctgattacactgcatatgtggccatgatcccccagtgcatcaaagaggaagatacacctagcgataatgactctgggatatgcatgagtcccgagtcttacctgggcagcccccagcacagccctagtacgcgaggcagccctaacaggtccctaccaagtccaggtgtgctttgcggttccgcgcggcccaagccttatgatcctcccggcgagaaaatggtcgcagctaaggttaagggggagaaactggataaaaagctgaagaagatggagcagaacaagacggcagcgacacgttatagacagaagaagcgagcagaacaggaggcactgaccggcgagtgcaaagagctggagaagaagaatgaagctttgaaagagagagccgacagtctcgcaaaggagatacagtatttgaaggatttaattgaggaggttagaaaggcccgcgggaagaagagggtcccttag

SEQ ID NO: 177756 - DNA, 849 bp, synthetic construct
  misc_feature 1..849: note = Description of Artificial Sequence: Synthetic coding sequence
  source 1..849: mol_type = other DNA
atgagcctgctggccaccctgggcctggagctggaccgggccctgctccccgcttccggcctggggtggctcgttgactatggcaaactgccaccagcgccagcccctttagctccatacgaagtgttaggtggcgcgctggagggcggcctcccagtcggcggggagcccctggctggtgacgggttttcggattggatgactgagcgggtagactttactgcacttttacccctggagccacctttacctcccgggacgcttccccagccctcccctactccacccgaccttgaagcaatggctagcctgctgaaaaaggaacttgagcagatggaagactttttcctcgacgctcccccccttccgccaccaagtccacccccacttcccccgcctccgctgccgccagccccctccctgccactttccctcccctccttcgacctgccgcaacccccggtacttgataccctcgaccttttggctatttactgtcggaatgaggccggacaggaagaagtgggtatgccccctctgccgcccccccagcagccacctcctccctctccccctcagccaagtcggctagccccttaccctcaccccgctactacccgcggagatcgcaagcaaaagaaacgcgatcagaataaatccgctgctcttcgttataggcagcggaaacgcgccgaaggtgaggcactggaaggagaatgtcagggtttggaggcaagaaatcgcgagctgaaggaacgggccgagtctgtcgagcgggaaattcagtatgttaaagacttactgattgaggtatacaaggcccggagtcaaagaactaggtcctgttag

SEQ ID NO: 177757 - DNA, 2013 bp, synthetic construct
  misc_feature 1..2013: note = Description of Artificial Sequence: Synthetic coding sequence
  source 1..2013: mol_type = other DNA
atgggcgagcccgccggcgtggccggcaccatggagagccccttctcccctgggctgtttcaccgtttggacgaagattgggattctgccttgttcgcggaattgggttatttcacagacactgacgaattacagctcgaggccgcaaacgagacatacgagaataactttgacaacctggacttcgaccttgacctaatgccatgggaatcggatatctgggatatcaacaaccagatctgcacggttaaggatattaaggccgagccccaacccctgagcccagctagctcgagttactctgtgtcatccccgcggagtgtggactcatatagcagtacccaacacgtgcctgaagagctggacctaagcagctcttcccaaatgtctcccctcagcctctatggagaaaatagcaacagtttgtcttctgctgagccccttaaggaggacaagcccgtgactggaccgcgtaataaaaccgagaacggtctgactcctaaaaaaaaaatccaggtgaactctaagcccagcattcaaccaaagccactgctgctgcccgccgcccccaaaacacaaacaaactcgagtgttccggcgaaaaccattattattcaaacagttcccaccctcatgcctctggccaagcaacagcccatcatcagcctgcaacccgctccaacaaaaggacagactgttttgctctcccaaccgactgtagtccaacttcaggccccaggcgtcctgccaagtgcccagcccgttctggccgtcgctggaggggtgacgcaactccccaatcacgtggttaacgtagtgcctgccccatcagccaacagtccagttaatggcaagctcagcgtgaccaagcctgtgctccaatctactatgagaaatgtgggcagcgatatcgccgtgctccgccgccagcaacgcatgattaagaacagagaaagtgcctgtcagagcaggaaaaagaagaaggaatatatgctggggttggaggccaggctcaaggctgcactctcagagaatgagcaactgaaaaaggaaaacggcaccttgaagcgccagctggacgaggtggtctccgaaaaccagcgactaaaggttccttcgccgaaaaggcgtgtggtctgcgtcatgatagtgttggcctttataatcctcaattacggtcccatgtccatgctggaacaagactctcgccggatgaacccatccgtctcccccgccaatcaacgacgtcacctgctaggcttctctgccaaggaggcacaggataccagcgatgggattatccagaagaactcctaccggtacgaccattccgtgtccaacgataaggccctgatggttctaaccgaggagcccctactctatatacccccacccccttgtcagcccttgatcaataccactgagtctctgcgcctgaaccatgagctgagaggctgggtccaccgccatgaggtggaacgaacaaagagtcggcggatgaccaacaaccagcagaagactaggattctgcagggtgctcttgaacaaggatccaacagccagctcatggcagtgcagtatacagagaccaccagttccatttccagaaacagtgggtctgagctgcaggtatattacgcatcaccaagatcttatcaagatttttttgaagctattaggcggagaggggacacattctatgttgtgagcttccgcagggaccacttactcctgccggctacgacgcacaataaaaccacaagacctaagatgagcatcgtgttacctgcgattaatatcaacgagaacgtgattaatggacaagactacgaagttatgatgcagatcgattgtcaggtgatggacaccagaatcctccacatcaaaagttcctccgtgccaccatatcttagggaccagcagcggaatcaaaccaacacctttttcggttctccccctgctgccacagaagccacacatgtagtttccacaattcccgagagcctacagtag

SEQ ID NO: 177758 - DNA, 2112 bp, synthetic construct
  misc_feature 1..2112: note = Description of Artificial Sequence: Synthetic coding sequence
  source 1..2112: mol_type = other DNA
atggccgagctgatgctgctgagcgagatcgccgaccccacccggttttttacggacaaccttctctcacccgaggactggggtctccaaaactccacgctgtactctgggctagacgaagtggctgaggaacagacacagctgtttagatgtccagaacaggatgtgccatttgacggcagcagcctcgacgtggggatggacgtgtccccctcggagccaccttgggagcttcttcccatctttccggatctccaggtaaaatccgagccctcttccccatgctcaagcagcagcttgagttctgaatctagccggctgagtacggagcccagttctgaagcactgggcgtcggagaggtgctccatgtcaagactgaaagcctggcccctccactctgcctattgggtgacgatcccacctcctccttcgagacagtccagattaacgttatcccgacctctgatgatagttcagacgtccagacgaaaatcgagcccgtatctccatgtagtagcgttaactcagaggcatctttgctctccgcagactccagttcacaagcttttattggagaagaggtactggaagtgaagactgaaagtctgtcacctagtgggtgtctgctgtgggacgtgccagcccccagcttaggtgcggtccagatctcaatgggaccctcattggacggctctagtggtaaggctttgcccaccaggaaacccccactccagccaaagcctgtcgtgttgaccactgtaccaatgccttctagagcagttccaccttccaccacggtgctgcttcagtcgcttgtgcagccgccaccggtgtctccggtggtgctgatccaaggggcgatacgggtccagcctgagggacccgctccctctctaccacgtccggagcgaaaatccattgtccctgcccctatgccgggaaattcttgtccacctgaagtggatgccaagctgctcaagaggcagcaacgtatgattaagaatcgggagtcagcttgtcaaagcaggcggaaaaagaaggagtatctgcagggtttggaagccaggcttcaggcagtacttgcagataatcagcagcttaggcgggagaatgcagcgttgaggcgccgcctggaggcactgctcgccgaaaattcggagttaaaactgggatcaggaaaccggaaagttgtttgcatcatggtctttctcctgtttatcgcgtttaactttggcccagtcagcatctctgaaccccccagcgcccccatttctccaagaatgaacaaaggcgagccccagccgaggagacacctccttggcttctccgagcaggaaccagtccagggagtggagcctctgcagggatcatcccaaggtccaaaggaaccacaaccttctccgactgatcagccctctttctccaatctcactgctttccctggcggagcaaaggaattgttgctgcgggatctggatcaactgtttctatcttccgattgtcgccacttcaatcgcactgagtccctgaggctggctgatgaacttagcggctgggtccagaggcatcaaagagggcggcgtaaaatccctcagagagctcaggaaagacaaaaaagccagcctcggaagaaaagcccccccgtgaaggcagttcctattcagcctcccgggcccccagagcgggactctgtggggcaactgcaattgtataggcatccagatcgttctcagcctgcattccttgatgctatcgatagaagagaggacacgttttatgtggtttccttccggcgagaccacctcctgctccctgccatcagccacaataagacttcaaggcccaaaatgagcctggtgatgcctgccatggctcctaatgagaccctgtcaggcaggggcgctccgggggattacgaggagatgatgcagatcgaatgcgaggtcatggacactagggtgattcatatcaagaccagcacagtgcctccctcattgaggaaacaaccctcgcctactccagggaatgccacaggaggccctctaccagtgagcgcagccagccaggcccatcaggcctcccaccagcccttgtatctgaatcacccgtag

SEQ ID NO: 177759 - DNA, 669 bp, synthetic construct
  misc_feature 1..669: note = Description of Artificial Sequence: Synthetic coding sequence
  source 1..669: mol_type = other DNA
atggccgagctgatgctgctgagcgagatcgccgaccccacccggttcttcactgataaccttctaagcccagaggactgggggctgcagaatagtacactgtactccggccttgacgaggtcgccgaggagcagacacagcttttccgctgccctgaacaggacgtcccctttgatggatcgtctctcgacgtgggaatggatgtgagccccacggaccaaccgtctttcagcaacctcaccgcctttcctggaggtgccaaagagcttttgctgagagatctggaccagctgttcctttcatctgactgcaggcactttaacagaaccgagagcctacgtctggcagatgaattgtctggctgggtgcagcgtcatcagagggggcggaggaaaatcccacagcgggcccaggagcggcaaaagtcccagcccagaaagaagtcccctcctgtgaaagccgtccctatccagccaccaggtccccctgaaagagatagcgttgggcagctgcagctgtacagacatccagatcgcagtcaacctgcattcctggacgcaatcgaccgaagggaagacaccttctacgtggtatcattccgccgtacgacttgttgttctcagccttccgctactacacggcctccggggccaaggtgtccttggtag

SEQ ID NO: 177760 - DNA, 2103 bp, synthetic construct
  misc_feature 1..2103: note = Description of Artificial Sequence: Synthetic coding sequence
  source 1..2103: mol_type = other DNA
atggccgagctgatgctgctgagcgagatcgccgaccccacccggtttttcacggataatctgctttcccctgaggactgggactccaccctctattccgggcttgacgaggtcgctgaagaacagacccagctgttccgttgccctgagcaggatgtccccttcgacgggtcatctctggacgtgggaatggacgtgagcccttcagagcctccatgggagctcctccctattttccctgacctccaggttaagagcgagcccagcagtccatgttcatcgtcttctctctctagcgagtcgtcccggctatcaacggagcccagcagtgaggcattaggcgtgggggaagtgcttcacgttaagacggagtccctcgcccctcctctgtgcctactcggggacgatcctacaagtagctttgaaactgtgcagattaatgtgattcccacctccgatgattcaagcgacgttcagactaagatcgaacctgtgagcccctgcagtagcgtgaactctgaagcctcattgcttagtgccgacagcagttcgcaagccttcattggagaagaagtccttgaagtcaagaccgagtctttgagtccgagcgggtgcctgttgtgggacgtcccagccccttcccttggagccgtgcagatttccatgggtcctagtctggacggatcctctggcaaggccctaccaaccaggaagcccccattgcagcccaagcccgtcgtgctcacaacagtgcccatgcccagtcgtgcagttccaccatctacaaccgtactgttacaaagtttggttcagcccccacccgtgtcacccgtagtcctgattcagggggcaatcagagtgcagcctgagggtccagcaccctcactgcccaggcctgagagaaaatctattgtaccagcacccatgcccggcaatagctgcccccccgaggtggacgcaaaactcctgaagcgccagcagcgcatgatcaaaaacagagaaagtgcttgtcaaagtcgccggaaaaaaaaggaatacctccaagggttggaggcaaggttacaggccgtcttggccgataaccagcagctgcgccgggagaacgcagccctgcggcgacggcttgaggctcttttagcggagaacagcgagctgaagctgggctctggcaatcgaaaagttgtctgtatcatggtgttcctcttatttatcgcctttaactttggcccagtgtccatttccgagccccccagtgctccaattagccctagaatgaataagggggagcctcaacctcgaaggcatttattaggttttagtgaacaagaaccagtccaaggtgttgagccactgcaggggtcaagtcagggccccaaagagccacagcctagtccgaccgaccagccttctttctccaacctgaccgcgtttccaggcggcgccaaggaactgctactgcgcgatttagatcagctctttctttcctctgattgcaggcattttaaccgcactgaaagtttgcggctggctgacgagttgtctgggtgggttcagaggcatcagagagggaggcggaaaataccacagagagcacaagagagacagaagtctcaacctaggaaaaagagcccacccgtcaaggcagtccctatacagcccccaggccctccagaacgcgattctgtggggcaactccagttataccgtcatcctgaccgcagtcagccagccttcctagacgcaatcgatcgcagagaggatactttctacgtggtgagttttaggagggatcacctcctcttgcctgccatctcgcacaacaaaacttcgagacctaaaatgtccctcgtgatgcctgccatggctcctaacgagactctgtcaggacgcggcgcccctggagactatgaggagatgatgcagattgagtgcgaggtgatggataccagagttatccatataaagacaagcaccgtgccgccaagtctcagaaagcagccttcaccaacacccgggaatgccacggggggacctctacccgtcagcgccgcctcccaggcgcatcaggccagtcaccagcccctttaccttaatcacccatag

SEQ ID NO: 177761 - DNA, 2112 bp, synthetic construct
  misc_feature 1..2112: note = Description of Artificial Sequence: Synthetic coding sequence
  source 1..2112: mol_type = other DNA
atggccgagctgatgctgctgagcgagatcgccgaccccacccggttcttcactgacaatttgttatcccctgaggattggggcctgcaaaacagtaccctgtacagcggtttggatgaggtggccgaggagcaaacgcagctgttcagatgtcctgagcaggatgtcccatttgatggtagttcattagacgtcggtatggacgtctccccttccgaacccccgtgggaactgttgcctatctttcctgacctgcaagtcaagagcgagccctcttccccatgctcgtccagtagcctgtccagtgagagttcgcggctttccacagagcccagctcagaggccctgggagtgggcgaggtattgcatgtgaaaactgagtctcttgccccccccttatgtctgttaggtgacgatcctaccagttccttcgagactgtgcagattaatgtgattcccacaagtgacgactcttcagacgttcagaccaaaatcgagccagtctcgccatgttccagcgtcaattccgaggcaagtctcctgagcgccgattcatcctcccaggcctttataggagaggaagttcttgaagtcaaaaccgagagcctgtcacccagcggctgcttgctttgggacgtacctgctcctagcctgggggccgttcagatttcaatgggcccgtccctcgatggctcatctggaaaggccctgccaaccaggaagccacctctgcaaccgaagcccgtagtgctcacgacggtccctatgcccagccgggccgtccccccttcgactaccgttttgttacagtcactcgtgcaaccccctccagtgagtcctgtggtgctaatccaaggtgctatcagagtacagccagaaggccccgcccctagccttccgagacctgaaaggaagagcatcgtgcctgccccaatgcctgggaactcttgcccaccagaagtagacgcaaaactgctcaagagacaacagcgcatgatcaagaaccgcgaatccgcttgtcagtcaagacggaagaagaaggagtacctgcagggactcgaggcgagacttcaggcggtcctagccgataaccagcagttgagaagagagaacgccgcactcaggcggcgcttggaggcactcctcgccgaaaactctgaactgaagctgggtagcggaaataggaaggtggtgtgcatcatggtcttcctcttatttatcgcattcaattttggaccagtcagtatttccgaacctccatccgcaccaatcagtccccggatgaacaaaggagagccccagcccaggagacacttgctgggcttcagtgagcaagagcccgtccaaggcgtggagcctctccagggcagtagtcaggggccaaaagaacctcagccctcacccacggatcagccatcctttagcaacctcacagcttttcctggcggggcaaaagagctgttgctgcgggatctggaccagctctttttaagctcagattgccgccactttaatcgcacggaatcgctgagactggcggacgagctgtccggatgggtgcagcggcaccagagaggccgccggaagattcctcaacgagctcaggagcggcaaaagtctcagccacgaaagaagtctcctcccgtgaaggccgttccaattcagcccccaggcccccccgagagagattccgtcggccagctacaactgtacagacaccccgaccgttcccagcctgcctttcttgatgctatagatcgcagagaggatacattttacgttgtgtcttttcgccgcgatcacctgctcttaccggccatcagccacaataagaccagccgccctaagatgagtctggtcatgcctgctatggcccctaacgagaccctctcagggaggggggcccccggtgattacgaggagatgatgcagatagaatgcgaggtcatggacacaagggtgatccacatcaaaacttcaaccgtgccaccttcactgagaaaacagccctcacctactcctggaaacgcaacaggcggccctcttccagtctccgccgcttcccaagcccatcaggcctctcatcagcccctatacctgaaccacccctag

SEQ ID NO: 177762 - DNA, 2103 bp, synthetic construct
  misc_feature 1..2103: note = Description of Artificial Sequence: Synthetic coding sequence
  source 1..2103: mol_type = other DNA
atggccgagctgatgctgctgagcgagatcgccgaccccacccggttttttacggataatctgttgagccccgaggactgggactcaacactctacagtggcctggatgaggttgccgaagaacagacccagcttttcagatgtccagaacaggatgtgcccttcgatggctcctccctggacgtgggcatggacgtgtccccctctgaacctccttgggaattgttacctattttccctgatctccaggtcaaatccgaaccctcctcaccatgttcgtcaagttccctatcatccgagagctcgcggctgagtaccgagccatcatcagaggctctgggagtaggggaggtccttcacgtcaaaactgagagcctggctccgcccctctgcctgctcggggacgaccctacatccagctttgaaacagtgcagatcaatgtaatccccacatctgacgatagcagcgatgtacagaccaagattgaaccagtttctccttgctcaagcgttaactctgaagcatccctgctgtcggccgactctagctctcaagctttcattggggaggaagtcctcgaggttaagactgagtcactgagccccagcggatgtctcttgtgggacgtcccagcccccagccttggcgctgtgcagatttccatgggaccctcattggacggctccagcggaaaggctcttcccactcggaaacctcccctccagccaaagcccgtggtgcttacgaccgtcccgatgccatccagggccgtccccccctctaccacggtgctactgcaatccctggttcagcctccgcccgtcagtcccgtcgtactgattcagggcgccattagagtccagcccgagggccctgcccccagcctgccaagacccgagcgtaagtcgatcgtccctgcccccatgcccggcaacagctgtccccctgaagtggacgcaaaattgctgaaacgccaacagcgtatgattaagaatcgggagtcggcttgccagtctaggcggaagaaaaaggaatatctgcaaggactcgaagccagattgcaagccgtcctggccgacaatcagcaactccggagagaaaatgctgccttgaggagacgtttggaggcactcttagcagagaactcagagcttaagctcggctccggcaatcggaaggtggtgtgcataatggtgttcctgttattcatcgcttttaacttcggcccagtaagtatttctgaacctccttctgcgcccatttctcctcggatgaataagggcgagcctcaaccccgccgccatctgctcggtttttccgagcaagagccggtacagggagttgagcccctgcagggctcaagccagggaccgaaggagccgcagccgtccccaactgaccagcccagtttctcaaacctgaccgcctttccaggtggcgctaaagaactgctgctgagagacttggaccagctctttctgtctagcgattgccgacattttaaccgcaccgaaagccttcgcctagcagacgaattatcagggtgggtccagcggcaccaacggggccggagaaagatccctcagagagcacaggagcgacagaagtcccagccaagaaaaaaatcccccccggtgaaagccgtcccgatccagccgcccggaccaccggaacgcgattccgtgggtcaactgcagctataccgccatcctgaccgctctcaacccgctttccttgatgctatcgacaggagagaggataccttttacgtcgtctcttttcgacgggaccatctactcctacctgcaataagtcacaacaaaacttccagaccaaagatgtccctggtcatgcccgcgatggccccaaacgagacgttgtcaggacgtggcgcccctggcgattacgaggagatgatgcagatcgaatgcgaggtcatggacacacgcgttatccatatcaaaacatccacggttccccctagcctacggaagcagccatccccaaccccaggcaacgctaccggggggcctctcccggtctcggcggcctctcaggctcatcaggcttcccatcagccactatatctgaatcacccctag

SEQ ID NO: 177763 - DNA, 429 bp, synthetic construct
  misc_feature 1..429: note = Description of Artificial Sequence: Synthetic coding sequence
  source 1..429: mol_type = other DNA
tgacagcccagccccaccgaccagcccagcttcagcaacctgaccgcctttcctggaggggccaaagaacttctgttacgagacttggaccagctattcttatcctccgattgccggcacttcaatcggactgagagcctgcgtctggccgacgaactgtcaggatgggtgcagcggcatcagaggggacgaagaaagattccgcagcgggcccaggagcgccagtcgctggatacaagcccctcacgcagtctgtcacatgggcgcagccatctgcaactgagacagtctccgagcaatccgttggacccacagaaaggtatactatgggcctcttgcaactacatcgcaacccagaccgtcagaagtcagcactcatggatgcagttgacggacgggaaaacacattttatgctctccttgagctag

SEQ ID NO: 177764 - DNA, 429 bp, synthetic construct
  misc_feature 1..429: note = Description of Artificial Sequence: Synthetic coding sequence
  source 1..429: mol_type = other DNA
tgacagcccagccccaccgaccagcccagcttcagcaacctgaccgccttccctggtggggccaaggaattactcctgagggacctggatcagctgttccttagtagcgactgcagacatttcaatagaactgagtcccttcggttagcagacgagctttctggatgggtacagcgacatcagaggggacgaagaaagatccctcagcgggctcaggaacgccaaagcctggacacctccccaagccgctcccttagtcatgggcggtcccatctgcagctgagacaatcccctagcaatccactggacccacagaaaggcattctgtgggcctcctgtaattatatcgccacacagaccgtacgctcccagcatagctggatgcaactcaccgacggcaagacccacttcatgctatctttgagctag

SEQ ID NO: 177765 - DNA, 2112 bp, synthetic construct
  misc_feature 1..2112: note = Description of Artificial Sequence: Synthetic coding sequence
  source 1..2112: mol_type = other DNA
atggccgagctgatgctgctgagcgagatcgccgaccccacccggttctttactgataatctgttatcaccagaggactggggcctgcagaattccactctctactctggcttggatgaagtggccgaggaacagacgcagcttttccggtgcccagagcaagatgtacccttcgatggatcatcactggacgttgggatggatgtatccccatccgagccaccttgggagttgcttcccattttccccgacttacaggtgaagtccgagccgagctctccctgtagctcctctagtctgtctagcgagagctctcgtcttagtacagagccctccagcgaggccttaggagtaggggaagtgcttcacgtgaagacggagtcattggcacccccactatgcctgctgggcgatgaccctacgtcctcattcgagactgtccagatcaatgtgataccgacatccgacgatagtagcgacgtccagacaaaaattgaacccgtctcaccatgttccagcgtgaactccgaagcgtccctgttatctgccgatagctccagccaggcatttatcggagaggaggtcttggaggtcaaaacagagagcctgtccccatctggctgtctgctgtgggatgtgccggcccctagtctcggggccgtgcaaatctccatggggccaagcctggacggcagttcagggaaggcccttccaacacggaagccccctctccaacccaagcctgtggtactcactaccgtgccaatgccctcaagggccgtccccccttctactaccgtgcttctgcagtccttggtgcaacctccacctgtgtcgccggtcgtgctgattcagggcgctatccgagttcagcctgaagggcccgctccaagcctccccagacccgagcggaagtccatagtcccagcccctatgccaggcaactcttgcccccccgaggtcgatgctaagctcttgaagagacagcaacgcatgattaaaaaccgcgaatcagcttgtcaatcccggcgcaagaaaaaggagtaccttcaggggctggaggctcggttgcaggcagtgttagccgataatcagcagctgaggcgggagaacgccgctctgaggaggcggctcgaagccctcctcgctgagaattccgaactgaaactggggtccggaaatcgtaaggtggtgtgcattatggtgttcctgctgtttatcgccttcaactttggacccgtgagcatctccgaaccaccgagtgcgcctatctcacccaggatgaacaaaggtgaaccccagccacggcggcatctcctgggcttctcagaacaggaaccagtccagggtgtggagccccttcaagggtcctctcaaggaccaaaggaaccacaaccctcacctacagatcagccgagtttttctaacctgactgccttccccggaggtgcgaaagaactcctcctaagggacttagatcaactgttcctgtcaagtgattgcagacatttcaacagaacagaaagtcttcgacttgccgacgagctgagtgggtgggtccagcggcatcaacggggacgcagaaaaattccccagcgggcccaggagaggcagaagtcacagcccaggaagaagtccccaccagttaaagcagtaccgatccagcctccggggcccccagaaagagatagtgtggggcagctgcagctgtacagacatcctgaccgttcacagcctgcctttcttgacgctattgacagacgtgaagacaccttctacgtcgtttcttttcgcagagaccatctgctgctgcccgcaatatcacacaataagacatcaagaccaaagatgtcattagtcatgcctgctatggctcctaatgaaactctttccggacgaggagcccctggggactatgaagaaatgatgcaaattgagtgtgaagttatggatacccgtgtcatccacataaaaaccagcaccgtgcccccttctctgcgtaagcagccttcacccacccccggcaatgcaacaggcggtccgttacctgtctcagcagctagccaggcacaccaggccagccaccagcccctatacctgaaccatccctag

SEQ ID NO: 177766 - DNA, 2112 bp, synthetic construct
  misc_feature 1..2112: note = Description of Artificial Sequence: Synthetic coding sequence
  source 1..2112: mol_type = other DNA
atggccgagctgatgctgctgagcgagatcgccgaccccacccggttttttacagataaccttctgtcacccgaggattggggcttgcagaattccaccctttactccggcctcgacgaggtggcggaggaacagacgcagctgtttcgctgcccggaacaggatgtgcctttcgacggttcatctctcgacgtgggcatggatgtctcacccagcgagcccccctgggaactcttgccgatcttccccgacttacaagtgaagtccgaaccgtccagcccctgcagttcctcctccctttcctccgagtccagcagattaagcactgaaccatccagcgaggcactgggcgtgggagaggtgctccatgtgaaaaccgagagtctggcgcctccactttgcttgctcggggatgatccaaccagctcattcgaaacagtgcagattaacgtcattcccacatccgacgacagtagcgacgttcaaacaaaaatcgagcccgtcagtccctgttccagcgtgaactccgaagcgtcactgctgtcggcggactcttcatcccaggcatttatcggagaggaggtactcgaggtcaaaaccgaatccttatccccatcggggtgtcttctgtgggacgttcccgctccttccctgggtgcagtgcagataagtatggggccctctctggacggatctagcgggaaggccctccctacacgcaagccacccctccagccaaaacctgtcgtattaacgaccgtacctatgccctccagagctgtgcccccaagtaccactgtactgctacagtcactcgtgcagccacctcctgtgtctcctgtggttctgatacagggtgcaatcagagtacagccggaaggccctgccccatccttacctaggccggaaagaaagtcaattgtgcctgcccctatgcctggcaactcatgccctccggaagtagatgccaagctactgaagcgacagcagcggatgataaagaaccgggagtccgcatgccagagccgcaggaaaaaaaaggaatatctgcagggcctggaagcgcggcttcaggccgttctggccgataatcagcagctcagacgcgagaatgccgctctcaggcggcggctggaggctctgcttgcggagaattccgaacttaaattggggtctggaaatcgaaaggtggtatgcatcatggtctttctgctcttcatcgcattcaacttcggtccagtttcaatctcagagcctcccagcgctcctatctccccaaggatgaacaagggagagccccagccccggcgccacctgctggggttcagtgaacaggagccagtgcaaggggttgaaccattgcaggggagtagtcagggccccaaggaaccccagcccagcccaactgatcagccctccttttcaaatctcaccgctttcccgggtggggccaaagaattattgctgagggacctagatcagttattcctctcctccgactgtcggcatttcaatcgcactgagtcactgaggctggcagatgagctgagcggatgggtccaacgtcaccagaggggccgacgcaagattcctcaacgggcacaagaacggcaaaaatctcagcctagaaagaaatctccccccgtgaaggctgtgccaatccagccccccggacctccagaaagggacagtgtgggccagctgcagttgtatcgccatcctgatagaagtcagcccgcctttttggatgcgattgaccgccgggaagacacattttacgtagtctcatttcggagggaccaccttctgctgccagcaatctcacataacaagacaagtcggcccaagatgtctctggtaatgcctgcgatggcccctaacgagacactgtccgggagaggggcacccggagactatgaagagatgatgcaaatcgagtgtgaggtgatggacacccgcgttattcatataaaaacaagcacagtcccaccctccctgcggaagcagccatccccgaccccaggtaatgctacaggtggtcctctacctgtgagtgctgcaagccaggctcaccaggcaagccaccagcctttgtatctcaatcatccgtag

SEQ ID NO: 177767 - DNA, 2103 bp, synthetic construct
  misc_feature 1..2103: note = Description of Artificial Sequence: Synthetic coding sequence
  source 1..2103: mol_type = other DNA
atggccgagctgatgctgctgagcgagatcgccgaccccacccggttcttcaccgacaacctcttatctcccgaagactgggactccactctctattcaggacttgatgaagttgcggaggaacagacccaattgttcaggtgtcctgaacaggacgtcccgttcgacggaagttctctagacgtgggaatggatgtttctcctagtgagccgccctgggagctgctgcctatttttccagatcttcaagtgaaatctgaaccatcatctccttgctcctcctcttccttgtcatctgagtcctccaggctgtctacggaaccttcaagcgaggctttgggcgtgggcgaggttcttcatgttaaaactgaatccctggctcctcccctgtgtctcctgggcgacgaccctactagtagctttgaaaccgtgcaaataaacgttattccgacctctgatgatagttccgatgtgcagactaagattgagcccgttagcccctgttcctctgttaacagcgaagcctcactgctgtcagctgacagctctagtcaagccttcatcggtgaggaggtccttgaagtgaaaaccgaaagcctcagcccatccgggtgcctgttatgggacgtgcccgctccctcactaggagccgtccagatcagcatgggccccagcctcgatggtagcagcggaaaagccttgcctacccgcaagcccccgcttcaaccgaagccagttgtgctgaccacagtaccaatgccttcacgcgcagtgcctccgtccacaacagtgctgcttcagagcctggttcaacccccacccgtgtctccggtggttttgattcaaggggcgatcagggtgcagccagaagggcccgccccctcactcccgagacctgagcggaagtcaatcgttcctgctcccatgcctgggaacagctgcccgccggaagtggacgccaagctactcaagaggcaacagaggatgattaagaatcgcgagtcagcctgccaaagtaggcgaaaaaagaaggagtatcttcagggcctggaggcccgcctgcaggccgtgctggcagataaccagcagcttcgcagagagaacgccgcgttgcgtagacggctggaagcgctgctcgcagagaacagtgaattaaaactgggcagcggaaatcggaaagtggtgtgcataatggtgttcctcttgtttatcgccttcaacttcggccccgtgagcataagtgagccccccagtgcgcctatctcaccaaggatgaataaaggcgagcctcagccacggagacacctcttgggattctccgagcaggagcccgtgcagggagtggaacctctccagggttcctcacaaggccctaaggagcctcagcctagtcctaccgaccaaccttctttctccaacctcaccgccttccccggcggtgccaaagagctgctgctgagggatctcgatcagctttttctctcatccgattgcaggcacttcaatcggaccgagtctctcagattggccgacgaactttccggctgggttcagcggcatcagagaggacgcagaaagataccccaaagagcccaggagcggcagaaatcccagccacgcaaaaaatctccccctgtgaaggcagtcccaattcagccccctggacctcctgaaagggattctgtaggccagttgcagctgtatcgccatcctgatcgcagtcagccagcgttcctggatgctattgaccgacgggaagacacattctatgtggtttcctttcgcagggaccacctcctattgcccgccattagccataataagacaagtcgtcctaaaatgtcattggttatgcctgcaatggcccctaacgagacactcagtgggagaggggcgccaggggactatgaggagatgatgcagatcgaatgcgaagtgatggatacaagggtcatccacattaaaacctccacagtgcccccaagcctgaggaagcaaccgagtcccactcccggcaacgccaccggtgggccattgcccgtctcagctgcatctcaagcgcaccaggccagtcatcagccactgtaccttaaccatccttag

SEQ ID NO: 177768 - DNA, 429 bp, synthetic construct
  misc_feature 1..429: note = Description of Artificial Sequence: Synthetic coding sequence
  source 1..429: mol_type = other DNA
tgacagcccagccccaccgaccagcccagcttcagcaacctgaccgcttttcccggaggggctaaagaactcctgctcagggacctggaccagttgttcctgagctcagattgcaggcacttcaaccgcacggagtcactccgactggcggatgagttgtccggttgggtgcagcggcaccagaggggaaggagaaagattccgcagcgagcacaagagcgtcagtcacttgacacatcgcccagcagaagtctgagtcacgggcgtagtcacctacagctgagacaaagtccctctaatcctctcgacccacagaaaggaatcctctgggcatcttgcaactacatcgcaacccaaactgtcaggtcccagcacagttggatgcaactgactgacgggaagacacacttcatgctgagtttatcttag

SEQ ID NO: 177769 - DNA, 2103 bp, synthetic construct
  misc_feature 1..2103: note = Description of Artificial Sequence: Synthetic coding sequence
  source 1..2103: mol_type = other DNA
atggccgagctgatgctgctgagcgagatcgccgaccccacccggttttttaccgacaaccttttgtccccggaagattgggactctacactttactcaggcctggatgaggtcgccgaagagcaaacacagcttttcaggtgtcccgaacaggatgtgccattcgacggtagttctcttgacgtcggcatggatgtctctccctctgaacccccgtgggaactcctgcctatttttcccgatttgcaagtcaaatccgagccctcctctccgtgttcctcaagctctctgagttcagagtccagtcgcctctccactgagccttccagtgaggctctaggcgtaggagaagtgttacacgtgaaaacagagtctctggctccacccttgtgcctgctgggcgacgacccaacctcttcattcgagacggtccaaattaatgtgattcctacttccgacgattcatcggacgtgcagacaaagatcgagcctgtaagtccatgctctagtgtcaatagcgaggcatcacttctgtctgcagactccagcagtcaggctttcatcggggaggaggttctggaagtcaagacagagtccctctccccttccggctgcctgctgtgggacgtgccagcccctagcctgggcgccgtccaaatctcaatggggccctccttggatggttcttccggaaaggcactgcccaccaggaaaccaccattacaacccaaaccggttgtgttgacaaccgtccctatgccctccagagcagtcccaccctctaccaccgtccttctccagtctcttgtgcagcctccgccagtttctcccgtcgttcttatccagggtgccatccgagtccagcctgaggggcccgcgcctagcctcccacggcccgagcgaaagtctatcgttcccgctccaatgcctggaaactcatgcccacccgaggtcgacgcaaagctccttaagcgacagcagcgcatgatcaagaaccgcgaatctgcttgccagagccgccggaaaaagaaggaatatctccaggggctggaggcccggctccaggcagtgctggccgacaatcaacagttaaggcgcgaaaacgccgcgctgcggcggcggctggaggccctactcgctgaaaatagcgaattgaagctcgggtctggtaaccgcaaggtcgtctgcatcatggtgttcctcctctttatcgcctttaatttcggcccggtgtccatttcagagccccctagtgcccctatcagtccacgcatgaataagggggagccccaaccaagacgccaccttctcggtttctctgagcaagagcccgtacagggagttgagccactgcaggggtcttctcaagggccgaaggagccacagccttcacccacggatcagccttcattttcaaacctgacggcctttcccggcggggcaaaagaactgttgttacgcgatctggatcaattgttcctctcctctgattgtcggcacttcaatcgcactgaaagccttaggctcgccgatgagctgagcggctgggtgcaacggcaccaacgtgggcgcaggaagatcccccagcgcgcccaggaacgccagaagtcacagcctagaaagaaaagtcctcccgttaaagccgtccccattcagccaccaggtcctccagagcgggactctgtcggacagctccagctctacagacatccagatcggtcccagcccgcctttctggacgccatagatagaagagaggatacgttttacgtagtctcgtttcgccgcgatcacctgctcttgccagccatatcgcataacaagacttcccggccaaaaatgtctctggtgatgccagcaatggcgccgaatgaaaccctatcggggcgcggggcaccgggggactacgaagaaatgatgcagattgaatgcgaagtgatggacaccagggtgatccacatcaaaactagcacagttcccccctccctccggaaacaaccttcgccaacccctgggaacgcaacgggtggccctctgcctgtgtctgcagccagccaggctcaccaggcctcccatcagccactttatttgaaccatccttag

SEQ ID NO: 177770 - DNA, 429 bp, synthetic construct
  misc_feature 1..429: note = Description of Artificial Sequence: Synthetic coding sequence
  source 1..429: mol_type = other DNA
tgacagcccagccccaccgaccagcccagcttcagcaacctgaccgcattccctgggggagcaaaggagctgttactgcgggacttagatcaattgtttcttagcagtgactgtaggcacttcaaccgcaccgagagtctgcgactggccgacgaactaagcggatgggtccaacgacatcagagaggacggcgcaaaatcccccaacgagctcaggaacgccagagcctcgatacatcaccctccagatcacttagccacgggcgaagccaccttcagctccgccagtctcctagtaatcccttggacccccagaaaggcatcctgtgggccagttgcaattacattgcaacccagaccgtgagatcccagcacagttggatgcagctaactgacggcaaaactcactttatgttatcgctctcatag

SEQ ID NO: 177771 - DNA, 669 bp, synthetic construct
  misc_feature 1..669: note = Description of Artificial Sequence: Synthetic coding sequence
  source 1..669: mol_type = other DNA
atggccgagctgatgctgctgagcgagatcgccgaccccacccggtttttcacagacaatctcctctctcctgaggactggggcctgcagaattcaaccctgtatagcggcctcgatgaggtggcagaggaacaaactcagctttttagatgtcccgaacaggacgtgccctttgatggttcttcgctggatgtaggaatggatgtttccccgaccgaccaaccgtctttctctaacttgacggccttccccggtggcgcaaaggagctcctgctgcgcgacctagatcagctttttttgagcagtgattgtagacacttcaaccggactgaaagcctgaggctcgcagacgaactgtcggggtgggttcagcgccatcagcgtggtaggcgtaaaatcccccagcgggcgcaggaacggcagaaatcgcagccaaggaagaagtccccgcctgtgaaggcagtcccaatacagcccccaggacccccggagcgggactccgtcgggcagcttcaactataccggcatcctgatagaagccagcccgcatttctggacgccattgacaggcgagaagatacattctatgtcgtctcattcaggagaacaacatgctgcagccaaccgagcgctacaactaggccccctggtccccgctgcccttggtag

SEQ ID NO: 177772 - DNA, 669 bp, synthetic construct
  misc_feature 1..669: note = Description of Artificial Sequence: Synthetic coding sequence
  source 1..669: mol_type = other DNA
atggccgagctgatgctgctgagcgagatcgccgaccccacccggttttttaccgacaacctccttagccctgaagattggggcctgcagaactccactctgtacagtggcttagatgaagtggcggaagagcaaacacagctattcaggtgccccgaacaggacgtgccattcgacggtagtagtctcgacgtgggaatggatgtatcccccacagaccagccaagtttttcgaatttaaccgccttcccggggggcgccaaggaattgctactccgcgatttggatcagctctttttgtccagcgattgtaggcactttaatcgaacagagagtctgagactggctgacgagctcagcgggtgggtccagcgtcatcaacgtggccgacgcaagatccctcagagagctcaagagcgccagaaatcccaaccgagaaagaaatcccctccagtgaaagcagtacctattcagccaccaggccccccggagagggattctgtcggtcagctccagctttaccgccacccagatcgatcacagcctgcctttcttgatgcaattgaccgaagggaggatactttctatgtggtgtccttcagaagaaccacctgctgctcgcagccctctgcaactactcgacccccgggacctcgatgtccttggtag

SEQ ID NO: 177773 - DNA, 669 bp, synthetic construct
  misc_feature 1..669: note = Description of Artificial Sequence: Synthetic coding sequence
  source 1..669: mol_type = other DNA
atggccgagctgatgctgctgagcgagatcgccgaccccacccggttctttacagacaatctcctgagcccggaggattgggggctccagaacagtactctgtatagcggcttagacgaggtcgcagaggaacagacccaattattccggtgtccggagcaggacgtccccttcgacggctcaagtctcgacgtcggcatggatgtgagccctaccgaccagccaagcttttctaatcttactgctttccctgggggcgccaaggaactccttttacgagatctcgaccaactgtttctctcatctgattgtagacattttaatagaactgaatcattaagactggccgatgagctgtctggctgggtgcagcgccatcagagagggagaagaaaaatccctcaacgggcacaggagagacagaaatcccaacctcggaagaagtcccctcccgtcaaagcagtgccgattcaacccccagggcctccagagcgcgactctgttggccagctacaactttataggcacccggacagatcacagcccgctttcttggatgccatcgacaggcgggaagatacgttttatgtcgtcagctttaggagaacaacgtgctgtagtcagccttcggccactacccgccctccggggcctaggtgtccatggtag

SEQ ID NO: 177774 - DNA, 924 bp, synthetic construct
  misc_feature 1..924: note = Description of Artificial Sequence: Synthetic coding sequence
  source 1..924: mol_type = other DNA
atgggcgacgaccggcccttcgtgtgcaacgcccccggctgcggccaacgcttcaccaatgaggaccacttagccgttcataagcacaagcacgagatgacgttgaagttcggccccgctcggacagactccgtaattatcgccgaccagacaccgactcccacaagattcctgaagaactgcgaggaagtggggctctttaatgagctggcctcttcattcgaacatgagttcaaaaaagctgccgacgaggacgagaaaaaggccgccgcaggcccgctggacatgagcctgccttccacacccgatattaaaatcaaggaggaagagccagtcgaggtcgacagctcgccgcccgacagtcccgcctctagcccttgttctccgcccctgaaagaaaagtcaccagcccagcccacccctagcactgggggacggcggcggcgcacggttgacgaggacccagacgagcggcggcaaagatttcttgagcggaatcgcgcagcagcttcccggtgtaggcagaagcggaagctttgggtgtccagcttggagaagaaggccgaagagcttaccagccagaatattcagctcagtaacgaggtgaccttgctgcggaacgaggtcgcccagctcaagcagttgcttttggcacacaaagactgtccagtcacagccctgcagaaaaaaacgcagggatacctggaaagcccaaaggaatccagcgaaccaactgggtcgcctgcccctgtgatccagcactctagcgcaacggcaccgtccaatgggttgtcagtccggagtgctgcagaggccgttgccacctctgttcttacacagatggcttcgcagagaaccgaactgtccatgccaatccagtcccacgtaatcatgacaccacagagccagtccgctggaagatag

SEQ ID NO: 177775 - DNA, 1485 bp, synthetic construct
  misc_feature 1..1485: note = Description of Artificial Sequence: Synthetic coding sequence
  source 1..1485: mol_type = other DNA
atgggcgacgaccggcccttcgtgtgcaacgcccccggctgcggccagaggtttaccaacgaggatcacttagcagtccataaacacaagcatgaaatgactttaaaattcgggccagcccggacagattctgtaatcatcgccgatcagacacccacgcctacaagattcttgaagaactgcgaagaggtgggtttgttcaacgagttagcctcatccttcgaacatgaattcaagaaagcggccgacgaggatgaaaagaaggctcggtcaaggaccgtagctaaaaagctcgtggccgctgcaggcccactcgacatgagcctgcccagcacgcccgatattaaaattaaagaagaggagccggtcgaggttgactccagccccccggatagcccagcgagtagcccatgctcacccccactgaaggagaaagaggtgaccccaaagcccgtcctgattagcacccctacgcctaccatcgtccgccctggatccctgccattacatctgggatatgacccgcttcatcccacgcttccatctccaaccagcgttatcacacaggcaccaccttccaaccgccagatgggcagccccacaggaagtctgccgctggtgatgcatctggctaacggccagacaatgccagtgctcccggggccccccgttcaaatgccgtctgtcatctcccttgcaagacccgtgagcatggtgcccaatattcccggcatccccggacccccagtgaacagttccggatccataagcccaagcggtcaccctatccctagcgaggcaaagatgaggctgaaggctacccttactcaccaggtaagctcaattaatggaggatgcggtatggtggtggggaccgcatctactatggtgactgcgcgacctgagcaaagtcaaatcctaattcagcaccccgacgcccctagcccggcccagccccaagtctctcccgctcagccaacaccaagcacgggcggccggagaaggaggactgttgatgaagaccctgacgagcgacggcagagattccttgagcggaaccgcgctgctgcttctcggtgcaggcaaaagcgcaaactctgggtgtcatcactggaaaaaaaagctgaggagttaacctcccaaaacattcagctctcaaacgaggtgacgttactcaggaatgaggtagcccagcttaaacagctcctgcttgcccacaaggactgtcccgttactgctctgcaaaagaagacacaggggtacttggagtccccaaaagaatcaagcgagccaactggctctcctgcccctgtgattcagcactcctcagcaaccgctcctagtaacggactgagtgtgagaagcgcggccgaagcggtcgccacgtcagttctgacccagatggcctcccaaaggactgagctgtcaatgccaattcagagccatgtgatcatgactcctcaatcacagtcggctggcaggtag

SEQ ID NO: 177776 - DNA, 1389 bp, synthetic construct
  misc_feature 1..1389: note = Description of Artificial Sequence: Synthetic coding sequence
  source 1..1389: mol_type = other DNA
atgggcgacgaccggcccttcgtgtgcaacgcccccggctgcggccagaggtttactaatgaggaccacctggcagtgcacaaacacaagcatgaaatgacactgaagtttggaccagctagaacggatagcgttataattgccgaccagacacccacacctacacgcttcctcaagaattgtgaggaggtcgggctattcaatgagctcgcttcttctttcgaacacgagtttaaaaaagcagctgacgaggacgaaaaaaaagcggctgcaggccccctggatatgtctctgccatcaacacctgacattaagattaaggaagaggagcccgtcgaggaggtgactccgaaaccagtccttatctctactcccacaccaaccatcgttcgcccaggcagcctgcccctgcatctaggttatgacccgttacacccaaccttgcctagccctacctcagttataacgcaggccccgccgagtaaccgtcagatgggatctcccactggctccctcccactggtgatgcatctggccaatggacagaccatgcccgtgctgccagggccacccgtgcaaatgccatctgtaatcagcttggctagacccgtctccatggtccccaatattcctggcatccctggccctccggtgaatagctccggctcaatatcccccagcggtcaccctattccctccgaggctaagatgcgactgaaagctactttgactcatcaagtcagctctataaacggggggtgtggtatggtggtggggacagcctcaaccatggtcactgctcgaccagaacagtcccagatcctgatccagcaccctgatgcaccgtcccccgcccagccacaggtgtcgccagcccaaccaaccccctccaccggtggcaggaggcgccgcaccgtcgatgaggaccctgacgaaagaaggcagcgttttctggagaggaatagggccgctgcgtcccgatgtagacagaagcgtaaattgtgggtttcatccctcgaaaaaaaggccgaagagctcacaagccagaatattcagctctctaatgaagtcacgctgcttcggaatgaggtggcccagttgaagcagttgttgctggcccataaagactgccctgtcacggcccttcaaaaaaagacacagggctaccttgaaagcccaaaagagagttccgagccaactgggagccctgctccagttatccagcacagctcagccaccgccccgagcaacggactgtccgtgcgatccgcggctgaagctgtggctacgagcgtgctgacccagatggcttctcaacgtactgagctctccatgcccatccagtcgcatgtgatcatgaccccgcaaagccagagcgcgggacggtag

SEQ ID NO: 177777 - DNA, 1452 bp, synthetic construct
  misc_feature 1..1452: note = Description of Artificial Sequence: Synthetic coding sequence
  source 1..1452: mol_type = other DNA
atgggcgacgaccggcccttcgtgtgcaacgcccccggctgcggccagcggtttactaacgaagaccacctcgcggtacacaagcataagcacgagatgacacttaaattcggaccagcgcgcacagacagtgtgattattgctgaccagacaccgactcccaccagattcttgaaaaattgtgaagaagtgggcctgttcaatgagctagcctcctctttcgaacatgagttcaaaaaggccgccgatgaagacgagaaaaaagctgcagccggccctctcgatatgtccttaccctctactcccgatattaaaatcaaggaggaggagcctgtggaggtagacagtagccctccagacagtcccgccagcagcccatgctctccccctttgaaagaaaaagaggtgaccccaaagccagttttaatcagcacccctacacccacgattgtgcgacccggctccttgcccctgcatctgggttatgaccctctgcatcccacactgcccagccccacgagcgtaatcactcaagcaccaccctctaatcgccagatgggctcacctaccggatccctccccctggtcatgcacctggccaatggccagactatgccagtccttcccggtcccccagtacaaatgccgtcagtgatatcccttgcgcgccccgtaagcatggtgccgaacatcccaggaatccctggaccccctgtaaattcatcaggatctatcagcccaagcgggcatccaatcccctcagaggcaaaaatgcgacttaaggccacactcacacatcaggtgtcttcgatcaacggcgggtgtggaatggtggtggggaccgcaagcactatggtcaccgctagacctgagcagagccagatcttgatccagcaccctgacgctcccagtcccgcacagccacaagtgagtccggctcagccaactcctagcacagggggtcgaagaaggcgaacagtggatgaggacccagatgagcgtcggcagcgcttcctggagcggaacagagccgccgcatcaaggtgccgccagaaaagaaagctatgggtgtcaagccttgaaaagaaggccgaggagctcacaagccagaacatacaactgagtaacgaggtaacgctgctgcgcaacgaggtcgcacagttgaagcagttattgctggcgcataaagattgccctgttacagcccttcagaaaaagacccaaggttaccttgagtctcccaaagagtcgtctgaacccactgggtcccccgcaccggtgattcagcacagctcagctactgccccctccaacggcttgagcgtgcggagcgcagccgaagctgtggccacatcagttctcactcagatggctagccagcggaccgagctgtcaatgcccattcagagccacgtaattatgaccccccaatcccaaagcgctggcaggtag

SEQ ID NO: 177778 - DNA, 1452 bp, synthetic construct
  misc_feature 1..1452: note = Description of Artificial Sequence: Synthetic coding sequence
  source 1..1452: mol_type = other DNA
atgggcgacgaccggcccttcgtgtgcaacgcccccggctgcggccagcgatttaccaacgaagatcatctcgccgtccataagcataagcacgagatgacactcaaattcggtcccgcgcgtacagactctgtcattatcgccgaccagactcctacccctacccgcttcttgaagaattgcgaggaggtggggctattcaatgagctcgcgagctcatttgagcacgagtttaagaaggctgcagacgaggacgagaagaaagccgcagccggccccctcgacatgtctctcccatcgacgcccgacatcaagattaaagaggaggaaccagtcgaggtggactccagtccacctgatagtccagcttctagcccctgttctcctcctctgaaagaaaaggaggtgactcccaagcctgtgctgatctcgacgcccacgccgacaattgttagaccaggctccctgcctctacatctcggatatgaccccctgcacccaacactgcctagccctacctcggtgatcacccaggctccacccagtaatcggcaaatgggatcacctacaggatccctgccacttgtcatgcatctggcaaacggtcagactatgccggtgctgccaggaccgcctgtgcagatgcccagtgtgataagcctcgctcgaccagtttctatggttcccaacatacccgggatccctggtcctcccgtgaactcctctggctccatatctcctagcggccacccgatccccagtgaagcgaaaatgaggttaaaagccaccctcactcaccaggtcagcagtatcaacggaggctgtggcatggtagtaggcaccgccagtaccatggtgacagctagaccagaacagtcccagatcctgatacaacacccagacgccccatcccctgcccagccgcaagtatctccagcgcagccaaccccttccactggcggacggagaaggcgaactgtggacgaagatccagatgagaggaggcagagatttttggaacggaatagagccgccgcgtcaagatgtaggcagaagcgtaagctgtgggtcagtagcctggagaaaaaagccgaagaactgacgtcgcaaaacatccaattgtctaatgaggtgacactgctacgtaatgaagtggcacaattgaagcagctactgttagcgcacaaagactgccctgtcactgccctgcagaagaagacacagggctacttagaaagcccaaaagagtcatctgagcccaccgggagccctgcacccgtgattcagcatagcagcgcaaccgctcctagtaatggcctgtccgttcggtccgccgctgaggccgtggccacctcggtcctgactcaaatggccagccagagaaccgagctttccatgcctatccagtcccacgtgatcatgacaccgcaaagccagagtgccggccgatag

SEQ ID NO: 177779 - DNA, 1485 bp, synthetic construct
  misc_feature 1..1485: note = Description of Artificial Sequence: Synthetic coding sequence
  source 1..1485: mol_type = other DNA
atgggcgacgaccggcccttcgtgtgcaacgcccccggctgcggccaacggtttactaacgaggaccacctggctgtgcataaacataagcacgagatgacgctgaaattcggaccagctcgcactgacagcgtcataatcgcagatcagacgccaactccgactcgtttcctgaaaaactgcgaggaggtgggcctgtttaacgagctggcttctagctttgaacacgagtttaaaaaagccgccgacgaagacgagaagaaggccagatcccgaaccgtggccaagaagctcgtggccgccgccggcccactggacatgtccctgcccagtacacccgatatcaagatcaaggaggaggagcccgtggaggtggacagcagtcccccagactctcctgctagcagcccatgcagtccccctcttaaagagaaagaggtcacaccgaagccagtactcatttctacccccactcccaccatcgtgcggcctggcagcttgcccctgcaccttggctacgaccccctgcatcctacactcccaagtccaacttccgttatcacacaggcaccaccatcgaacagacagatgggctcaccaacagggagcctgcctctcgtcatgcatcttgctaatgggcagacaatgcctgtactgcccggaccaccagttcagatgcccagcgtaatttcgctggcccggccggtgtcaatggtacccaacatccctggaattcctggccctcctgtgaacagctctggatccatcagcccttcggggcaccccatcccctcagaagcgaaaatgcggctaaaggcaacactcactcatcaggtgtcttctattaatggaggctgtggcatggtggtcgggaccgcaagcacaatggtcacagcaaggcccgaacagagtcagattcttattcagcatccagacgccccgagtcccgctcagcctcaggtatccccagctcagcccaccccaagcactgggggccggcggaggcgcaccgtagatgaggaccccgatgaacgacgccagcgcttcctggagcggaatagggccgcagccagtcgctgccgtcagaagaggaagctctgggtgagttctctcgaaaagaaggctgaggagcttacttcccagaacatccaactgtcaaatgaagtaaccctgctccggaacgaagttgcacagttgaagcagttgctgttggcccataaagactgtcctgtgacggcactccagaaaaagacacagggctatctcgaaagtcccaaggagagttcagagcccacaggctccccagcgcctgtcatccaacactccagtgcaaccgctccaagcaacgggctgtctgttaggagcgccgcagaagccgtcgccacatctgtgttaacgcagatggcatctcaacgtaccgagctctcgatgcccatccagtcccacgtgattatgacgcctcaaagccagtctgccggacgctag

SEQ ID NO: 177780 - DNA, 354 bp, synthetic construct
  misc_feature 1..354: note = Description of Artificial Sequence: Synthetic coding sequence
  source 1..354: mol_type = other DNA
atgggcgacgaccggcccttcgtgtgcaacgcccccggctgcggccagaggtttacgaatgaggatcacctcgctgtgcacaagcataaacacgaaatgaccctcaagttcggcccggccaggactgatagtgtcatcatagccgatcaaacaccaactccgacacgcttcctgaagaactgtgaagaggtgggccttttcaatgagctggcatcctccttcgaacatgagtttaaaaaggccgccgacgaggacgaaaaaaaagctaggtcccggaccgtagccaaaaagctagtggtctttaggccgcgcctcttcctcttgtgtttcggaataatcttcctcatagggtag

SEQ ID NO: 177781 - DNA, 354 bp, synthetic construct
  misc_feature 1..354: note = Description of Artificial Sequence: Synthetic coding sequence
  source 1..354: mol_type = other DNA
atgggcgacgaccggcccttcgtgtgcaacgcccccggctgcggccaacgcttcactaatgaggaccacttagcagttcacaaacacaaacacgaaatgaccctcaagtttggcccggctaggacagacagcgtcatcatcgccgaccagacccctacccccactcgctttcttaaaaactgtgaagaggtggggttatttaatgagttggccagcagcttcgaacacgagtttaaaaaagctgcagatgaagatgagaagaaagcaagatctcggacagtagctaagaagctggtggtcttcagaccaagattgttcctcctgtgttttggaatcatattcctcattggatag

SEQ ID NO: 177782 - DNA, 3813 bp, synthetic construct
  misc_feature 1..3813: note = Description of Artificial Sequence: Synthetic coding sequence
  source 1..3813: mol_type = other DNA
atggacagcctggaggagccccagaagaaggtgttcaaggcccggaagacaatgcgcgtgagtgataggcagcagcttgaagcggtctacaaggtgaaggaggagcttctcaagacagatgtaaaactccttaatgggaatcacgaaaacggagacctggatcccacatcaccactggaaaacatggattatattaaagacaaggaagaagtgaatggtatcgaggaaatctgttttgatcccgagggcagcaaggctgagtggaaagagaccccatgtatcctctccgttaacgtaaagaacaaacaggatgacgacctgaactgcgaacccctgtctccccacaatatcacaccagaaccagtttctaaactgcctgcagagccagtttctggcgacccagctccaggcgacttggatgccggcgacccagctagcggcgttctggccagcggtgacagcacaagtggcgacccaacaagttctgaacccagctcttccgatgcagctagcggcgatgcaacttccggagacgctccaagcggagacgtgagtcctggcgacgccactagtggggacgcaacagcggacgatctttctagcggagaccccacttcctccgatccaatccccggggaaccagtgcccgtcgagcccatttctggagattgcgcagcagacgacattgcgtcatctgagattacctctgtggatcttgcatccggagctcctgcaagcacagatcctgccagcgatgacctagcctccggtgatctcagctctagtgagctggcatccgacgatctggcaaccggagagctggccagtgacgagctgacatcagaatccacttttgatagaacgtttgaacctaagtccgttcccgtttgtgaaccagtgcccgagatcgataacatcgagccctcctcgaataaagatgatgatttcctggagaagaatggtgcggacgaaaagctagaacagatccagtccaaagacagcctggatgagaagaacaaggctgataacaatattgatgcaaacgaagaaacgttagagacggatgacaccactatctgttctgacagaccgccggaaaatgaaaagaaggtcgaggaggatatcatcaccgagctcgccctgggggaagacgctatctctagttctatggaaatagaccagggggaaaagaacgaagatgagacatctgccgatctggtggaaaccattaatgaaaacgtgattgaagataataagtccgaaaacatcctggagaacacagattccatggaaaccgacgagatcattccgatcctggaaaaactcgctccttcagaagacgaattaacttgcttttcgaaaacctccctgcttcctatcgacgagactaacccagatttggaggaaaaaatggagtcttccttcgggtctccatctaaacaggagagctctgagtctctgccaaaagaggctttcctggtactatccgatgaagaagacatcagcggggaaaaagatgagagtgaagtgatctcacaaaatgagacctgcagtcctgctgaggttgagagtaatgaaaaagataataagcctgaggaggaagaacaggtcatccacgaggatgatgaaaggccctccgaaaagaatgaatttagccgtaggaaaaggtcaaaatctgaagacatggataacgttcagagcaagcggagacggtatatggaagaggaatacgaagctgaattccaggtgaaaatcacagccaagggtgatattaaccagaaactgcagaaggttatccagtggttgctggaggagaaactctgtgctctgcaatgtgcagtcttcgataaaacacttgctgagctgaagactcgggtcgagaagattgaatgtaataagcgccataaaacagtgctcaccgaacttcaagccaagatcgctcgcctgaccaagaggtttgaggcagctaaggaggacctgaagaagcgccacgagcacccaccaaacccccccgtatcccccggcaaaaccgtaaatgacgtgaacagcaataataacatgtcttacaggaacgccggcactgttagacagatgctggaatccaagcggaatgtctccgagtctgcccccccaagttttcagacccctgtaaacactgtgtctagtaccaacctggtcactccgccagcagtggttagttcccagcccaagctccagaccccagtcacatccggttctctgacagctacatcggtccttcctgccccgaatacagccactgtagtggctactacccaggtgccatctgggaatccccaacctacaatctctcttcaacccctccccgtgatccttcacgtgcccgtagccgtgtcgtcacagccacaattgctccagtcccatcccggtactcttgttaccaatcagccctccggcaacgtggagttcatctctgtgcaatctccccccactgtgagtggtctaacaaaaaaccctgtctctctgccgtccctaccaaatcccaccaaacctaataatgtcccatccgttccttcccctagcatccagagaaatccgaccgcaagcgctgctcctttgggtacaactctggctgtgcaggcagttcctaccgctcacagcattgtgcaggcaactcgtacatctttacctaccgtgggtccgagcggcttatactctccttcgacaaaccggggacctattcagatgaagattccaatctcagctttctcaacatcttcagcagcggagcaaaacagcaatactaccccccgaatcgagaatcaaactaataagacaatcgatgcatcagtcagcaagaaggcggccgattctaccagccagtgcggaaaagccactggttccgattcctcgggggtgatagaccttaccatggatgatgaagaaagcggcgcatcacaggatcccaagaagctgaatcacaccccagtgagcactatgagctcatctcagcccgtgagtagacctcttcagccaatccagcctgcaccacctctgcagcctagcggggtaccaaccagtggacctagtcagacaacgatccacctgctgcctaccgctcctacaacagtgaacgtgactcataggccggtgacgcaggtgaccacacgtctgcccgtgcctcgggctcccgcgaaccatcaagtggtgtacacaaccttgccggccccaccggcccaggcacctctccggggcaccgtgatgcaggctccagcagtgagacaagtgaatcctcagaatagcgtgactgttcgcgtcccccagaccaccacctatgtagtgaacaatggcctaaccctaggtagcacgggcccgcagctcacggtccatcatcggccaccccaggtacacaccgagccaccccggccagtacacccggcaccactgcccgaggcaccacaaccccagcgactgccgcctgaggccgcttccacatcccttccccagaaaccacacttaaaactggctcgggttcagagtcagaacgggatcgtcctgagttggtccgtgctggaggtggacaggagctgtgccactgtcgattcttatcatctctacgcctatcacgaggaaccgtctgccacggttccgtctcagtggaagaagatcggtgaggtgaaggccttacccctccctatggcatgcacgcttacacagttcgtgagtgggtccaagtactattttgccgtcagggccaaggatatttatgggcgtttcggccctttttgtgaccctcagagcaccgacgtcatcagcagtacccaatcctcttag

SEQ ID NO: 177783 - DNA, 1548 bp, synthetic construct
  misc_feature 1..1548: note = Description of Artificial Sequence: Synthetic coding sequence
  source 1..1548: mol_type = other DNA
atggacagcctggaggagccccagaagaaggtgttcaaggcccggaaaacaatgagagtgagcgacagacagcagctggaagccgtttacaaggttaaagaggagcttctcaagactgatgtgaagcttctgaatggaaaccatgagaacggcgacttagacccgactagtcctctggagaacatggattacattaaggacaaagaggaggtcaacgggatcgaagagatatgttttgatcccgagggctcaaaagccgagtggaaggagactccgtgtatccttagtgtcaatgttaagaacaaacaggacgacgacctgaactgtgaacccctctcgccccataacatcacacccgagcctgtgtccaagctgccggcggaaccagtgagtggggatccagcaccaggagatctcgatgccggagaccccgcctcaggcgtcctagcatccggtgactctactagtggagatcccacaagttctgaacccagctcttcagatgccgcgtcgggggatgctacaagtggagacgccccttctggtgacgtcagtcccggggacgccacatccggcgatgctacagctgatgatctaagttctggagacccgacctcatccgaccccattcccggcgagcccgtccctgtagagccaatcagtggtgactgcgccgccgatgacattgctagcagcgagatcacatcagtagatctagcttccggcgctccggcttcaacagatccagctagcgacgatttagcctccggtgacctttcctcctccgaactcgcctctgatgacctggcaacgggtgagctggcaagcgacgagctgacttccgaatcgaccttcgacaggacatttgagccgaagtccgtgccagtttgcgagcccgtgcccgaaatcgacaacatcgagccaagctctaataaagatgacgattttctcgagaagaacggcgccgacgagaagttggagcagatccagtccaaggacagccttgacgagaagaataaagccgacaacaacatcgacgccaacgaagaaacactggaaaccgacgacacaaccatctgtagcgaccgccctcctgagaacgagaaaaaggtggaggaggacatcattaccgagctcgctttgggagaggacgctatcagcagctccatggaaattgaccaaggggagaagaacgaggatgaaacatccgcggacctggtcgaaactatcaacgagaatgttatagaggataacaagtccgagaacatcctcgaaaatactgacagtatggagacagacgagattattcccattcttgaaaaactggctccgagtgaagacgagctgacttgctttagcaagacatctctcctaccaatagacgaaaccaaccctgaccttgaggagaaaatggaatcatcatttggctctccaagtaaacaggaaagcagtgaatccctgccaaaggaggcgttcttggtgctgagcgacgaagaggacatttccggcgagaaagacgagtctgaagtgatatctcagaatgagtag

SEQ ID NO: 177784 - DNA, 378 bp, synthetic construct
  misc_feature 1..378: note = Description of Artificial Sequence: Synthetic coding sequence
  source 1..378: mol_type = other DNA
atggacagcctggaggagccccagaagaaggtgttcaaggcccggaagacaatgagggtctccgacagacagcagctcgaggcagtttacaaggtgaaagaggagttgctgaagactgatgtgaagctgctgaatggaaatcacgaaaatggggacctggaccccaccagcccattggaaaacatggattatatcaaagacaaagaagaggtcaacggaattgaagagatttgtttcgatcccgaagggtccaaagccgagtggaaggagactccctgtatattgagtgtgaatgttaaaaacaagcaagacgatgatctcaactgcgaacccctatccccacataacattactcccgagccggtgagtaaattgtag

SEQ ID NO: 177785 - DNA, 459 bp, synthetic construct
  misc_feature 1..459: note = Description of Artificial Sequence: Synthetic coding sequence
  source 1..459: mol_type = other DNA
atggacagcctggaggagccccagaagaaggtgttcaaggcccggaaaaccatgcgagtgagcgaccgtcaacagttagaagcagtttataaagtgaaagaggaactcttgaaaacagacgtgaagcttttgaatggaaatcacgagaatggcgatctggatcctacaagtccactggagaacatggattacattaaggacaaggaggaagttaacggcattgaggagatctgctttgaccccgaggggagtaaggctgagtggaaggaaaccccgtgcatcctcagcgtcaacgtgaaaaataaacaggatgatgacctgaactgcgagcctctctcgccccacaatattacccctgaacccgtgtcgaaactacccgccgaacccgtgtcaggggaccccgctcctggggacctggacgcgggcgacccggctagtggcgtgctagcatctggctag

SEQ ID NO: 177786 - DNA, 312 bp, synthetic construct
  misc_feature 1..312: note = Description of Artificial Sequence: Synthetic coding sequence
  source 1..312: mol_type = other DNA
atggacagcctggaggagccccagaagaaggtgttcaaggcccggaagacaatgagagttagcgacaggcagcagctggaggcagtgtataaagtcaaggaagaacttttaaagacagatgttaagctgctaaatgggaaccacgagaatggagatctagatccgacaagccccctggaaaacatggattatatcaaagacaaagaggaagtcaacgggattgaagagatttgctttgatcccgaaggcagtaaggcagaatggaaggagaccccatgcattctcagcgtcaatgtcaagaataagcagtag

SEQ ID NO: 177787 - DNA, 270 bp, synthetic construct
  misc_feature 1..270: note = Description of Artificial Sequence: Synthetic coding sequence
  source 1..270: mol_type = other DNA
atggacagcctggaggagccccagaagaaggtgttcaaggcccggaaaacgatgcgagtgtctgatcgacagcagctggaggctgtgtacaaggtcaaagaggaactgctgaaaactgacgtgaagctcctgaatggcaatcatgagaacggagatcttgatccgacgagtcctctagagaacatggactacataaaggataaagaggaggtcaacggcatcgaagagatctgcttcgatccagaaggatctaaagccgagtggaagtag

SEQ ID NO: 177788 - DNA, 534 bp, synthetic construct
  misc_feature 1..534: note = Description of Artificial Sequence: Synthetic coding sequence
  source 1..534: mol_type = other DNA
atggacagcctggaggagccccagaagaaggtgttcaaggcccggaagacgatgagggtctccgaccggcagcagctggaagccgtctataaggtgaaggaggagctcctgaaaacagatgtcaaactcctcaacggtaatcacgagaatggggatctcgatcccacctcccccctggaaaatatggactatatcaaagataaagaggaagttaatgggatcgaagaaatatgtttcgatcccgaggggtccaaggccgagtggaaggagaccccttgcatccttagtgtgaatgtaaagaacaaacaggacgacgatctgaactgtgagcccttgtccccgcacaacattacacccgaaccagtctctaaactgccagcagaacccgtgtctggggacccggctcctggcgatctggacgctggcgaccctgctagcggagtgctggcgagcggggactccaccagtggggatcccacctcctcagaaccatcttctagcgacgcagctagcggcgacgctacttccgggtag

SEQ ID NO: 177789 - DNA, 3813 bp, synthetic construct
  misc_feature 1..3813: note = Description of Artificial Sequence: Synthetic coding sequence
  source 1..3813: mol_type = other DNA
atggacagcctggaggagccccagaagaaggtgttcaaggcccggaagaccatgcgggtctccgacagacaacagcttgaagctgtgtacaaagttaaagaagagctcttgaaaacggacgtgaaattgttaaacgggaaccatgaaaacggggatcttgaccccacatcccccctcgagaatatggactatataaaagataaagaggaagtcaacgggattgaagaaatttgctttgatcctgagggaagcaaggccgagtggaaagaaacgccatgcattctgtctgtgaatgtaaaaaataagcaggatgacgatcttaactgtgaacccctgtctcctcacaatataacaccagagcctgtttccaagttgcctgctgaaccagtgtccggagaccccgccccaggggacctcgacgcaggcgaccccgctagcggagtgctggcatctggagactcgacctctggtgaccccacgagctcagaaccctcttcatccgatgccgcttcaggagacgctacctccggcgacgcccccagtggtgacgtgtcgcctggggatgctacttccggggacgccacagccgacgaccttagctcgggtgaccctacctcttccgatcctattccaggcgaacccgtccctgtagagcctatctcaggcgattgtgctgcagacgatattgccagttccgaaattacgagcgtcgatctggcctcaggcgcccccgccagcaccgaccccgccagtgacgatctagcatccggggacctcagctcaagcgaactggcaagcgatgacctagccacaggcgagctggcaagcgatgagctaactagcgagtctaccttcgataggaccttcgagcctaaatctgtgccagtgtgtgagccagtgccagaaatcgacaacattgaaccgagttccaacaaggatgacgatttcctggagaagaatggtgctgacgagaaactggaacagattcagtccaaggactctcttgacgagaaaaataaggctgacaacaacattgatgccaacgaggagacgttggagacagatgacacaacaatttgctctgaccggcctcctgaaaacgaaaagaaggtcgaggaggatatcatcacagaattggccctgggggaggatgcaatttcatcctcaatggagatagaccagggagaaaagaacgaagacgagacgagcgccgatctagtggagactattaacgagaacgttattgaagacaacaagagtgaaaacattctggaaaatacggatagcatggaaacagatgagatcatcccaattctcgaaaagctcgctccaagtgaggacgaactgacttgctttagtaaaacgagcctgcttccgattgatgaaacaaatccagatctagaagagaagatggagagctccttcgggtccccaagtaagcaggaatcctcagagagcctgccaaaagaggcttttctggtcctgagtgacgaggaagacatttcaggagagaaggatgaaagcgaggtcattagtcagaacgaaacatgtagtcctgcagaggtggagtcaaatgagaaagacaataagcccgaggaagaagagcaggtgattcacgaagacgatgaaagaccatcagaaaaaaatgaattctctagaagaaagaggtctaagagcgaagacatggacaacgtccaaagtaagcggagacgctatatggaagaggaatatgaggccgagttccaagtcaaaatcaccgcgaagggcgacatcaaccaaaagttgcaaaaggttatccagtggctgctcgaggagaagctttgtgctttgcagtgtgctgtgttcgataagacgctggcagagctcaaaacacgcgtggaaaaaattgagtgtaacaaacgtcacaaaaccgtacttacagagctgcaggcaaaaattgctaggctgacgaaaagatttgaagcggcaaaggaggaccttaagaaacggcatgaacaccctccgaatccgccagtgagccctggtaagacagtcaatgatgtgaattctaacaataacatgtcctatagaaatgccggcacagtccgccagatgctagaatcaaagagaaacgtttcggagtctgctcctccaagctttcagactcctgtcaatacggtttcctctacaaatctcgtaactcctccagccgtggtgtcttcccagcccaagctgcagacacccgttacttctggctctctaaccgcgacttcggtgctgcctgcgcccaacacagccactgtggtcgcgactactcaagtgccttcgggaaacccacagccaacgatctccctccagcccctccccgtcatccttcatgtcccagtggccgtgtcctcccagcctcaactgctgcagagccaccccgggaccctggtaactaaccagccctcagggaatgtagaattcatctcagtccagtccccgcctacagtttctggtcttactaaaaatccagtgagcctgccctctctgcccaatcctaccaaacccaacaacgtcccgagcgtaccaagtccgtctattcaacggaaccccactgcatccgccgcgccacttggtacaaccctcgccgtgcaggccgtccccaccgctcattctattgttcaggccacgagaacaagtctccccaccgtgggcccctcaggcctttactctccaagtacgaaccggggcccgatacagatgaagataccaatctcggcattctctacaagtagcgcggcggaacagaacagtaacacaacccctcggattgagaatcagacgaacaagacaattgacgcttccgtcagcaaaaaagctgcggactcgacatctcagtgtggcaaggcgactgggagtgacagcagcggcgtgattgacttaacaatggacgacgaggagagcggagcttcccaggatccaaagaaactgaaccataccccagtttcgactatgtcatcctcccagcctgtgtctaggcctctgcagcccatccagcctgccccgcccttgcagcctagcggcgtgcctaccagcggaccttctcaaaccactatccacctgctgcccacagccccaactactgtaaatgtcacccacaggcctgtgactcaagttacaacgcgcctgcctgtccccagggctccggctaaccatcaggtggtgtacaccaccttgccggctccaccggcccaggcccctctaaggggaacggttatgcaagcgccagcagtccgtcaggtcaatcctcagaactccgtgaccgtcagagtgccccaaaccactacttacgtcgtcaataatggacttaccctgggctccactggcccccagttaaccgtgcatcaccgtccgccccaggtgcacacagagccaccaaggccagtacatccagcccccctcccggaggctccacaaccccaaagactgccccccgaggcagcatctacgtctctgccacagaaaccacaccttaagctggcccgcgtccaaagccaaaatggcatcgtgctgtcatggtctgtgctcgaggtagacaggagttgcgccactgtggacagctaccacttgtacgcttaccatgaggaaccctccgcgacagtgccaagtcagtggaaaaaaatcggggaggtcaaagccctgcccttacccatggcctgtacactgactcaattcgtgtcaggcagcaagtactacttcgctgtgcgggccaaggacatttatgggcgtttcggccccttctgtgatccccagagtaccgacgtcatcagttcaacccaaagttcttag

SEQ ID NO: 177790 - DNA, 510 bp, synthetic construct
  misc_feature 1..510: note = Description of Artificial Sequence: Synthetic coding sequence
  source 1..510: mol_type = other DNA
atggacagcctggaggagccccagaagaaggtgttcaaggcccggaaaaccatgagggtcagcgacaggcagcaattggaggccgtttacaaggtgaaggaggagctcctgaaaactgatgtgaagctgctgaacggaaatcacgaaaatggggatttagacccaacatccccactcgaaaatatggactatattaaagataaggaggaggtcaatgggatagaggagatttgctttgatcccgaaggatccaaagccgaatggaaagagaccccttgtatactgtcagtgaatgtcaaaaacaagcaggatgatgatctgaattgtgagcctctttcgccacataacattactcccgagcccgtctctaagttacccgccgaaccagtgagtggggatcctgcgcccggcgaccttgacgccggcgatccagcgtctggcgttttagcatcaggcgacagcacctcaggagacccaaccagcagcgagcccagcagctccgacgcttag

SEQ ID NO: 177791 - DNA, 99 bp, synthetic construct
  misc_feature 1..99: note = Description of Artificial Sequence: Synthetic coding sequence
  source 1..99: mol_type = other DNA
atggacagcctggaggagccccagaagaaggtgttcaaggcccggaaaacaatgagagtaagtgataggcagcagctagaggctgtgtacaaggtgtag

SEQ ID NO: 177792 - DNA, 399 bp, synthetic construct
  misc_feature 1..399: note = Description of Artificial Sequence: Synthetic coding sequence
  source 1..399: mol_type = other DNA
atggacagcctggaggagccccagaagaaggtgttcaaggcccggaagactatgagagtatcagaccggcagcaattggaggctgtgtacaaagtcaaagaagaactgctgaaaaccgatgttaagcttctgaacggtaaccatgaaaatggcgatcttgaccccacatctcccttagagaacatggactacatcaaagacaaggaggaagtaaacgggatagaagaaatctgcttcgacccagagggctccaaagccgaatggaaggaaaccccttgcatcctgtctgtgaatgtgaagaataagcaggacgacgacctgaactgtgaacccctatccccccacaacataactccggaacctgttagcaaactgcctgctgagcccgtttccgggtag

SEQ ID NO: 177793 - DNA, 531 bp, synthetic construct
  misc_feature 1..531: note = Description of Artificial Sequence: Synthetic coding sequence
  source 1..531: mol_type = other DNA
atggacagcctggaggagccccagaagaaggtgttcaaggcccggaagactatgagagtatcagatcgacagcaactggaagcagtatataaggttaaggaagagctcctgaagaccgatgttaaactgctcaacgggaaccacgagaatggggacctggacccaacctcacccctggaaaatatggactacatcaaggacaaggaagaagtgaacggaatcgaagagatttgctttgatccggaagggtccaaggctgaatggaaagaaactccttgtattctttccgttaatgtaaaaaataagcaggatgatgaccttaactgtgagccactctccccccacaacatcactcccgagcctgttagcaaactgccagctgagcccgtgagcggcgaccctgcccccggggatctggacgcgggagatccagcaagtggcgtgctggcgagtggggactctacttctggagaccctacgtccagtgaaccaagtagctccgacgcagcaagtggagatgctacaagttag

SEQ ID NO: 177794 - DNA, 180 bp, synthetic construct
  misc_feature 1..180: note = Description of Artificial Sequence: Synthetic coding sequence
  source 1..180: mol_type = other DNA
atggacagcctggaggagccccagaagaaggtgttcaaggcccggaagaccatgagagtgtccgataggcagcagttagaagccgtgtacaaagtgaaggaggaactgctgaagacagatgtgaagctactgaatggtaaccacgagaacggcgatctcgaccctacatcacccctctag

SEQ ID NO: 177795 - DNA, 3318 bp, synthetic construct
  misc_feature 1..3318: note = Description of Artificial Sequence: Synthetic coding sequence
  source 1..3318: mol_type = other DNA
atggacagcctggaggagccccagaagaaggtgttcaaggcccggaaaaccatgcgcgtatccgacagacagcagctcgaggccgtatataaggtgaaggaggagttactgaagacagacgtcaaactcctcaatggcaaccatgaaaatggtgatctggaccccacaagccccctagaaaacatggattacatcaaagacaaagaggaagtgaacgggattgaagaaatttgttttgatcccgaagggagcaaggccgagtggaaggagacaccgtgtattctctcggtgaatgtgaagaataagcaggacgatgatctcaattgtgagcctctgtctccccacaacattacccctgaacccgtctcaaaattgccggccgaacccgtgagcggcgaccctgcgcccggggatcttgacgcgggcgacccagcctcaggcgtgttggcttccggcgattccaccagcggggaccctacatcaagtgaaccttccagttccgacgccgcatctggagacgcaacctctggcgatgccccttccggagatgtttcgcccggggacgcaacctcaggggacgctactgctgacgatctgtcatccggagatcccacctccagcgatccgattcctggggaacctgtaccagtggaacctatttccggcgattgtgcagcggacgatattgcctcgtctgaaataaccagcgtcgatttggctagtggtgccccagcttctactgatccagcatctgacgacctggcttcaggcgatctgtcctccagcgagttggcttctgacgacctggctacgggggagttggccagcgacgaactgactagtgagagtacgttcgacagaacctttgaacctaaaagtgtacccgtctgcgagcccgtgccagagatcgacaatatcgagccaagttcaaataaagacgacgattttctcgaaaagaacggggcagacgaaaaattggagcagatccagtcaaaagactccctagacgagaagaacaaagccgataacaatatcgacgccaatgaggagacgctggaaacagacgacaccaccatttgttccgaccggcccccggaaaatgagaaaaaagtggaggaagatattattactgagctcgctctgggggaagacgccatctcatcatctatggaaatcgaccagggtgaaaagaatgaggacgaaactagtgcagatctcgtggagacaattaatgaaaatgttatcgaagacaacaagtcagagaacattttggaaaatacagacagcatggaaactgacgagatcatacctattctggaaaagttagctcctagtgaggatgagctcacctgcttttctaagacatctcttctccctatagatgagacaaaccctgacctcgaggagaaaatggagagttccttcggctctccaagcaaacaagagagtagcgagagcctccctaaggaggcatttctggtccttagcgacgaagaggatataagcggagaaaaagacgagtctgaggtgattagccagaacgaaacctgctcacctgaagttgagtccaacgagaaggacaataagcccgaagaggaggagcaggtgattcatgaggacgacgagcgcccttcagaaaagaatgagttttcccgcaggaagcgctcaaagagcgaggacatggacaatgtccagtcaaagcgccgacggtatatggaggaggagtacgaagccgaatttcaagtgaaaatcacagcaaagggcgatatcaatcagaaattgcagaaagttatccagtggctgcttgaagaaaaactttgtgccctgcagtgcgctgtgttcgataaaaccctggctgagctgaagacaagagttgaaaaaattgaatgcaacaaacgccataaaactgtactgacggaattgcaggcaaaaatcgctaggctgaccaagaggttcgaggccgccaaggaggatctcaaaaagcgccacgaacaccctccgaatcctcccgttagtcctgggaaaactgtcaacgacgtgaatagtaacaacaacatgtcttatcggaatgccggaaccgtgcggcagatgttagagtccaagcggaatgtgagcgaaagtgccccaccctcttttcagacgccagttaatacagtcagctctactaatcttgtgacaccaccggctgtggtctcctcccaacccaagcttcagacgcccgtgacgagcggatcactgacagccacgagcgtcctgccagcacccaacaccgccactgtggtcgccaccacccaagtgccatcaggcaatccccagccaactatcagcctgcagccattgccagttatacttcacgtgcccgttgccgtgagcagccagccccaattactgcaatctcatccaggaacattggtgacaaaccagccctctgggaacgtcgagttcatttctgtgcagtctccccccacagtgtcgggactgactaaaaatccagtcagtctgccttccttgcccaaccccactaaacctaacaatgtgccctccgttcctagccctagcatccagaggaatcctaccgcttctgctgctccgctgggtactacattggccgtgcaagccgttcctactgcccattctattgtgcaggctacccgcacctcattacccaccgtcgggccgtctggactctacagtcctagtactaatcgtggtcccatacagatgaaaattccgatatctgcattttcaacttcctccgctgccgagcagaacagcaatactactccacgcatcgaaaatcagactaacaaaaccattgatgcatcagtctctaaaaaagctgccgatagcactagccagtgcggcaaagcgacaggctctgattcctcaggagtcattgacttaacaatggatgacgaagaatcaggagcgtcacaggatccaaagaagctgaatcacaccccagtgtccaccatgagttcctctcagcccgttagtcggcctctgcagccgatccagcccgctcctccgctccaacccagcggcgttccaacatccggtccttctcagaccacaattcatctgctgccaacggcacctacgactgtgaacgtcacgcatcggcctgtgacacaggtgaccacaagactgccagtgcctcgggccccagctaatcatcaggtggtttatacaactctgccagctcctcccgcccaggcccctctgaggggtacagttatgcaggcccctgcggtgaggcaggtcaacccccagaatagcaaacgtttttttctgtacatggcccccagatacatgtag

SEQ ID NO: 177796 - DNA, 3837 bp, synthetic construct
  misc_feature 1..3837: note = Description of Artificial Sequence: Synthetic coding sequence
  source 1..3837: mol_type = other DNA
atgcaccaggaccagcggttccggatggacagcctggaggagccccagaagaaggttttcaaagcccgtaagaccatgcgtgtgagtgatagacaacagctagaagccgtttataaggttaaagaagagcttcttaagactgatgtgaagctcctcaatgggaaccacgaaaacggagacctggatccaacgagccctttagagaatatggactatataaaagataaggaagaggtcaatggcatcgaagaaatatgcttcgaccccgagggttccaaggctgagtggaaagagacaccctgcatcctgtccgtgaacgtgaagaacaaacaggacgatgacctgaactgtgagcccttgtctccacataacattacccccgagcccgtgtcaaagctgccagcagagcctgtgtcaggagacccagctcctggggacctggacgcgggtgatccagcctcaggtgtgcttgcatcaggcgactctaccagtggcgacccaacttcatcagagcccagcagcagcgatgcggcgtctggtgacgcaacttcgggcgacgccccatccggtgacgtgagcccaggggacgcaacaagtggcgacgcaaccgcagacgatctcagttccggtgatcccacttcttctgatcccatccccggtgagccagttcccgtcgagccaattagtggtgactgtgcagccgacgatatcgcaagctctgaaatcacgagtgtagaccttgcttccggggctcccgcatccacagatcccgccagtgatgaccttgcatcaggggacttatcttcaagtgagttggcctctgatgatctagctacaggggagctagcatctgatgagctgacgagcgaatcaaccttcgatagaacttttgagcctaagtccgtgccagtttgtgaacctgtaccagaaatcgacaacatagagccttcttcaaataaagacgatgattttctcgagaaaaacggtgccgacgagaagcttgagcaaattcagtccaaagactcccttgacgagaagaacaaggctgataacaacatcgatgccaacgaggagaccctggagacagatgacacgaccatctgtagcgacagaccacccgagaacgagaaaaaggtcgaggaagatatcatcaccgagctggctctaggcgaggacgctatttcatcatctatggagatcgaccaaggggagaaaaacgaagacgaaacatctgccgacctagtggaaaccattaatgaaaacgtgattgaagataacaagagtgaaaacattctggagaatacagattccatggaaacggatgagattatccccatattagagaaactggccccttccgaagacgaactcacttgtttcagcaagaccagtttactgcctatagatgagacaaaccccgatctcgaggagaaaatggagtctagttttggctcccccagcaaacaagaatcatccgagagcctgcccaaggaggcattcctggttttaagtgacgaagaggacatctcgggcgagaaagacgagagtgaagtgatcagtcagaatgagacttgtagtcccgcggaggtggagtcgaatgaaaaggacaacaaaccagaagaggaggagcaggtgattcatgaagacgacgaacgtccatctgaaaaaaacgaatttagccggaggaagaggagcaagtcagaagatatggataatgtccagtcaaagcgccgcaggtacatggaagaagaatatgaggctgaattccaggtgaagatcactgccaaaggcgacatcaatcagaaactgcagaaagtgatacaatggttgcttgaggagaaactgtgcgcacttcagtgtgccgtctttgacaagactctcgcagaactgaaaactcgtgtggagaaaatagaatgcaataagagacataagactgtgttaaccgagctgcaggcaaaaatcgcccgtctcacaaagcgtttcgaggctgcaaaagaagacttgaagaaaagacatgagcatccccctaacccacctgtatccccagggaaaacagtgaacgacgttaatagtaataataatatgagctaccgtaatgctggaaccgtgcggcaaatgctcgaatctaaacgaaacgtgtcagagtcggccccaccatcatttcagacaccagtgaatacggtcagctctacaaatctcgttaccccccctgccgtcgtctcgtcacaacccaaactccagacccccgtcacctccggaagcctcaccgctacatctgtgctgccagcacccaacacagctaccgtcgtggccacgactcaggtcccaagtgggaatcctcagcccaccatctccctgcagccattgcccgtcatactccacgttcccgtcgccgtctccagtcagcctcagttactccagtcacacccaggtacacttgttacaaatcagccatccgggaacgtagagttcatctctgtgcagtcccctcccacagtgagcggcttgacaaaaaatcctgtgtccttaccgagcttgccaaaccccactaaacctaataatgtcccctccgttccctcaccctcgattcagcgcaatccaaccgcctctgccgcacctctcggcactaccctggctgtgcaagcggtccccaccgctcactccattgtccaggcaacacgcacatctttaccaacagtcggcccgtctggcctctatagtccgtctaccaatcgcgggcccatccagatgaagatccctatttcggcgttttcaacctcctctgccgccgaacaaaattctaataccaccccacgaatcgagaatcagaccaataagacaatcgacgcaagcgtgtccaagaaagctgctgactccactagccagtgcggcaaagcgactggttctgactccagcggtgttatcgatctcaccatggatgacgaggagagtggcgcttcgcaagatccaaagaagctgaatcacacccctgtgtcaacaatgagtagcagccagccagtgagccgcccacttcagcctatccagcccgctccacctctacaaccttccggagtcccaaccagtggaccctcgcagactacaatccatttactcccaaccgcacccacaaccgtgaatgtcactcatcggcccgtcacccaggtgacgacaagactgcctgtgcccagagctcctgccaaccatcaagtggtctacaccacactgcccgcccctcctgcacaagcccccctacgcggtaccgtcatgcaggcgcccgcggtgcgccaggtaaacccgcaaaactcagtgaccgttcgagtgcctcagacgacaacatatgtggtgaataatggactgaccctgggctcaaccggcccccaactgactgtccaccaccgcccacctcaggtacacaccgagcccccacggcctgttcaccctgccccactgccagaagcaccacagccacagagattaccgccggaagctgcctctacctctctaccccagaaaccccacctgaagcttgcccgggtacaatcccagaacggaattgtgctgtcatggtcagtgctggaggtggacaggagctgcgcgacagtggactcctaccacttgtatgcataccacgaggagcctagtgcgacggtccctagtcagtggaaaaagatcggcgaagttaaagccctgccactaccaatggcctgtacactgactcagttcgtgagcggatccaagtactattttgcggtccgcgcaaaagacatctatggtcgctttggccctttctgtgacccccagagcacagacgtgatatcttcaactcagtccagctag

SEQ ID NO: 177797 - DNA, 510 bp, synthetic construct
  misc_feature 1..510: note = Description of Artificial Sequence: Synthetic coding sequence
  source 1..510: mol_type = other DNA
atggacagcctggaggagccccagaagaaggtgttcaaggcccggaagactatgagggtgagtgatcgacagcaacttgaagccgtgtacaaagtgaaggaagagcttttaaagactgatgtcaagctgctgaatgggaaccatgagaatggggacttggacccaacatcacccctggagaacatggattatatcaaagataaagaagaggtgaatggtatagaggagatatgttttgacccagaaggatccaaggccgaatggaaagagaccccatgcattctctctgttaatgttaagaataagcaggacgacgacttgaattgtgagcccctgagcccccacaacattacacctgagcccgtgagcaaactaccggctgagcccgtatcaggggatccggcacccggcgacctggacgctggagatccagcatccggcgtgctggccagtggcgacagcacgagcggagaccctaccagctctgaaccctcctcttcagatgcatag

SEQ ID NO: 177798 - DNA, 1632 bp, synthetic construct
  misc_feature 1..1632: note = Description of Artificial Sequence: Synthetic coding sequence
  source 1..1632: mol_type = other DNA
atggccagccccgaccggagcaagcggaagatcctgaaggccaagaaaactatgccactgtcttgtaggaaacaagtcgagatgctcaataaatctaggaatgttgaggcccttaaaactgctataggctcaaatgtgccttcggggaatcagtctttttcaccctccgttatcaccagaaccaccgaaatcaccaagtgcagcccttcagagaatggggcttccagtttggactcaaacaaaaatagtatttccgagaaatcaaaggtcttcagccagaattgcattaagccagtggaggagatcgtccacagcgagaccaagcttgagcaggtcgtgtgttcctaccagaaaccatctcgcacgaccgagtctccctctagggtgttcacagaggaggctaaggactcactgaacaccagcgagaatgacagcgaacaccagactaatgtgacgaggagtctttttgagcatgagggcgcgtgctctctaaagagctcctgctgtcccccatcagtgctgtccggtgtggtgcagatgcccgaatccacggtgacttctaccgtgggggacaagaagactgaccagatggtgttccacctggagacaaattccaattcggagagccatgataagagacaaagtgacaatatcctgtgctcagaggattccggtttcgtgcccgtcgaaaagacacctaacctcgttaacagcgtcacttctaataattgcgccgacgacatcctgaaaacggacgagtgctccagaacctccatttctaactgcgagtccgcggactccacctggcaatcgagcctggacaccaataataattctcactatcagaaaaaaaggatgttcagcgagaatgaagaaaacgtgaagaggatgaagaccagcgagcagatcaatgagaacatctgtgtgtcactggaacggcaaactgcttttctggagcaggttcgccatctgatccaacaggagatctattcaattaactatgaactttttgataaaaagctgaaggagctgaaccagaggataggaaaaaccgaatgccgtaacaagcacgagggtattgccgataagcttctggccaagatcgctaagctacagagaagaattaagactgtcctgctatttcaaaggaattgtctgaaacctaatatgcttagctccaacggtgctagtaaggtcgccaactctgaggcaatgatcctcgacaaaaacttagagagcgtgaattcccccatcgagaagtcttccgttaattatgagcccagcaacccctctgagaaagggtctaaaaagattaacctgtcatctgatcaaaataaaagcgtctctgagtcaaacaacgacgatgtaatgcttattagcgttgaaagtccaaatctaacaactccaatcactagcaatcccacagataccaggaaaattacatccggtaactcaagtaactcgcccaatgccgaggttatgaaggttcagtatccgccttggtctcatattagaaaactcctgcagacccaaaggaaacaaccccactggcacaagatgcagtcccggttcctaagccccctgtccacctgccatctctcacaaaatcaccagcaccactaccttaactag

SEQ ID NO: 177799 - DNA, 2049 bp, synthetic construct
  misc_feature 1..2049: note = Description of Artificial Sequence: Synthetic coding sequence
  source 1..2049: mol_type = other DNA
atggccagccccgaccggagcaagcggaagatcctgaaggccaagaagaccatgcctttgagctgccggaagcaggttgaaatgcttaacaagtcaagaaatgttgaagccctgaagacagcaattggaagcaacgttcccagtgggaatcagagcttcagcccttcagtgattacacgaacaaccgaaatcacaaagtgttcacctagcgagaatggcgcctcctctcttgactctaacaagaatagcatcagtgagaagtcaaaagtgttcagtcagaattgtatcaaaccagtcgaggaaattgtgcactcagaaactaagctggagcaagtggtctgttcttatcagaaaccgagtcggactactgagtctccaagccgggtgtttactgaggaggctaaagatagcttgaatacaagcgagaatgactccgaacaccagaccaacgtaacacggagccttttcgagcatgagggggcatgcagcctgaaaagctcttgctgtccaccatctgtcctgagcggtgtggtgcagatgcccgaatcaactgtgacgtccaccgtcggagacaagaagactgaccagatggtgttccatctggagactaattccaatagtgaaagccatgacaaacgccagtccgacaacatcctgtgttcagaggactccggattcgtgcctgtggagaagactcctaacttagtgaactccgtgacttcaaataactgtgcagatgacatcctgaagaccgacgagtgctctagaacatcaatcagtaattgcgagtccgccgacagcacatggcagtctagtctggacacgaacaataatagccactatcagaagaagcgcatgttctcggagaacgaagaaaacgtcaaacgtatgaagacttcagaacagattaacgaaaatatctgcgtatccctagagcggcagacagctttcctcgaacaggttagacacttgatccaacaggaaatctacagtatcaactacgagctgttcgataagaagctcaaggagctcaaccaaaggatcggcaagaccgagtgtcggaataaacatgaaggtattgcagataagctccttgctaagatcgccaaattgcagagacgcattaagactgttctgctgtttcaaagaaattgcctgaagcccaacatgctttctagcaacggagctagcaaggtggcaaattcagaggccatgattctggacaagaaccttgaatccgtgaatagccctatcgagaagtcgtccgtaaactacgaaccatcaaacccttccgagaaagggagtaagaaaatcaacctaagtagtgaccaaaacaaatctgtaagcgagagcaacaatgacgacgtgatgctgatcagcgtggaaagccccaacctcaccactccaattacgagtaatcctaccgacaccagaaagattacatctggcaacagttctaattctcctaacgctgaggtaatggccgtgcagaagaagctggattctataatcgacttaactaaagagggcttgtctaattgcaatactgagtctccagtatctcccctagaatcccactccaaagccgcctccaactctaaagaaacgaccccactagctcagaatgcagtgcaggtcccggaaagctttgaacacctccctccacttccagaaccccctgctccactgcctgaattagtcgacaagaccagagataccctaccccctcagaaacctgagttgaaagtgaaacgggtgttcaggccaaatggcatcgctttgacatggaacatcactaagatcaaccccaagtgtgcccctgttgaatcctatcacctgttcctgtgccatgagaactccaacaacaagttgatttggaagaaaatcggggagataaaggcccttccactccctatggcttgcacactctcacagttcctcgcttccaatcgatactacttcacagtacagtctaaggacatcttcgggcggtacggacctttttgcgacatcaagtcaattcccggattttcagaaaacttgacctag

SEQ ID NO: 177800 - DNA, 1632 bp, synthetic construct
  misc_feature 1..1632: note = Description of Artificial Sequence: Synthetic coding sequence
  source 1..1632: mol_type = other DNA
atggccagccccgaccggagcaagcggaagatcctgaaggccaagaagacaatgcctctcagttgtcggaaacaagtggagatgctcaacaaaagcaggaacgtggaggcccttaaaactgctatcgggtccaacgtgccgagcggcaaccagtccttctctccttctgtcatcaccagaacgacagaaattactaaatgttccccatccgagaacggagcgtctagtctggattccaacaagaattccataagtgagaagagtaaagtcttttctcaaaactgcatcaaacccgtggaggaaattgtccattctgagactaagttagagcaggtagtctgttcttaccaaaaaccatctcgtaccacagagtccccttccagagtgttcactgaggaggccaaagatagcctgaatacgagcgagaatgattccgaacatcagaccaatgtgactcggagcctgttcgaacacgagggggcctgctccttgaaatcctcctgctgtccacccagtgtgctgagcggtgtcgtccagatgccagagtcaacagtgacatccaccgtcggggataaaaaaactgatcagatggttttccacctggagacgaacagcaattccgaatctcatgacaagcggcaaagtgataacatcctttgtagcgaggactcaggcttcgttcccgtggagaaaacccctaatttggtgaattcggtgacttccaataattgtgcagatgacatcctcaaaacagacgaatgttcccgcacgtcaatcagcaactgcgagagtgcagactcgacatggcagtcctcactggacacaaataataatagccattaccagaaaaaaagaatgttctctgaaaatgaagaaaacgtgaagcgtatgaagacaagtgagcagatcaatgagaatatctgcgtctcgctcgagcggcagaccgccttcctcgagcaggtgcggcatcttatccagcaggagatttatagcatcaactatgaattatttgataagaagctcaaggagctgaaccagaggatcggaaaaacagagtgtcgtaacaagcacgagggcattgcagataaactgctggcaaagatcgctaagttgcagcgcagaatcaagaccgtgctgctcttccagagaaactgtctgaaaccgaacatgctgagctccaacggagcctctaaggtggccaatagcgaggcaatgatcttggacaaaaatcttgaatctgtcaactcacctatagagaaatcatcagtgaactacgagccctccaacccttctgaaaagggctcaaagaagataaacttgagctcggaccagaataagtcggtttccgagtccaataacgatgacgttatgctgattagtgtggaaagccctaaccttaccacgccaattacatcgaaccccactgacactcgcaagataaccagcggaaacagctcgaattctccgaatgcagaggttatgaaggtgcagtatccaccatggagccacatacggaaactactccagacccaacgaaagcaaccacactggcacaaaatgcagtcccgattcctctcacctctgagtacgtgccacttgtctcagaaccatcagcatcactacctgaactag

SEQ ID NO: 177801 - DNA, 2049 bp, synthetic construct
  misc_feature 1..2049: note = Description of Artificial Sequence: Synthetic coding sequence
  source 1..2049: mol_type = other DNA
atggccagccccgaccggagcaagcggaagatcctgaaggccaagaagacaatgccacttagctgccggaagcaagtagaaatgttaaataagagcagaaacgttgaagccctaaagaccgccataggaagcaacgttccatcagggaatcagtccttctcaccttctgtgatcactcgaacgacagagatcacaaagtgtagcccaagtgagaatggcgcctcatccctcgattctaacaagaacagcataagtgaaaagtcgaaggtgttcagccagaactgcattaaaccagtggaagagatcgtccatagcgaaacaaaattagagcaggtggtgtgttcctaccaaaaaccaagtaggaccaccgagtccccttctcgcgtttttaccgaggaggctaaagatagcctaaacacctctgagaatgattccgaacaccagactaacgtcacaagaagtctgttcgagcatgagggggcctgctcactgaaaagttcatgttgcccaccatcggtcctcagcggagtggttcagatgccagaatcgactgtcacttctaccgtgggggataagaagaccgatcagatggtttttcatctcgagaccaattcaaactctgagagtcacgacaaaagacagagcgataacatactgtgctccgaggatagcggattcgtgcccgtcgaaaagacacctaatctggtgaactcagtgacatcgaacaactgcgctgacgacatcctaaaaacagatgagtgttcaaggacttctatctctaactgcgaatcagcagatagcacgtggcagtcctctttagacacaaacaacaactcccactatcagaaaaaacgtatgttctctgagaacgaggaaaatgtgaaacgtatgaaaacttcagagcaaattaacgagaatatttgcgttagtctggagcggcaaacagcgtttctggagcaggtgcgacatcttatccagcaggagatctactccatcaattatgaactctttgacaaaaaacttaaggagctgaaccagaggattggtaagacagagtgccgcaacaagcatgagggtatagccgataaacttctggccaaaatcgcaaagttgcagaggaggatcaagaccgtgctcctgttccagcgtaactgcctgaagcctaacatgctctctagcaacggagctagtaaagtcgctaactcggaggcaatgatcctcgacaagaacctcgaatccgtcaactccccaattgaaaaatcctcagtaaactatgaacctagcaaccccagcgaaaaaggttccaagaaaattaacctctccagtgatcagaataaaagcgtctccgagtctaacaatgacgacgtgatgctcataagtgtcgagtcaccaaatctgacaacgcccataactagtaacccaacagacacacgcaagattacctccggaaattcaagcaattctcctaatgccgaagtgatggcagtgcagaagaaattagattcaattattgatctgacaaaggaagggctcagcaattgtaacacagagtctccagtatcaccactcgagtcccattccaaggccgcatcgaattccaaagaaacgacccccctcgctcagaacgccgtgcaagtgccggagtccttcgagcatctccccccgcttcccgaacctcctgcgccacttccagaactcgtcgataagacacgtgacacactgccaccgcagaagccagaattaaaggtgaagcgcgtctttcgtccgaatgggatcgcactcacctggaacatcaccaaaatcaaccctaagtgcgctccggtagagtcctaccatctttttctttgccacgagaattcaaataacaagctgatctggaagaagataggtgagatcaaggccttaccgctgcctatggcctgtacactgtcacaattccttgcatccaataggtattactttactgtgcagtctaaggatatcttcggacgctacggcccgttttgcgacattaaaagcatacccggcttttccgaaaacctgacctag

SEQ ID NO: 177802 - DNA, 1278 bp, synthetic construct
  misc_feature 1..1278: note = Description of Artificial Sequence: Synthetic coding sequence
  source 1..1278: mol_type = other DNA
atggccagccccgaccggagcaagcggaagatcctgaaggccaagaagacaatgcctctctcctgtcgcaaacaggtggagatgctgaataagagccgtaatgtcgaggctctgaaaactgcgatcggtagcaacgtgccttccggaaaccagagtttcagcccgagcgtgattactcgcacaaccgagatcaccaagtgttcaccaagcgagaatggggccagttctttggactcaaacaagaattccatttccgaaaaatccaaggtgttcagccagaattgcatcaagcccgttgaagaaatcgtgcatagcgagaccaagcttgagcaggtagtgtgtagctatcagaaaccatcaaggaccacagaaagcccatcacgcgtctttaccgaggaggctaaggactctttgaatacgagcgaaaacgactcagaacaccagacaaatgtcacaagatccctatttgagcatgagggcgcctgctccctcaagagtagctgctgtccaccgtccgtcttgtccggtgttgtgcaaatgccagagtccactgtgacaagtacggtgggtgacaagaagactgaccaaatggtctttcacttggagaccaactccaactcggaaagtcatgataagaggcagagcgataacattctctgcagcgaggactcaggcttcgtcccagtcgagaagacaccaaacctggtaaacagcgtgactagtaacaactgcgccgacgacatcctgaagacagacgagtgcagccgcaccagcatttcaaattgcgaaagcgcagatagcacctggcagtcttcgttagacactaataacaattctcattatcagaagaagaggatgttcagcgaaaatgaagagaatgtcaaacgtatgaagacaagcgaacagatcaatgagaatatttgtgtgtccctggagagacagacagccttcctcgagcaggtgcgccacctcatccaacaagagatatattcgattaattacgaactgtttgacaagaagctaaaggagctgaaccagcgcattggtaagactgagtgtcgcaataagcatgagggcatcgctgacaagcttctcgctaaaatcgccaagcttcaaagacgcataaagactgtactgctcttccagcgaaactgcctgaagcccaatatgctgtctagcaatggggctagcaagatccccgagaaactccatcaggaaatcctggcgatccttcccatgctgaagctgtggttataccgtcggaaccttatactgtag

SEQ ID NO: 177803 - DNA, 681 bp, synthetic construct
  misc_feature 1..681: note = Description of Artificial Sequence: Synthetic coding sequence
  source 1..681: mol_type = other DNA
atgctgatcagcgtggagagccccaacctgaccacccccatcaccagtaaccccacagatactcgcaagatcacctcaggaaacagcagtaattcacctaacgccgaggtgatggcagtgcagaagaaactggactccattatcgatcttaccaaggagggcttaagtaactgcaacacagagtcaccagtaagtcctctggagtcgcactctaaggctgccagtaatagcaaggaaacgacaccccttgctcagaacgccgtccaagttccagaaagctttgagcacctgccgccactgcccgaaccacccgcccctcttccagaattggttgacaagacacgagacactctccctcctcagaaacctgagttaaaagtaaagcgcgtctttcggcctaatggaatcgccctcacttggaacattacaaagatcaatccaaagtgcgccccagtggaatcctaccacctgtttctgtgtcacgaaaattctaacaacaagctcatctggaagaaaattggagagattaaggccctgcctctgccgatggcttgcactttgtcacagtttcttgcttccaatcggtactattttaccgtgcagtcaaaggatattttcggaagatacggacccttttgcgatattaagtcgatcccggggtttagcgagaatttgacctag

SEQ ID NO: 177804 - DNA, 714 bp, synthetic construct
  misc_feature 1..714: note = Description of Artificial Sequence: Synthetic coding sequence
  source 1..714: mol_type = other DNA
atgaccagcgagatcacctacgccgaggtgcggttcaagaacgagttcaaatcatcaggaatcaacaccgctagcagtgcagcctcaaaggaacgcaccgccccccacaagtccaacactggctttcctaagttgctgtgtgcctccctgttgatttttttcttgctcctggccatttccttcttcatcgcattcgtcatctttttccaaaaatatagccaactccttgagaaaaagacgaccaaggaactggtccacacgacactggagtgcgtgaagaagaatatgcccgttgaagaaaccgcttggtcctgctgccctaagaattggaagagttttagttcaaactgctactttattagcactgagtcagccagctggcaggactcagagaaggactgcgctagaatggaggcacacctgctcgttatcaacacccaggaggagcaagactttatcttccagaacttgcaggaggagtctgcttatttcgtggggctaagcgatcccgagggacagcgtcattggcaatgggtggaccagactccatataatgagagtagcactttttggcacccgagagagccttccgatcctaacgagcgatgcgtggtgttaaacttccgtaagagccccaagcggtggggatggaacgatgtaaattgcctgggcccacagcgcagcgtttgcgagatgatgaagatccacctgtag

SEQ ID NO: 177805 - DNA, 2469 bp, synthetic construct
  misc_feature 1..2469: note = Description of Artificial Sequence: Synthetic coding sequence
  source 1..2469: mol_type = other DNA
atggaggaggaggaggaggccatcggcctgctggacaaggtgctggaagacgaggatgtgtttctcttggaagagtgcgaattagggactccaacctcaccaggaagcgggagtccctttctggtggctgtgaaagtcgaggctgggaaggggctcgaaatgcggaagttggttctctcagggttccttgcctccgaagaaatttacatcaaccagttggaggccctactgctgccaatgaaacctttgaaagccactgcgaccacttcacagcccgtgttaaccatacagcagatagagaccatcttttacaagatacaggacatctatgagatccacaaagagttctatgacaatttgtgtcccaaagtacagcagtgggattcccaggtcaccatgggacaccttttccaaaagttagcatcccaattgggcgtctataaggctttcgtcgacaactacaaagtggcactggaaacagcagagaagtgtagtcagagcaacaaccagttccagaagatcagcgaggagttaaaagtcaagggaccaaaggattctaaggattcacacacatcagttaccatggaagccctcctttataagccaatcgacagagtgacaagatctacgttggtgctgcacgatctacttaaacacacaccggttgaccacccagactaccccctcctacaagacgctctgagaatttcccagaatttcctatcaagcattaatgaagatatcgacccccgtcgtacagctgtgaccacccctaagggggagactcgtcagctggtgaaggatggatttctcgttgaagttagtgaaagtagcagaaagctgagacatgtatttttgttcaccgacgtactcctgtgtgctaaactgaagaagacgtcagcaggtaagcaccagcagtatgattgcaaatggtatatccccctagccgatctggtgttcccctctcctgaggaaagcgaagcaagtccacaggtacacccctttcccgaccacgaactggaggacatgaagatgaaaatttcagctttgaagtctgaaatacagaaggaaaaagctaataaaggccagtctcgcgcaatagagcgcctgaaaaagaaaatgtttgagaacgagttcctgctgcttctaaacagtccgaccatcccttttcggatacataatcggaatgggaaatcttatctctttctattgtcctctgattacgaacggagcgaatggagggaagccattcagaagctccaaaagaaagatctccaggctttcgtcctgtcctctgtggagcttcaggtgttgacaggttcctgcttcaaactccgtacagtccacaacattcccgtgacctcaaacaaggatgacgatgaaagtccaggtctctacggattccttcatgttattgtccatagtgctaaaggctttaaacagtccgcaaatttgtactgcaccctcgaggtggactcatttgggtacttcgtgtccaaagctaagacgcgcgtgttccgggatacagcagagccgaaatgggacgaggagtttgaaatcgagctagagggatctcaatctctacgcatcctttgctatgagaaatgctatgacaaaacaaaagtgaataaggataataacgaaattgtggacaaaattatgggaaaaggccagattcagctagatcctcagaccgtggagactaagaactggcatactgacgtcatagaaatgaatgggattaaggttgaattctccatgaaatttacttctcgtgacatgagcctgaagagaacccctagcaagaaacagaccggggtctttggagtgaagatttcagtggtgactaagagggagagaagcaaggtgccttacatcgtgcggcagtgcgtggaagaagttgagaagcgcggcatcgaggaggtgggaatatacaggattagtggagtcgcaactgatatccaagctttgaaggcagttttcgacgcaaacaataaggatattctgctcatgctctctgacatggatattaacgctattgcagggaccctcaagctttactttagagaactacccgagcctcttctaactgataggttatatccagcctttatggaaggaatagctctgagcgacccagctgccaaggaaaattgtatgatgcacctcctgcgttccttgcctgatcccaatcttattaccttcctgtttctgctggagcaccttaaaagagttgctgagaaagagcccatcaataagatgtcgctgcacaacctggcgactgtgttcgggcccacccttctacgacccagcgaagtggagtctaaggctcacctgacctctgcagcagacatttggagccatgatgtgatggcccaggtgcaggtactcttgtattatctgcagcatccacctatttccttcgccgagctaaagaggaataccctttattttagcaccgatgtatag

SEQ ID NO: 177806 - DNA, 2580 bp, synthetic construct
  misc_feature 1..2580: note = Description of Artificial Sequence: Synthetic coding sequence
  source 1..2580: mol_type = other DNA
atggagcccctgagccaccggggcctgccccggctgagctggatcgacactctttattcaaatttctcatatggtaccgatgagtatgatggtgaagggaatgaggagcagaagggtcctccagagggtagtgagaccatgccgtatattgacgagtctccaacaatgtccccgcaactgagtgcccggagccaggggggtggagatggcgtgtcgcccactcctcccgaaggtctggctcctggggtggaagctggcaagggactggagatgagaaaactggttctgagtgggttcctggcttccgaggaaatatacattaatcaactggaggctctcctgctgcctatgaagcccctcaaagctacagccactacatcgcagccagtactgaccatccagcagattgaaaccatcttctacaagatccaggacatctacgagatccataaagaattttacgacaacctctgcccaaaggttcagcagtgggactcgcaggttaccatgggccacctgtttcagaaactcgcatcccagctaggtgtgtataaagccttcgtggacaattataaggtagccctcgagactgccgaaaaatgctcccaaagcaataaccagttccagaaaatctcagaagaacttaaagttaaaggtccgaaagatagcaaggattcgcacactagcgtgaccatggaggccctgttatacaagccaatagaccgggtgactcgcagtaccttggtgctccacgatctccttaagcatacaccagtggatcatcccgattatccccttttgcaagatgccctgaggatttctcaaaactttttaagttcaatcaacgaagacattgacccaagaaggaccgcagtcactactcccaagggagagacacgtcagctagttaaagacggatttctcgtagaagtgtccgaatcttcaagaaagttgagacacgtcttcctgtttactgatgtgttgctatgcgctaagctgaagaagacgagcgccggcaagcatcagcagtacgattgtaagtggtatatccctctagcagacctcgtgtttccatcccctgaggaatcagaggcctcaccccaggttcatccctttcctgaccacgaattagaggatatgaagatgaagattagtgccctgaaatcagagatacaaaaagaaaaagccaataaagggcagtcacgggctattgagcggctgaagaaaaagatgtttgagaacgaattcttgctgctactcaattcgcccaccatcccatttaggatccacaataggaatggcaagtcatatctatttttgctttcatctgattatgagagaagtgagtggcgcgaggccattcagaaactgcaaaagaaggatttgcaagcattcgtcttgtcctcagtggagttgcaggtgctgacagggagttgtttcaaattgcgtactgtacataacatacctgttacaagcaacaaggacgacgacgagtcgcccggtctgtatggattcttgcacgttatagttcattcagctaagggctttaaacagagtgcaaacctatattgcactctcgaagtcgattcattcggatattttgtttctaaagctaagacacgagtgtttcgggatacagccgagcctaagtgggacgaggagttcgagatcgaacttgaggggtcgcagtctctgcggatcttatgttacgaaaaatgttatgacaaaactaaggtaaacaaagacaacaacgagatcgtggacaagattatgggcaaagggcagattcagttggatccccagaccgttgagaccaagaactggcatacagacgtgatcgaaatgaatggaatcaaagtggagttttcaatgaagttcacgtcccgcgacatgtctctcaagaggacgcctagtaagaagcagaccggtgttttcggggtcaaaatttccgttgttaccaaacgagaacgtagcaaagttccgtacatcgtaagacagtgcgtcgaggaggtggagaaaaggggcatcgaagaggtaggaatttaccgcatatccggcgtagccactgatattcaagcgctgaaagctgttttcgacgccaacaacaaagacattctcctcatgctgtcagatatggatataaatgcaattgccggcaccctcaagttgtactttcgggagttgccagaacctctgttgactgaccggctctaccctgcattcatggaaggcatcgcactcagcgaccccgccgccaaggaaaactgtatgatgcatctgttgcgatccttgcctgatccgaatctgattactttccttttcttgctcgaacacttgaagagggttgccgaaaaggagccgatcaataaaatgtcactccacaatctagctaccgtgttcgggccaacgttgctcagacccagcgaagtagaaagtaaagcgcatctcacctcggctgcagacatctggagccacgacgtcatggcgcaggtgcaggttttactgtactacttgcaacacccccctattagttttgccgagttaaaacggaataccctgtatttttccactgacgtgtag

SEQ ID NO: 177807 - DNA, 1092 bp, synthetic construct
  misc_feature 1..1092: note = Description of Artificial Sequence: Synthetic coding sequence
  source 1..1092: mol_type = other DNA
atgaagcccctgaaggccaccgccaccaccagccagcccgtgctgacaatacagcaaatagaaaccatcttttacaagatccaggatatctacgaaatacacaaggagttctacgacaacttgtgtccaaaggtacagcagtgggattctcaagttaccatggggcatctttttcagaaacttgcctcccaacttggcgtgtataaggcatttgtcgataactacaaagtcgcactggaaaccgcggaaaagtgctcacagtccaataatcagttccaaaagatcagtgaagaactcaaggtgaagggacccaaggacagcaaagactctcacacaagtgtaacgatggaagcccttctgtataagccaatcgaccgagtcactaggtccaccctggtgctgcatgatctcctgaaacacaccccagttgaccaccccgactacccgttactccaggatgcacttcgcatctcgcagaactttctctcttcaattaatgaagatattgaccccagaagaaccgcagttaccacccctaaaggggagacacgacaacttgtcaaggatggctttctggtggaagtatccgaatcctctcggaagctccggcacgtttttctgttcacagatgtgctgctgtgcgccaagttgaagaaaacaagtgctggtaagcatcagcagtacgactgcaagtggtatatcccactcgctgatctagtatttccgtcaccggaggagtctgaggcctccccccaggtccaccctttccccgatcacgagttagaggacatgaaaatgaaaatttccgcactgaagagcgaaattcagaaagaggaggtggaaaaacgcggcatcgaggaagtggggatttaccggatctctggtgtcgctaccgatatccaggctttgaaggccgtttttgatgcgaacaataaggatattttactgatgctgagcgacatggacatcaacgccattgcgggtacgttgaagttatacttccgcgagctgccagagccgcttttaacagatcggctgagtccttgcccaacacccacatctagcccctccagctcttgctggaatacctag

SEQ ID NO: 177808 - DNA, 1926 bp, synthetic construct
  misc_feature 1..1926: note = Description of Artificial Sequence: Synthetic coding sequence
  source 1..1926: mol_type = other DNA
atggagatcctgctgatcatccggttctgctgcaactgcacctacgcccttttatataagcccatagatcgtgtgacccgcagtacactggtcctgcacgacctgctgaaacacacccctgtggatcaccctgactaccccctcctacaggatgcgctacgtattagccagaactttctatcctccatcaacgaagatatcgaccctcgacgcaccgctgtgacgacccctaagggggagaccaggcagcttgtcaaggacgggttcctcgtcgaggtttccgaatcatccaggaaactgaggcacgtcttcctcttcaccgacgttctgctgtgtgccaagctcaagaagacaagcgccggcaaacatcagcagtacgactgtaaatggtacattccacttgcagaccttgtctttccctctcccgaggagagcgaagcgagcccccaagtgcatccgttccctgaccacgagttggaggacatgaaaatgaagatctccgctttgaaaagtgagatccaaaaagagaaggctaataaggggcagtctcgggccattgaacggctgaaaaagaaaatgtttgagaatgaatttctgttgttactgaattcacctacaatcccatttcgcatacacaatagaaacggcaaaagctatctgttcctcctctcttccgattatgagcgttctgagtggcgggaagctatacaaaagctacagaagaaagacttgcaggcttttgtcctatcgtccgtcgaactgcaagttcttacagggtcatgctttaagctaagaactgtgcacaacatccccgttacctcgaataaggatgacgacgagtcgccagggctgtacggatttctgcacgtaattgtccatagcgccaagggatttaaacagtcagcgaatctctattgtaccctcgaagtagactcctttggttactttgtgtcaaaggctaagacacgcgttttcagagatacggccgagccgaaatgggatgaagaatttgaaatcgagctggaaggctcacagagtctgcgaatcctgtgttacgaaaagtgttacgacaaaaccaaagtcaacaaggataacaatgagatcgtggataagataatgggtaaaggccagatacaactggacccgcaaacagtggagactaagaactggcatacagatgtaatcgagatgaacgggattaaagtggagttctcaatgaaatttaccagtcgggacatgagtttgaagcgaacacctagcaagaaacagactggcgtgtttggggtgaagatctccgttgtgactaaaagagaacggagcaaagtgccatacatagtgcgacagtgtgtcgaagaggtcgaaaaaagagggattgaggaggtgggcatctatcgaatcagcggtgttgccactgacattcaggctttaaaagcagtgttcgacgccaacaataaggatatactgctgatgctgagtgacatggatataaacgctattgcgggcaccctgaaactgtatttccgtgagctgcccgaaccgcttctgactgacaggctgtatcctgctttcatggaagggatcgccttaagtgacccagccgcgaaggaaaactgcatgatgcacttgctgaggagtctaccagaccccaatctcatcaccttcctgtttctgctcgagcatctcaaaagagtggcagagaaggagcccataaataagatgagcctacataacctggccacagttttcgggcctaccttgctgcgcccttctgaggtggagagtaaggcacacctgacctctgctgcagatatatggtcccacgacgtaatggctcaggtgcaagttcttctttattacctccaacaccctccgatcagttttgcagagctgaaacgaaatacactctacttttctaccgacgtgtag

SEQ ID NO: 177809 - DNA, 933 bp, synthetic construct
  misc_feature 1..933: note = Description of Artificial Sequence: Synthetic coding sequence
  source 1..933: mol_type = other DNA
atgaccgacgtgctgccccagcccgactgcagccccaaggccggccgcgagccactggccctcgaagaatctggatccaaacgaccccccaacacaggagctagattgtggggccgggtgcgtaacaagctgctaagaaacaaactagaccctcagacagtcgaaactaaaaactggcacactgacgtgattgaaatgaatgggataaaagtggaattttcaatgaagtttacgagcagggatatgagtctgaagcgcaccccctctaagaaacaaaccggagtatttggcgtgaaaatctctgtggtgacaaaacgggaacgctccaaagttccttatatagtaaggcagtgtgtcgaagaagtggagaaacgcggaatcgaggaagtaggtatatacagaatatctggtgtggccacggacatacaggccctgaaagccgtatttgatgcaaacaataaggacatcctactgatgctctccgacatggacataaacgcgattgcaggcactctaaagctgtactttcgcgaactgcccgagcccctcctcacggatcgactatacccagctttcatggagggcatcgcactgagcgaccccgcagcaaaggagaattgcatgatgcatctgctcagatcattgccagaccctaacctaatcacttttctgttcctgctcgagcacctcaagagagtcgcagagaaggaacccataaacaaaatgagtctgcacaacctggccacagtgttcggccctacactgctgaggccctctgaggtcgagtccaaagcccacttgacaagcgctgcagatatctggtcgcacgatgtgatggcccaggtccaggttttattgtactatcttcagcacccccccattagctttgctgagctcaagcggaacaccctatattttagcacggacgtttag

SEQ ID NO: 177810 - DNA, 2442 bp, synthetic construct
  misc_feature 1..2442: note = Description of Artificial Sequence: Synthetic coding sequence
  source 1..2442: mol_type = other DNA
atgccctacatcgacgagagccccaccatgagcccccagctgagcgcacgatcccagggtgggggtgacggtgtatcccctacccccccagagggtctggcccccggagtcgaagctggcaaggggcttgagatgcggaagttggttctgtccggttttttagcatccgaggagatctatattaatcagctggaagctctactgttacctatgaaaccactgaaagcaactgcgacgacgagtcagccggtgttaactattcaacaaattgagaccatcttttataagattcaagacatctacgaaattcataaggaattttacgacaacctttgcccaaaggtacagcagtgggactcccaggtgacaatgggccatttattccagaagcttgcgtcacagctgggggtgtacaaagcttttgttgataattataaggtggcccttgaaacagcagagaagtgtagccagtccaacaaccagtttcagaagataagtgaggaactgaaagttaaagggccaaaggattctaaagattctcacaccagcgtgactatggaggccctactgtacaagccaattgatagagtgacccgatccaccctggttctccacgacttactcaagcatactccagttgaccacccagattatcccctactccaagatgctctgagaatctctcagaacttcctgtccagtattaacgaagacatcgatccacgccgcaccgctgtcacaactccgaaaggcgagacccggcaattggtgaaggatggcttcctcgtagaggtgagcgagagcagccggaagctgcgacatgtcttcttatttacagatgttctcctctgcgccaaactaaaaaaaacctcagccggtaagcatcaacagtatgattgtaagtggtatatccctctcgctgacttagtttttccgtctcccgaggaatctgaggcgtccccacaggtgcatccctttccagaccacgagctggaggatatgaagatgaagattagcgccttgaagtcagagattcagaaggagaaggccaacaaagggcagtctcgagccattgagcgccttaagaaaaagatgtttgaaaacgaattcctgttattgctcaattcccccaccatcccatttagaatccacaacagaaatggaaagtcatatctcttcctcctctcctccgactatgaacgcagcgaatggagagaagccatccagaaactccagaagaaggacctacaagctttcgttctatccagcgtcgagctccaggtgcttactggtagctgttttaaattgcgtacagtgcacaacataccggttacttccaataaggacgacgacgagagtcccgggctgtatggatttctgcacgtcatcgtgcacagtgccaagggcttcaagcagtccgctaacctgtattgcacactcgaagtggattcattcggctattttgtcagtaaagctaagacaagagtgtttagagacaccgcagaacctaagtgggacgaagaattcgagatcgagctggaaggttcacagagcctgcggattctgtgttacgagaaatgctacgataagacaaaagtgaataaggacaacaacgagatagtcgacaaaatcatggggaaggggcagattcagctggacccccagaccgtcgagactaaaaattggcacaccgatgtgatcgagatgaatggcattaaagttgaattctccatgaaattcacttctagggatatgtctctcaagcggacgcccagcaaaaagcaaaccggggtcttcggcgtaaagatctctgtggtcaccaagcgtgaacggtcgaaggtgccctacatcgtcagacagtgtgtggaggaggtagaaaagcgtggcatagaggaggtgggcatctaccggatttctggagttgccaccgacatacaagctctcaaagccgtgttcgacgccaataacaaagacatcctgctgatgctctctgatatggatatcaacgctatagccggaacactaaaactctatttccgagagctgcctgagccgcttttgaccgacaggttgtaccctgcgtttatggagggaatagcattaagcgatccagctgccaaagagaactgcatgatgcatcttctgcgcagcctacccgatcctaacctcattacattcctctttttactggagcatctcaaacgggttgccgagaaagagcccatcaacaaaatgtccctccataatctggctacagtgttcggccctaccctcctgcgtcccagtgaagtggagagtaaggctcatttgaccagcgccgcggacatttggtcccacgatgtcatggcgcaggtgcaggtcctcttatactatctgcagcacccacctattagtttcgcggaactgaaaaggaataccctgtacttcagtaccgatgtgtag

SEQ ID NO: 177811 - DNA, 1332 bp, synthetic construct
  misc_feature 1..1332: note = Description of Artificial Sequence: Synthetic coding sequence
  source 1..1332: mol_type = other DNA
atgctgaccaacggcaaggagcaggtgatcaagagctgcgtgagcctcccggagttgaacgcacaggtattctgccactcatcaaataacgttacaaagaccgaatgctgcttcacagatttttgcaataatatcaccctgcatctcccaacagcctcccctaatgcccctaagctgggaccgatggagctggctattattatcactgtccccgtctgtcttctctcaatcgccgccatgttgacagtgtgggcctgtcagggccggcagtgcagctacagaaagaagaaacgccccaatgtggaggaacccctgagcgagtgtaacctggtgaacgctggaaaaactctgaaggatctgatctatgacgtgaccgcgagtggttctggatctggcctccccctgttggtccagcgtactatcgcccggactatagtgctgcaggagatcgtgggcaaggggagattcggcgaggtctggcacggcagatggtgcggagaagatgtcgccgtgaaaatttttagttcccgtgacgaacggtcttggtttagggaagcggagatttaccaaactgtaatgctgagacacgagaatatactgggcttcatcgcagctgacaacaaagataacgggacatggacccagctgtggctcgtcagtgaatatcacgagcagggttccctgtacgactacctcaatcggaatattgtgactgtggctggcatgatcaaactcgctttgagcatcgcaagcgggttggctcacttgcacatggagatagtcggaactcagggtaagcctgcaattgcccacagagatattaaatctaagaatatcctggtgaagaagtgcgaaacatgcgctattgccgatctcggccttgctgtaaagcacgacagcattcttaatacgattgatattccacaaaaccctaaagtaggcacgaagcggtacatggctcctgaaatgcttgacgacactatgaacgtgaatattttcgaatctttcaaaagggccgacatttattccgtgggcctggtgtactgggagatagcccgaaggtgcagcgtggggggcatcgtcgaagagtaccagctgccctactatgacatggtgccttctgatcccagcatagaggagatgcgtaaggtcgtctgcgatcagaaatttaggccctctataccaaatcagtggcagagctgtgaagccctgagagtgatggggcgtatcatgcgcgaatgttggtacgctaacggtgctgcgcgtcttacagctttgcggattaaaaaaacgatcagccagctgtgtgtcaaagaagactgtaaagcttag

SEQ ID NO: 177812 - DNA, 1512 bp, synthetic construct
  misc_feature 1..1512: note = Description of Artificial Sequence: Synthetic coding sequence
  source 1..1512: mol_type = other DNA
atgaccctgggcagcccccggaagggcctgctgatgctgctgatggccctggtcacacaaggggatcctgtcaaaccttctagagggcccctggtgacctgcacctgcgagtcgccccactgcaagggccctacttgccggggcgcatggtgcactgtcgtcctggtccgcgaggagggaagacacccgcaggagcatcgcggctgtggcaacctgcacagagagctatgtcgggggcgtccgaccgaatttgtgaaccattactgttgtgacagccatctgtgtaaccacaatgtcagtctggttcttgaagcgacacagcccccatcagagcagccgggtactgatggtcagctggctctgattctgggccctgtgcttgcactgttggctctcgtagcgctgggggtattgggcttatggcatgtgagacggcgccaggagaagcaaagaggcctgcactcagagctgggcgagtcatccctcattctgaaggcatccgaacagggcgattccatgctgggcgatctgctggattccgactgtacaaccggatctggctctgggctgcccttcctggtgcagcggaccgtcgccaggcaggtggctctcgtggagtgtgtgggaaaggggcgctacggagaagtgtggagaggcctctggcacggtgagagtgtggccgtgaagatcttctctagcagagacgagcaatcctggttcagggagacagagatttacaacactgtgctcctcaggcatgacaatatactcggcttcatcgcgagcgacatgacgagccgcaatagttcgactcagctgtggctcatcacccactaccacgaacacggcagtctttatgattttttacaacggcagacactggaacctcatctggctttgcggctggccgtgtccgctgcttgcgggctagctcacttgcacgtggaaattttcggaacacaaggcaaacctgccatagctcacagggactttaaaagtcgcaacgtgcttgtgaagtctaatctccaatgttgcattgcagacctgggcctggcagtgatgcatagccaggggtctgattatctggacataggcaacaacccacgggtggggacaaagcgctatatggcacctgaggtgctggatgaacagatcaggactgattgtttcgagtcctacaaatggaccgacatttgggcatttgggctagtcctgtgggagattgctaggagaaccatcgtgaacggtatagtcgaagattatcgcccccctttctacgatgttgtgcctaatgacccctcttttgaggatatgaaaaaagtggtatgcgtggatcaacagacacccacaatccctaatcggcttgcagctgatccagtgctcagtgggctggcccaaatgatgcgagaatgttggtatccaaacccatctgctcgcctcaccgccctgagaattaaaaagactctgcaaaagatctccaactcccctgagaaacctaaagtgattcagtag

SEQ ID NO: 177813 - DNA, 1512 bp, synthetic construct
  misc_feature 1..1512: note = Description of Artificial Sequence: Synthetic coding sequence
  source 1..1512: mol_type = other DNA
atgaccctgggcagcccccggaagggcctgctgatgctgctgatggctctggttacgcagggtgatccggtgaaaccttcacgcggcccgctagtgacgtgcacttgtgagtcgcctcactgcaaaggtcctacctgtcgaggcgcatggtgtacggttgtgctggtgagagaggaaggccgtcatccacaagaacatcgaggatgtggcaatttgcaccgcgagctctgcagggggaggcctaccgagttcgtcaaccactattgctgcgattctcacctctgtaaccataatgtgagcctggtgctggaggcaacgcagccacctagcgaacagcccggcaccgatggccaattagcactaatcctcggacccgtgctagctctgctagccctggtagctctgggggttctgggcctgtggcatgttcggcggcgccaggaaaagcagcggggcctccacagcgagctgggtgaatcttcgctcatcctgaaagctagtgagcagggcgactctatgcttggggatctgctcgactcagactgcacaaccggaagcgggagcgggctgccatttttagtccaaagaacggtcgccaggcaggtcgcgctcgtagagtgtgttggtaaaggccgatacggtgaggtctggagggggttgtggcatggagagtcagtggcagtgaagatcttttctagtagggatgagcaatcatggtttcgggagacggagatatataatactgtgttacttaggcacgataatatcctggggttcatcgctagcgatatgacttctcgcaacagttccacacagctctggctgatcactcactatcacgagcacggctcactgtatgatttcctgcagagacagacgctggagccacatcttgccctccgcttagccgtgtcagccgcttgcggcttggcccacctccacgtcgagatctttgggacccaaggtaagcccgcgattgcccacagggactttaagagccgaaacgtcctggtgaagtccaatctgcagtgctgcatcgccgatttaggacttgcagttatgcacagccagggctctgactatctagacattggtaataatcctcgtgtggggactaaacgctatatggcacctgaagtactggacgagcaaattcggactgattgttttgaaagttacaaatggaccgacatttgggccttcgggctggttctctgggaaatcgcccgacgcacaatcgtgaacggcattgtggaggactaccgaccccctttctatgatgtcgtacccaacgacccctcattcgaagacatgaaaaaggtagtctgcgtggaccagcagacaccaaccatccccaacaggctggccgccgatcccgtcttgagcggtttggctcagatgatgagagaatgttggtacccaaacccctccgcccgcctaaccgcgctgcgaattaagaagaccctgcagaagatcagtaacagccccgagaagccaaaagtaattcaatag

SEQ ID NO: 177814 - DNA, 990 bp, synthetic construct
  misc_feature 1..990: note = Description of Artificial Sequence: Synthetic coding sequence
  source 1..990: mol_type = other DNA
atggccctgaccccccccctgctgctgctgagcgccggcaccatgactttgggaagccctcggaaaggactgttgatgctgctgatggctctggtaacccaagggaagggacgttacggagaggtatggagaggcctctggcatggagagagcgtcgctgtcaaaatattttcctctagggatgaacagagctggtttcgggaaacggagatctataacacagtgctgctgcggcacgataatatcttgggtttcatcgcatcagacatgacaagtcgtaacagttcaacacagctctggctgatcacccactaccacgaacacggctccctctatgattttcttcagaggcagacactggagccacacttagcccttcgtctggccgtgtcagctgcatgcggtttggcccatttacacgttgagatttttggaacacagggcaagccagccatagctcaccgtgatttcaaatctcggaacgttctggtgaagtccaacctgcagtgttgcatagctgatctaggattagccgtcatgcactcccagggcagtgactaccttgatatcggcaacaacccacgagttgggacaaaacggtacatggctcccgaggtgttagacgagcagatacgcactgactgttttgaaagttataagtggacggacatttgggcctttggactcgtcttatgggagatagcccggagaacgatagtgaatggcatagtggaggattaccggcctcctttttacgacgttgtccccaacgacccctctttcgaggatatgaaaaaagtagtttgtgtcgaccagcagaccccgacaatcccaaacaggctggcggcagatccggttctgagcggccttgcgcagatgatgcgggagtgctggtacccgaatccctctgctaggctgaccgctctcagaattaagaagacactgcagaagatcagcaacagccccgagaaaccgaaggtaattcagtag

SEQ ID NO: 177815 - DNA, 480 bp, synthetic construct
  misc_feature 1..480: note = Description of Artificial Sequence: Synthetic coding sequence
  source 1..480: mol_type = other DNA
atggccctgaccccccccctgctgctgctgagcgccggcaccatgacattggggagtcctcgcaaggggctgctgatgctgctcatggcactggtaacacagggagacccagtcaagcctagccggggccctctggtgacgtgtacttgtgagagtccacattgtaagggacccacatgtcgcggagcctggtgtaccgttgtgttagtgcgcgaggaggggcgacaccctcaggagcaccgcggatgcggtaatttgcatcgcgaactgtgcaggggaagaccaacagagttcgtgaaccactattgctgtgacagtcacttgtgtaatcacaatgtgagtctggtgctggaaggcaaaggacggtatggagaggtgtggcgtgggctgtggcatggagaaagcgttgcagtgaagatttttagtagtagagatgagcagagttggttccgagagacagagatttataataccgtatag

SEQ ID NO: 177816 - DNA, 1554 bp, synthetic construct
  misc_feature 1..1554: note = Description of Artificial Sequence: Synthetic coding sequence
  source 1..1554: mol_type = other DNA
atggccctgaccccccccctgctgctgctgagcgccggcaccatgacacttgggagcccccgaaagggactactaatgctgctgatggccctcgtcacccaaggtgatcctgtcaagccgagtagaggaccattggtcacatgtacctgtgagagtcctcactgcaagggcccaacatgccggggcgcatggtgtaccgttgtgctggtgcgtgaagaagggagacacccccaagaacacagagggtgcggaaatctccaccgagaactgtgtcgggggcgccccactgagtttgtgaatcactattgttgcgacagtcatttatgcaatcacaatgtcagtctcgtactggaagccacccaacctcccagcgaacagcccggcacagacgggcagctcgctctgattctggggcctgtactggccctcctagcgctggtggccctgggagtgcttgggctttggcatgtgaggagacgccaagaaaaacagagaggcctgcactccgagctgggcgagtctagtctcatactgaaagcatccgagcagggcgattcaatgcttggcgacctactggattcagactgtacaacaggatcagggtcaggcctgccctttctggttcaacggaccgtcgctagacaggtagccctcgtggaatgcgtggggaagggtaggtacggggaagtttggagagggttgtggcatggagagtctgtcgcggtcaagattttctcatctagggacgagcagtcttggtttagagagactgagatatacaataccgttcttttgaggcacgacaatatacttggttttatcgcttcagatatgacatcccggaatagctccactcagctgtggctgatcactcattaccacgagcacggctctctgtacgacttcctgcagcggcagactctggagccccacctggctctgagactggcagtgagcgctgcctgcggcttagctcatctgcacgttgaaatcttcgggacccaaggaaagcccgccattgcacaccgggactttaagtcgagaaacgtgctggtaaaaagcaatctccaatgttgcatcgcagatttgggtctggctgttatgcattctcagggcagcgactacctagacatcggtaataatccccgagttggaactaaaagatatatggcccccgaagtgctggatgagcagatcaggaccgattgcttcgagtcgtacaagtggacggacatatgggccttcggcctggtgctatgggagatcgcacggcgcacaatcgtgaacgggatcgtcgaggactatcggccaccgttctacgacgttgtgcccaacgacccatcctttgaggatatgaagaaagtagtttgtgtcgaccagcagacgcccactatccccaatcgtctggcagccgatcccgtgctgtccggactggctcagatgatgcgcgagtgttggtaccctaatccaagcgcaaggctgacggccctgcggattaagaaaacgctgcagaagatctcaaattcccctgagaagccaaaagttattcaatag

SEQ ID NO: 177817 - DNA, 1530 bp, synthetic construct
  misc_feature 1..1530: note = Description of Artificial Sequence: Synthetic coding sequence
  source 1..1530: mol_type = other DNA
atggtggacggcgtgatgatcctgcccgtgctgatcatgatcgccctccccagcccaagcatggaggatgagaagccaaaagttaaccccaaactgtacatgtgtgtatgcgaaggtctgtcatgcggaaacgaggatcactgcgagggacagcaatgtttcagtagcctttctatcaacgacggctttcacgtgtatcaaaaaggttgctttcaggtatacgaacagggcaaaatgacctgtaaaaccccacctagccctggacaggccgtcgagtgctgtcagggggactggtgcaatagaaatattactgcccagctccctaccaaaggcaagtcctttcccggtactcagaactttcaccttgaggtcggattaatcatcctctccgtggtgtttgccgtgtgtctgctggcatgcctgctgggagtcgccctccgcaaattcaagcgccgcaaccaagagcggctcaatccacgcgacgtggaatatggaactattgaggggctcatcactacaaacgtcggcgactcaactctggccgatctgttagatcacagttgtacttcaggatctggctctggtctccctttcctggtccaacggactgttgctcgccaaataacactgttagagtgcgtgggaaagggcaggtatggtgaagtctggcggggttcttggcaaggcgagaatgtggccgtgaaaatcttcagctctcgagatgaaaaatcttggttcagggagaccgagctctacaacacggttatgctccgccacgagaacattctcggctttattgcctcagacatgacatctcggcactcttctactcaactgtggcttatcacacattatcacgagatggggtccttgtatgattacctgcaactgactactcttgatacggtatcatgtctgcgcattgttctttctatcgcctccggattggctcatctacacatcgagatattcggtacacagggcaaacctgccatcgcgcaccgtgatctcaagtccaaaaatattttagtgaagaagaatggccaatgttgcatcgcagatctgggcctggcagtgatgcactctcagtcgacaaaccagttagatgtggggaacaaccctcgagtgggaactaagcgctacatggcacccgaggtcctcgatgagactatccaggtggattgtttcgattcatacaaacgcgtggacatctgggcattcggattagtactctgggaggttgctcggaggatggtgtcgaacggaatcgttgaagattacaagcctccgttttacgacgtggtcccaaacgatccatctttcgaagatatgaggaaagtggtctgtgtggatcagcagagacccaatatccccaatcgctggttctcagacccgacactcactagcctcgccaagctgatgaaagaatgctggtaccagaacccttcagcccggctcaccgctctcagaattaaaaaaacattaaccaagattgataacagccttgacaagttaaaaacagactgctag

SEQ ID NO: 177818 - DNA, 1530 bp, synthetic construct
  misc_feature 1..1530: note = Description of Artificial Sequence: Synthetic coding sequence
  source 1..1530: mol_type = other DNA
atggtggacggcgtgatgatcctgcccgtgctgatcatgatcgccctcccaagtccaagtatggaggacgaaaaacctaaggttaatcccaagctatatatgtgcgtttgcgagggactcagctgtgggaatgaggaccactgcgaggggcagcagtgtttcagcagtctaagcataaacgacggattccatgtttatcagaagggatgtttccaggtgtacgaacaggggaagatgacctgcaaaactcctccaagtccggggcaggccgtcgaatgttgccagggcgactggtgtaatcgaaatatcaccgcacagctccccacaaagggcaagtctttccctgggacacagaatttccatttggaagtgggcctcatcatccttagtgtggtattcgcagtgtgtctcctcgcctgtttgctgggcgtcgctcttcgtaagttcaagaggcggaatcaggaaaggctgaacccccgggacgtagagtacggaactatcgagggactgatcacaactaacgtgggagactctacactggctgatctcctggaccattcctgcactagtggatcaggatctgggctgccattcctggtacagcggaccgtggcacgccagattaccctcttggagtgcgttgggaaggggcgctacggtgaggtttggcggggcagttggcaaggagaaaacgtcgcagttaagatcttttcctcccgagacgagaagtcttggttcagggagactgaattgtacaacaccgtgatgctgcggcacgaaaatattctgggttttatagcatccgatatgaccagcagacacagttccacgcaactctggctgattacccattatcatgagatgggttctttgtacgactatttgcagttgacaacacttgacaccgtgagctgtctccggatagtgctgagcattgccagcggactagcccacctccatatcgagattttcggaacccaaggtaaacctgctatcgcccatcgggatctgaagtccaagaacattctcgtgaagaagaacggccagtgctgtattgccgaccttggtttggctgtcatgcactcgcagtctaccaaccaactggatgttggcaacaacccacgcgttgggaccaagagatacatggcacccgaagttttagacgaaacgatccaggtagattgcttcgactcgtacaagagagtggacatctgggcatttggacttgttctctgggaggtggcaagacgcatggtctctaatggcatcgtggaagattacaaaccacccttctacgatgtggtgcctaatgaccctagctttgaggatatgcgcaaggtggtgtgtgtcgatcagcagcgcccaaatatccctaaccgttggttctccgatcccacactcacttctctggcgaagctgatgaaggaatgttggtatcagaatccatcagctcggctgaccgcgttgcgtatcaaaaaaactctgacaaaaatagataacagtttggacaagctcaaaaccgactgttag

SEQ ID NO: 177819 - DNA, 1530 bp, synthetic construct
  misc_feature 1..1530: note = Description of Artificial Sequence: Synthetic coding sequence
  source 1..1530: mol_type = other DNA
atggtggacggcgtgatgatcctgcccgtgctgatcatgatcgccttgcctagcccctctatggaagacgaaaagccaaaggtgaatcccaaactttacatgtgtgtgtgtgaaggcttatcgtgcgggaacgaagaccattgtgagggacagcagtgtttttcctcactgtccattaatgacggctttcacgtttaccaaaagggctgttttcaggtatacgaacagggtaaaatgacatgcaaaacacctccgagccccggccaggccgtggaatgctgccagggtgattggtgcaaccgcaatatcactgcccaactgcccactaagggaaaaagttttcctggaactcaaaattttcacctcgaagtgggactcataatcctgtctgtggtctttgccgtgtgcttgctcgcctgtctactcggggtcgcactgcggaaatttaaaagaaggaatcaggaacggctcaatccccgagatgtagagtacggcactatcgaaggcctgatcaccacaaacgtcggcgattcaacactggctgatcttctggatcactcatgtacctctggatcaggcagcggtttgccttttcttgtccagagaaccgtcgctaggcagattaccctcttagaatgcgtgggcaagggcagatacggcgaggtttggaggggcagctggcaaggcgaaaatgtagcagtaaagatattctccagcagggatgaaaagtcatggtttcgcgagaccgaactctataatacagtcatgctacggcatgagaatatcctggggtttatagcctcagatatgacctctcgccacagctcaactcagctgtggctgatcacacactatcacgagatgggatctctgtacgactatcttcagttaactactctggataccgtgtcatgtcttcgcatagtcctgtctatcgccagcggactcgcccacttacatattgagatctttggtactcaggggaagcccgccatcgcacaccgagatctgaagtctaagaacattcttgtgaaaaaaaacggacagtgctgcatcgcagaccttggccttgctgtgatgcattcccagagcacgaatcagctggacgtaggaaacaacccccgggtgggtactaaaagatatatggctcccgaagtgttagatgagacaatccaggtggactgcttcgactcttacaagcgggtcgacatttgggccttcggtcttgttctgtgggaagtcgctaggcgcatggtttctaatgggattgtggaggactacaagcctccattttatgatgtggtgcccaatgatcctagcttcgaagacatgcgcaaggtggtatgcgtcgatcagcagcgcccaaatattcctaataggtggtttagtgatccgactctcacctccttggccaaactgatgaaagagtgctggtatcagaatcccagtgctcggctgacagcgttacgcataaaaaagacactcacgaagatcgacaacagcttagataagttaaaaaccgattgttag

SEQ ID NO: 177820 - DNA, 264 bp, synthetic construct
  misc_feature 1..264: note = Description of Artificial Sequence: Synthetic coding sequence
  source 1..264: mol_type = other DNA
atggtggacggcgtgatgatcctgcccgtgctgatcatgatcgccctgcctagcccgtctatggaggacgaaaagcccaaagtgaaccctaaactgtatatgtgtgtttgcgaggggctttcctgcgggaacgaggaccactgcgaagggcagcaatgtttctcgtccctctcaattaacgatgggttccacgtgtaccaaaaaggttgctttcaagtctatgagcaggggaaaatgacctgtaaaacccctcccagcccttag

SEQ ID NO: 177821 - DNA, 66 bp, synthetic construct
  misc_feature 1..66: note = Description of Artificial Sequence: Synthetic coding sequence
  source 1..66: mol_type = other DNA
atggtggacggcgtgatgatcctgcccgtgctgatcatgatcgcccttccttctcctagcatgtag

SEQ ID NO: 177822 - DNA, 216 bp, synthetic construct
  misc_feature 1..216: note = Description of Artificial Sequence: Synthetic coding sequence
  source 1..216: mol_type = other DNA
atggtggacggcgtgatgatcctgcccgtgctgatcatgatcgccctaccctccccaagcatggaagatgagaagccaaaagtcaatcctaagctgtacatgtgtgtgtgcgagggtctttcttgcggaaacgaggatcactgtgaagggcagcagtgcttcagcagtctgtccattaacgatggctttcatgtgtaccaaaaagggtgtttttag

SEQ ID NO: 177823 - DNA, 1530 bp, synthetic construct
  misc_feature 1..1530: note = Description of Artificial Sequence: Synthetic coding sequence
  source 1..1530: mol_type = other DNA
atggtggacggcgtgatgatcctgcccgtgctgatcatgatcgccctaccttctcctagcatggaagacgaaaaacccaaagttaatccgaagctctacatgtgcgtttgtgagggcctatcatgtggcaatgaggaccactgtgagggtcaacagtgcttcagctctctgtctattaacgatggcttccatgtgtaccagaagggctgttttcaggtgtacgaacagggaaagatgacatgtaagactcccccgtctcctggacaagccgttgaatgctgccaaggcgactggtgcaatcggaacattacggctcagctcccaactaagggtaaatcatttcccggcacacagaattttcacctcgaggtcgggctgatcatcttaagcgtggtctttgctgtctgcctcctggcctgccttctgggggtggctctgcggaaattcaagagaagaaatcaggagaggctcaaccccagggacgtggaatacggaactatcgaaggcttgatcacaactaacgtgggagattctacacttgccgacctcctcgatcattcctgcacttccggctcaggctctggcctgccctttctggtgcagagaacagtggctcgacaaattaccctgctggaatgtgtaggtaagggaaggtatggggaagtgtggaggggaagttggcagggcgagaatgtggctgtgaaaattttttccagccgcgacgagaagtcctggtttagagagacggagctctacaacaccgttatgcttagacatgagaatattctcggcttcattgcgtccgatatgacctccagacactctagtacacaactctggcttatcactcactatcatgagatgggatctttatacgattatctgcagcttacaaccttggataccgtctcctgtctgaggattgtgctctcgattgcttcggggctcgctcatctgcatatcgaaattttcgggacacagggcaagcccgccattgcccatagagacctaaagagcaagaatatattggtgaaaaaaaatggacaatgctgtatcgccgacctgggactcgccgtcatgcactcccagtcaaccaatcaacttgacgtgggcaataaccctcgggttggcaccaagcggtacatggcccccgaggtgctggatgagacgattcaagtcgactgcttcgatagctataagagggtggacatctgggccttcgggttggttctgtgggaggttgccaggcgcatggtgtctaatggtattgtagaagactataagccacctttctatgacgtcgtgccaaatgatcccagctttgaggatatgagaaaggtggtctgtgtggatcagcagcgtcccaatatccctaatcgatggttctctgatcccaccctaacaagtttggctaagctaatgaaagaatgctggtatcagaatccctccgcacgcctcactgccctgagaatcaaaaaaaccttgacaaaaatcgacaattccctcgataagctgaaaactgactgttag

SEQ ID NO: 177824 - DNA, 264 bp, synthetic construct
  misc_feature 1..264: note = Description of Artificial Sequence: Synthetic coding sequence
  source 1..264: mol_type = other DNA
atggtggacggcgtgatgatcctgcccgtgctgatcatgatcgccctgccgtccccctcaatggaagacgaaaaaccaaaggtgaaccccaagttatatatgtgtgtgtgtgaggggctttcttgtggcaacgaggatcattgcgaagggcagcagtgcttcagcagcttgagcatcaacgacggatttcacgtctaccagaagggatgtttccaagtgtatgagcagggaaaaatgacctgcaaaacccctccctccccgtag

SEQ ID NO: 177825 - DNA, 222 bp, synthetic construct
  misc_feature 1..222: note = Description of Artificial Sequence: Synthetic coding sequence
  source 1..222: mol_type = other DNA
atggtggacggcgtgatgatcctgcccgtgctgatcatgatcgccttgccttccccatcaatggaggatgaaaagcctaaagtgaaccccaagctgtacatgtgcgtgtgcgagggattgtcctgtggcaatgaggatcactgcgaggggcaacagtgtttcagcagcttaagtattaacgacggcttccacgtgtaccagaagggctgttttcaagtctag

SEQ ID NO: 177826 - DNA, 1518 bp, synthetic construct
  misc_feature 1..1518: note = Description of Artificial Sequence: Synthetic coding sequence
  source 1..1518: mol_type = other DNA
atggccgagagcgccggcgccagcagcttcttccccctggtggtgctcctcctggctggcagcggtgggtccggtcctaggggagttcaggccctgctgtgtgcctgtacatcgtgtttacaggctaattatacctgcgaaacagatggagcctgtatggtgagcattttcaatttagatggcatggagcaccatgtgaggacttgcatacctaaggttgagcttgtgcccgccggaaaacccttctattgcctttccagcgaggacctgcggaacactcactgctgctacacagactattgtaaccgcattgatcttagagtgccctcaggacacctgaaggagccagaacatccatctatgtgggggccggtggagttggttggtatcattgcaggccctgtgttcttgttgttcctgatcataatcattgtctttctggtaataaactaccaccagcgggtataccacaatcggcagagattagatatggaggatccttcgtgcgaaatgtgtttatctaaggacaaaaccctgcaggatctggtttacgacctgagcaccagcgggtcaggaagtggacttcctctgttcgtacagcggacggttgcaagaacaatcgtattgcaggagatcatcggcaagggccgcttcggagaggtttggcgcggacgttggcggggaggcgacgtggcagtaaagattttctcttctagagaggaaagatcttggtttcgtgaggccgagatttatcagacagtgatgctccgacatgagaacattctcggatttatcgccgcagataataaggataatggtacttggactcaactgtggcttgtttcagattatcacgaacatggcagcctgtttgactacttgaatcggtatactgttacaatcgaggggatgattaagctggcactctctgcagcctccggtctggcccatcttcacatggaaatagttggcacccagggcaagcctgggatcgcccacagggatctgaagtccaagaacatcctcgtcaaaaaaaacggtatgtgtgccatcgctgacctcggcctcgctgtgaggcatgatgccgtgacggataccattgacattgctcctaatcagagagtagggacaaagaggtacatggcccccgaagtgctggatgagacgatcaatatgaagcacttcgactctttcaagtgtgccgacatctatgctctgggccttgtgtactgggaaatcgctagacgctgtaattccggaggagtgcatgaagaataccaacttccatattatgacttagtgccatccgatccaagcatcgaggaaatgcgcaaagtggtttgtgatcagaagctgaggcccaatatacccaactggtggcagtcatacgaagcgctgagggttatgggcaagatgatgagggaatgctggtacgccaatggcgccgctcgattaactgcgctgaggattaaaaagaccctaagtcagttgagcgtccaagaagatgtgaagatatag

SEQ ID NO: 177827 - DNA, 1464 bp, synthetic construct
  misc_feature 1..1464: note = Description of Artificial Sequence: Synthetic coding sequence
  source 1..1464: mol_type = other DNA
atggccgagagcgccggcgccagcagcttcttccccctggtggtgttgctgctggccggcagcggcgggagcggaccccgcggcgtgcaggctcttctttgcgcctgcacttcttgcctccaagccaactacacctgcgaaaccgacggagcctgcatggttagcatttttaatctggacggcatggaacatcacgtgaggacatgcatccccaaggtggagctcgttccagccggaaaacctttttactgcctgtcatccgaggacctgcggaacactcattgttgctacacagattactgcaatcgaatcgacctgcgcgtcccaagtggccacctgaaggagccagagcatccttcaatgtggggcccagtcgagttggttgggatcatcgcaggtccagtgtttctgctgttcctgataattattatagtgttccttgtgattaattatcatcagcgcgtgtaccacaaccgtcagagacttgacatggaagatccgtcatgtgaaatgtgtctctctaaagacaagactcttcaggacctggtgtacgacctctcaacttctgggagcgggagtggcttacctctcttcgttcagcggacagtggctaggaccatcgtactgcaggaaattatcggaaagggccggttcggagaggtttggcgcggccgatggcgaggcggcgacgtcgcagtgaaaattttttcatcccgagaagaacgctcatggtttcgtgaagccgagatataccaaactgtcatgttgagacatgaaaacatattaggctttattgcagccgataacaaggacaacggcacctggactcagctctggctggtcagcgattaccacgaacacggttccctgtttgactacctcaacaggtataccgttactattgagggaatgattaagctcgccctgagcgctgctagcgggctggcacacctccacatggagattgtagggacacaggggaagccggggattgctcatagggacttgaaatccaagaacatactggtgaagaaaaacggaatgtgcgctatcgctgaccttggcttagctgtaagacacgatgccgtaaccgacactattgatatcgccccaaatcagagggtcgggacaaagcggtacatggctccagaggtgctggatgaaaccatcaatatgaaacacttcgacagttttaagtgcgccgacatctacgccctgggactcgtgtactgggagatcgcccgccgctgcaacagtggcgggacgttcctcttttgtctttgctcttacctacccttccaggatgccggctccccaaaagctgtactgctgcctcctttcttcctgcagcccgtaggttgtttgctgcctgaaccagagagttcctttaaggttgccatcaaaggtgttgaagtcgctgtgttgagagttcgtttatttttccgggatcaattcgtggaatag

SEQ ID NO: 177828 - DNA, 1431 bp, synthetic construct
  misc_feature 1..1431: note = Description of Artificial Sequence: Synthetic coding sequence
  source 1..1431: mol_type = other DNA
atggccgagagcgccggcgccagcagcttcttccccctggtggtgctcctcctagcaggatctggcggcagtggccctcggggtgttcaagccctgctgtgtgcatgcaccagctgtttgcaggctaattatacatgcgaaactgacggtgcctgtatggtaagcatttttaatctcgatggaatggaacaccacgtgaggacatgcataccgaaagttgagctggtgcccgccgggaagccgttttattgtctgtcgtccgaggacctacgaaatactcattgctgttacacggactattgcaaccggattgatttgcgcgtaccctccggccacctcaaggagcccgagcacccttccatgtggggcccagtggaactcgtgggcatcatagctggacctgtctttctgctgtttctaattataatcattgtatttctagtaatcaattaccatcagcgtgtctaccacaaccgacagcgccttgacatggaggatcctagttgcgagatgtgcctcagcaaagataaaacgttgcaagatttggtgtacgatctgtcgaccagtggcagcggatcagggctgcctctgtttgtacaacggaccgttgcacggaccattgttcttcaggagatcatcggcaaggggaggtttggtgaggtgtggagggggcggtggcggggcggggacgtggccgtcaaaatcttttcaagtcgcgaggagcggtcttggtttcgggaggcagaaatctaccagaccgtaatgctgcgccacgagaacattctaggctttatcgctgccgacaataaagataacggaacttggactcagctctggctggtaagcgattatcacgagcacggcagcctcttcgactatttgaatcgctacaccgtgacaattgaggggatgattaagttggcactgtctgcggctagcgggctcgcgcaccttcatatggagatcgttgggacccagggcaagccagggatcgcacacagggatctcaagtctaaaaatatcttggtgaagaagaacgggatgtgcgctattgccgaccttgggcttgccgtcaggcacgatgcggtaacggataccatcgacatcgctcctaatcagcgcgtgggaactaagcggtacatggcccctgaggtgttagatgagactatcaacatgaaacatttcgattcattcaaatgcgcagacatctacgccctggggctggtctactgggaaatcgcaagaagatgcaattcagggggagtccacgaagaataccagttgccatattatgacctggttccatctgacccttcaattgaggagatgcgcaaggtagtttgcgaccagaagttgaggcctaacatccccaactggtggcagtcctacgaggttcggtcctggcctccagcagctttcccctcagcctag

SEQ ID NO: 177829 - DNA, 1641 bp, synthetic construct
  misc_feature 1..1641: note = Description of Artificial Sequence: Synthetic coding sequence
  source 1..1641: mol_type = other DNA
atggccgagagcgccggcgccagcagcttcttccccctggtggtgctgttgttggcgggctctggcggttcaggcccccgcggggtgcaggcccttctgtgcgcttgcacatcctgtcttcaggccaattacacttgtgagacagacggggcttgcatggtgtctatattcaaccttgacggcatggagcaccacgtcagaacctgcatcccaaaggtggagctggtgccggctggaaaacccttttactgcctcagcagcgaggatttacgcaacacgcactgctgttatactgactactgcaaccgcatcgacttgcgcgtgccttccgggcacctcaaggaaccagagcacccgagcatgtggggaccagtggaactagtggggattatcgcaggacctgtgttcctgctgttcctcattataatcatagtgttcctggtcataaactaccaccagcgagtataccacaatcgccagcggttagatatggaagaccccagctgtgaaatgtgcttaagcaaagataaaactctccaggacttagtgtacgacctgtccactagtgggtcgggcagcggactacccctgtttgtacagaggaccgtggcccggacgatcgtgctccaggagattatcggcaaaggccgatttggcgaggtatggaggggtaggtggcgaggtggagacgttgccgttaaaattttctccagcagagaggaaagaagctggttcagggaggcagaaatatatcagaccgttatgctgcggcatgaaaatattctgggcttcatagccgccgacaacaaggccgattgcagttttctaacactgccatgggaagtcgtaatggtaagcgctgctccaaaactgcggagtcttaggctccagtacaaaggcggaaggggaagagcgaggttcctttttccactgaacaatggcacttggacgcagttgtggttggtgtcagactaccatgaacatggtagcttgtttgactacctgaaccgatatactgtcactattgaagggatgattaagctggcattgtctgccgcctcgggactggcgcatttacatatggaaattgtggggactcaaggaaaacccggcatagcccaccgggacctgaagtccaagaatatcctggttaaaaaaaacggcatgtgcgcaattgccgacttaggtctggccgtgagacatgacgcagtgactgataccattgatattgcccccaatcagcgcgtgggcaccaaacggtatatggcccccgaggtgttagatgaaaccataaatatgaagcatttcgactcatttaagtgtgccgacatctacgctctgggcctcgtatattgggaaatcgctagacgctgtaactccggaggagttcacgaggagtatcagctgccttattatgatcttgttccgtccgatccatcgattgaggaaatgcggaaagtggtatgtgatcaaaaactgcgtccaaacatccccaactggtggcagtcctatgaggcattaagggttatggggaagatgatgcgcgaatgttggtatgccaatggcgccgcccgcctgaccgccttacggatcaagaagaccctaagccagttgtctgtgcaggaggacgtcaagatctag

SEQ ID NO: 177830 - DNA, 1362 bp, synthetic construct
  misc_feature 1..1362: note = Description of Artificial Sequence: Synthetic coding sequence
  source 1..1362: mol_type = other DNA
atggtgagcatcttcaacctggacggcatggagcaccacgtgcggacctgcatacccaaagtcgagctggtgccggcaggtaaacctttttattgtctgtcctccgaggatttgcgaaatactcattgctgctacacagattactgtaacaggatcgacttgagggtgccctccggacaccttaaggaaccagaacatccctcaatgtggggacccgtggagttggtgggaatcatcgctggacctgtgttcctgctgtttttaatcattattatcgtgtttctggtaataaactaccatcagcgtgtttatcataacagacagcgattggacatggaagatccttcctgtgagatgtgtctgtccaaggataagaccctgcaggatcttgtctatgatcttagtacttccggctccgggagcggactgcctttgttcgtacagcgtaccgtcgcccgaactatagtcttgcaagagatcatcggcaaggggcggttcggggaggtatggcgaggccggtggagagggggcgacgtggcagtgaagatcttttccagccgagaggagagatcatggtttcgggaggctgagatctatcaaactgtgatgctgcggcacgagaatatactggggttcattgcggccgataacaaagacaatggaacatggacacagctgtggctggtgtctgattatcatgaacacggctccctgtttgattatttgaacagatataccgttacaattgaaggcatgattaagctcgccctcagcgccgcctcaggattggcccacttgcatatggagatcgtcggaacacagggcaagccaggaattgcccaccgggacctaaagtctaaaaatattctcgtgaaaaagaacgggatgtgcgcaatagcagacctcggactggctgttcgtcacgacgctgttacagatacaatcgacattgctccaaaccagcgggtcggcaccaaaaggtacatggccccggaggtgttagatgagacaatcaatatgaaacatttcgactcctttaaatgtgctgatatctacgcgctgggattggtttactgggaaattgctcgacgatgtaatagcggcggtgtgcacgaggaatatcagctgccctattacgatttagtgccaagcgatccctccattgaggagatgcgcaaagtggtctgtgaccagaagctgagaccgaatatccccaactggtggcagagctacgaggctctgagagtgatgggaaaaatgatgcgggagtgttggtacgcgaacggagccgctaggctgaccgccctgcgcatcaaaaagacgctttcccagttgtccgtgcaggaagatgttaaaatctag

SEQ ID NO: 177831 - DNA, 1482 bp, synthetic construct
  misc_feature 1..1482: note = Description of Artificial Sequence: Synthetic coding sequence
  source 1..1482: mol_type = other DNA
atgacccgggccctgtgcagcgccctgcggcaggccctgctgctgctagctgcggctgctgaattgtcacctggactaaaatgtgtatgcttgctatgcgactcctcaaatttcacttgtcagaccgaaggcgcttgctgggcctccgtgatgttaaccaacggcaaggaacaggtgatcaagagctgcgtatccctgcctgaactgaacgctcaggttttttgccacagcagcaacaacgtgaccaagactgaatgttgtttcacggatttctgtaataatattactctgcacctgccaaccgctagccccaacgctcctaagctgggaccaatggaactggccatcattattacagtgccggtgtgtctcctcagcatcgccgccatgttgactgtctgggcctgccaaggccgccagtgtagttatcgtaaaaagaagcgcccaaacgttgaggagcctctgagtgagtgtaacctcgttaatgctggtaaaaccctaaaagatctcatctacgacgtgactgcctcaggatctggctccggcctgcctctgttggttcaacggaccatcgcccgtactatagtgctccaggagattgtcgggaaaggccgctttggggaagtgtggcatggccgttggtgcggagaagatgtggccgtgaaaatattctcatcccgagacgagcgcagttggtttagggaggcagagatatatcaaaccgtcatgcttcggcatgagaacatcctgggattcatcgctgcagataacaaggataatggcacttggacgcaactgtggttggtgagcgaataccatgaacaggggtccctgtatgattatctcaaccgaaacatcgtaacagttgctggcatgatcaagctggcactcagtattgcaagtggactcgcgcatcttcacatggaaattgtaggcacacagggaaagcccgcgattgcccatagggacatcaagagcaagaacattctggtgaagaagtgcgagacctgtgcaatcgcggatctgggacttgctgtgaaacacgatagcattctcaacactatagatattccccagaatcccaaggtcgggacaaagaggtatatggcccctgagatgctggacgacaccatgaatgtcaatatttttgaaagttttaaacgcgccgatatctacagcgtgggtctcgtgtattgggaaattgcacgaaggtgttcagtcggagggatcgttgaggagtatcaacttccctattatgacatggtcccgtccgatccctccattgaagaaatgaggaaggtggtttgtgatcagaaatttagaccctcgatacctaatcaatggcagtcttgcgaagcgctgcgcgtcatgggaaggatcatgcgagaatgctggtacgcaaacggcgccgctcgcctgacagcactgcgcatcaagaagaccatttcccaactctgtgttaaggaggattgtaaggcttag

SEQ ID NO: 177832 - DNA, 1242 bp, synthetic construct
  misc_feature 1..1242: note = Description of Artificial Sequence: Synthetic coding sequence
  source 1..1242: mol_type = other DNA
atgacccgggccctgtgcagcgccctgcggcaggccctgctgctgctagctgcggcagcagagctgtcacccggtcttaagtgcgtgtgtttactctgcgacagttcaaattttacctgtcaaacagaaggcgcctgttgggcttctgtcatgctcacgaacggcaaagaacaggtaattaagagttgcgtatccctgcccgagctgaatgcgcaggttttttgtcacagctcgaacaatgtcacgaagaccgagtgctgctttacagatttttgtaacaacatcaccctacatctgcctacaggactgccactcctggtacaacggactattgctaggaccatcgtgcttcaggagatcgttggcaaaggacgttttggcgaggtgtggcatggtagatggtgtggtgaggatgtggccgtgaagatcttttcttctagggatgaacggtcctggtttcgggaagcagagatataccagacagtgatgctgcgccacgagaacatcttggggtttatcgctgctgacaacaaagataacggaacgtggactcaactgtggctggtttctgaatatcacgaacaaggttccttgtatgactatctgaacagaaacattgtaacagttgccggaatgataaagctcgccctgtccatcgcctctggcctcgcccatcttcatatggagatcgtgggcacgcagggtaaaccagccatcgctcaccgggacattaagtcaaagaatatcttagttaagaagtgtgagacctgcgctatagcagacctcggcctggccgtgaaacacgactcaatactgaataccatcgacataccacagaatcccaaagtcgggacaaaacggtacatggccccagaaatgttagacgacactatgaacgtgaatatctttgaatcattcaaaagggcggatatctattccgttggcctggtatactgggagattgccaggagatgttctgtgggagggatcgtggaggagtatcagttgccgtattatgatatggtaccatcagatcctagtattgaagagatgagaaaggtggtttgtgatcaaaagttcaggcccagcataccaaaccaatggcaaagttgcgaagccctcagggtcatgggccgcataatgagggaatgctggtatgccaacggagcagcccggttaacagcgctccggatcaagaagactatctcccagctatgtgttaaggaggattgcaaagcctag

SEQ ID NO: 177833 - DNA, 1011 bp, synthetic construct
  misc_feature 1..1011: note = Description of Artificial Sequence: Synthetic coding sequence
  source 1..1011: mol_type = other DNA
atgacccgggccctgtgcagcgccctgcggcaggccctgctgctgctggcagctgcggcagaactgtcacccggcctgaagtgcgtatgtctattgtgtgactctagcaacttcacttgtcagaccgagggagcatgttgggcctcagtgatgttgaccaacggaaaggaacaggttattaagtcatgcgtctctctgcctgaactgaacgctcaggtgttctgtcatagttccaacaacgtgaccaaaacagagtgctgtttcaccgacttttgtaacaatataacactgcacctgcctaccgataacggcacttggacacaactgtggttggtatcagagtaccacgagcaaggctcactctacgattacctgaacaggaatatcgtgacagtggcaggcatgatcaagctggcactgtctatagccagtggtttggcacacctccatatggagattgttggaacccaaggaaaacctgcgattgcccaccgcgacattaaaagtaagaacatacttgtcaagaagtgcgagacctgcgccattgcagacctgggacttgctgtgaaacatgacagcattcttaatacaattgacatcccccagaacccgaaagtagggaccaaacgctacatggcaccagaaatgctggacgataccatgaacgtgaacatatttgagtctttcaaacgcgcggatatctactcggtgggcttagtgtactgggagatcgccaggcgatgttctgttggaggtatcgtggaagaatatcagctgccgtattatgacatggtgccatcagatccatctatagaggagatgcggaaagtcgtgtgcgatcagaaattccgcccatcgatcccgaatcaatggcagtcttgcgaggccctgagggtgatgggacgaattatgcgcgaatgttggtatgccaatggcgccgcccgcttgaccgcactgaggatcaaaaaaacaatctctcagctgtgtgttaaagaagactgtaaagcatag

SEQ ID NO: 177834 - DNA, 1542 bp, synthetic construct
  misc_feature 1..1542: note = Description of Artificial Sequence: Synthetic coding sequence
  source 1..1542: mol_type = other DNA
atgggcgccgccgccaagctggccttcgccgtgttcctgatcagctgttcaagcggagctatactgggccgtagtgagacacaggaatgcttatttttcaacgccaattgggagaaagatcggaccaatcagaccggcgttgagccttgctacggcgataaagataaaagacgacattgttttgctacctggaagaacatcagcggctctatcgagatagtaaaacagggatgttggcttgacgatattaattgttacgatagaacggactgcgtggaaaagaaagactctccggaagtttacttctgctgctgcgagggaaacatgtgcaatgagaaattctcatacttccctgagatggaagtgacccagcctacaagtaatcccgtgacgcctaagcccccatattataacatactgctgtatagtctcgtgcctttaatgctcatagcaggaattgtaatttgcgccttttgggtttaccggcaccacaagatggcctatccgcctgtgttggtcccaacacaggatcctggtcctcccccaccttctcccctcttaggactgaagcccctgcaactgctcgaggttaaagcgcgcgggcgatttggatgtgtgtggaaggcgcaactgctcaacgagtacgtcgcagtcaagattttccccatccaggacaaacagagctggcagaacgagtacgaagtttactcactacccggcatgaagcacgagaacatcctccaatttatcggcgcggagaagcggggcacatctgtagatgtcgatttgtggctgataaccgcgtttcatgagaaaggttccctctcggacttcctgaaggccaacgtggtgagctggaatgagctttgccacattgctgagactatggcccggggcttggcatacttgcacgaagatatacctggcctgaaggatggacacaaaccggctatctctcatagagatatcaaatcaaagaacgtgttactaaaaaacaatctgacggcctgtatcgcagatttcggcctagctctgaagtttgaggccgggaagtcagcgggagatacccatggacaggtgggcactagaagatacatggctcctgaggtcctagaaggcgcgattaactttcagcgtgacgcttttctgcgcatagatatgtacgccatgggcttagtactctgggagctggcctcaagatgtacagcggctgacggcccagttgacgagtacatgcttccgttcgaggaagagatcggccagcacccttcactggaggatatgcaggaggtggtggtccacaagaagaaacggccggtcctccgggattattggcaaaaacacgcaggaatggccatgctgtgtgagactattgaggaatgctgggaccatgatgccgaagctcgattgagtgccggttgtgttggcgagcggatcacccagatgcagagacttacgaacatcataaccaccgaagatattgtcaccgttgtgacaatggtgaccaacgtggacttcccccctaaggaatctagcctctag

SEQ ID NO: 177835 - DNA, 1542 bp, synthetic construct
  misc_feature 1..1542: note = Description of Artificial Sequence: Synthetic coding sequence
  source 1..1542: mol_type = other DNA
atgggcgccgccgccaagctggccttcgccgtgttcctgatcagctgctctagcggagcaatactggggagaagtgagacccaggagtgcctgttctttaacgctaactgggagaaggatcggacaaaccagaccggcgtagaaccttgctatggagacaaggacaagaggaggcattgtttcgccacttggaaaaacatctcaggctccatcgagattgttaagcaaggttgttggctcgacgacatcaactgttatgatcgtacagactgcgtggagaagaaagactcccccgaggtgtacttctgttgctgtgagggtaacatgtgcaacgaaaaatttagctattttcccgaaatggaggtgacgcaaccaacgagcaaccccgtgacgccaaagcccccttattataacatcctgctgtactctctggtccctctgatgctgattgccgggatcgtgatctgcgcattctgggtataccggcaccataagatggcatatcctcccgttttggtgcccacacaggatccggggcctcctccaccaagcccgctgttaggtctgaagccacttcaactcctcgaggtcaaagcgaggggacgctttgggtgcgtgtggaaggcgcaactgctgaatgagtatgttgcggttaagattttccctatccaagataaacagtcatggcagaatgagtatgaggtgtattctctcccagggatgaaacatgaaaacattctccagtttataggcgcagagaagagaggaaccagcgtcgacgttgacctatggctgataacggcctttcacgaaaagggcagtcttagcgacttcctcaaggctaatgtggtttcttggaatgagttatgtcatatcgccgagactatggccaggggacttgcctacttgcatgaggatattcctggtcttaaggacggccataaacccgctattagccaccgggacatcaagtcaaagaatgtactgttaaaaaataatttaaccgcttgcatcgccgacttcggtctggcccttaaatttgaggccggtaaatctgccggagacactcacggccaggtggggaccagacggtatatggcccccgaagtcctcgagggggccattaacttccagcgtgatgccttcctgcgcatagacatgtacgctatgggcttagtactgtgggaactagcctccagatgtactgctgcggacgggccagtggacgagtacatgctgccattcgaggaggaaataggacagcacccctcactggaggatatgcaagaggtcgtagtacacaagaaaaaaagacctgtcctccgggattattggcagaaacacgccggaatggcgatgctctgtgagaccattgaagagtgctgggatcacgacgcggaggcccgcctcagtgctgggtgcgtgggcgagagaattacacaaatgcagcggctgaccaatatcattaccactgaagacattgtcacagttgttactatggtcacaaacgtggacttccctcccaaggagtcttccctttag

SEQ ID NO: 177836 - DNA, 1218 bp, synthetic construct
  misc_feature 1..1218: note = Description of Artificial Sequence: Synthetic coding sequence
  source 1..1218: mol_type = other DNA
atgtgcaacgagaagttcagctacttccccgagatggaggtgacccagccgacttctaatcccgtcacacccaaaccaccatattacaatattttactatacagtctggtgccactgatgctgattgctggcatcgtaatttgtgccttctgggtatataggcaccataagatggcctatcctcctgtcttggtacctacacaagatcctggtccaccaccccccagtccgttactggggctcaagccactccagttgctggaggtcaaggctcgcggtagatttggctgcgtttggaaggcccagcttctgaatgagtatgtcgcagtgaaaatttttcctatacaggataaacaatcatggcaaaacgaatatgaggtttactcgctccccggcatgaagcatgagaacatactgcaatttataggagcagaaaagcggggtacatcagttgacgtcgatctgtggctgattactgcatttcacgagaaaggaagcctttccgacttcctcaaggcaaacgtggtcagctggaatgaactgtgtcatatcgccgagaccatggctagaggtctggcctacctgcacgaagacattcctggcctcaaagacggccataagccggccatttcccatagggacatcaaaagcaagaacgtgctgcttaaaaataacctgacagcctgtatcgctgacttcggccttgcccttaaattcgaagcagggaagtccgctggcgacacccacggacaagtgggaacaagaaggtatatggcaccggaagttctcgagggggccattaatttccaacgggatgcttttctgaggattgacatgtacgcaatgggcctggtgctctgggagctcgcatcacgctgtacagcggccgacggacctgtggacgagtatatgctaccatttgaggaggagatcggccaacacccaagtctcgaagacatgcaggaggtggtggtgcacaaaaagaagcgaccagtcttacgtgactattggcagaagcacgccgggatggcaatgctatgtgaaaccatcgaagagtgctgggaccacgatgccgaggccaggttatccgctggttgcgtcggtgagaggatcactcagatgcagcgcctcaccaacataatcaccaccgaagacatcgtcactgtggttaccatggtcactaatgtggacttccctccaaaggaaagttctctatag

SEQ ID NO: 177837 - DNA, 1539 bp, synthetic construct
  misc_feature 1..1539: note = Description of Artificial Sequence: Synthetic coding sequence
  source 1..1539: mol_type = other DNA
atgaccgccccctgggtggccctggccctgctgtggggcagcctgtgtgccggttccggaagaggggaagccgagacaagagagtgcatttattacaatgctaattgggaactcgaacggacaaatcaatccggcctggaaagatgtgagggcgaacaggataaaagacttcattgctatgcatcttggcgtaactcgtccggaactatcgagctcgttaagaagggctgttggctcgacgattttaattgctatgaccgacaggagtgtgttgcgacagaagagaaccctcaggtctacttttgctgctgtgaaggcaacttttgcaacgagcggttcactcatctccctgaagcaggcggtcccgaggtcacatacgaaccaccgccgaccgcaccaactcttctgaccgtactggcttactctttattgcctataggtggtctgagccttattgtactgttggcgttttggatgtacagacatcgaaaaccaccttacggacacgttgacatccatgaggacccaggccctcccccaccctcccctctggtaggcctgaagccgctgcagcttttggagataaaggcaagggggagattcggctgcgtgtggaaagcacagcttatgaacgactttgtagctgtcaaaatatttccgcttcaagataagcaatcttggcagtcagagagggaaatttttagcacacccggaatgaagcacgagaacctgctgcagttcattgcagccgagaagaggggatccaacctcgaagtagaactttggctgatcaccgccttccatgacaaaggaagcttaaccgactacctcaagggtaacattatcacttggaatgagctttgtcatgtcgctgagacaatgagtaggggactcagttacttacatgaggacgtcccgtggtgcaggggggagggccacaagccgagtatcgcccaccgggactttaaatccaagaacgtgcttcttaaatctgacctgaccgccgtcctcgccgacttcggcttggcggtgagatttgagccaggcaaaccaccaggcgacactcatggtcaggtgggcactcgcagatacatggccccggaagtgctggagggcgcaattaacttccagagggacgcatttttaagaattgatatgtacgccatggggctcgtgctgtgggaactcgtgtcacgatgcaaggccgctgatggccctgtagatgagtacatgctcccctttgaggaagaaatcggacagcatccttcgctagaggagctccaggaggtcgtggttcacaagaaaatgcgacccactattaaagaccactggctcaaacacccaggtcttgcccagctctgcgtgacaattgaagagtgctgggaccatgacgcagaagctaggctcagcgccgggtgtgtagaggaacgagtgtcgctaattagacgcagcgttaacgggacaacaagcgattgtctcgtttctctcgtgacctcagtgacaaacgtcgatctccctccaaaggaaagttcgatctag

SEQ ID NO: 177838 - DNA, 1191 bp, synthetic construct
  misc_feature 1..1191: note = Description of Artificial Sequence: Synthetic coding sequence
  source 1..1191: mol_type = other DNA
atggagctggaccaccggaccagcggcggcctgcacgcctaccccggcccccgtggaggtcaagtggcgaagccaaacgtgatcctgcagattggtaagtgcagggccgagatgctggagcacgttcggcgaactcatcgccacctcctggccgaagttagcaaacaagtggaaagggaactgaaagggctccatcgcagtgtgggcaaactagaatccaatctggatggctacgtgcccacaagcgactcccagaggtggaagaaatcgatcaaggcctgtctgtgtcggtgccaggagactattgccaacctcgaaaggtgggtgaaacgagaaatgcacgtttggcgggaggtgttctataggctcgaacgatgggccgataggctcgaaagtacaggagggaagtaccccgttggctctgaatccgcgaggcacaccgtttcggtcggagtaggcggtcctgagagctattgccacgaagcagacgggtacgattatacagtcagtccctatgccatcacacccccacctgctgcaggagaacttcctggacaagagccagccgaggctcagcagtaccagccttgggtgcctggagaggacggtcaaccctcgccgggggtggatactcagatcttcgaggatccacgggagttcctttctcatttggaggaatacctgcgtcaagtgggcgggtccgaagagtactggcttagtcagatccagaatcacatgaatggcccagccaaaaagtggtgggaattcaaacaaggctctgtgaagaattgggtggaatttaaaaaagagtttctacagtattctgagggaactctgagtcgcgaggctatccaaagggaactcgatcttccccaaaagcagggggaacccctggaccaatttctatggcggaagagggacctgtatcagaccctgtatgtggacgcagacgaggaggagattatccagtacgtggtgggaactttgcaaccgaaactgaaacgattcctcagacaccccttaccgaagaccttggaacagttgatccagcgtggtatggaagtacaagatgacctcgagcaggcagctgaaccagccgggcctcaccttccggtagaagacgaagctgaaacgctgactcctgcaccgaattcggagtcagttgccagtgataggacgcagcctgagtag

SEQ ID NO: 177839 - DNA, 1587 bp, synthetic construct
  misc_feature 1..1587: note = Description of Artificial Sequence: Synthetic coding sequence
  source 1..1587: mol_type = other DNA
atggccgccgtgctgaacgccgagcggctggaggtgagcgtggacggccttacgctgtcacccgatcccgaggaaaggcccggcgcggagggggcacccctgctcccaccaccacttccccctcccagccctcctgggagcggaagagggcctggggcctctggcgaacagccagaaccaggtgaagccgctgcagggggcgccgccgaggaagcgcggagacttgagcaaaggtggggctttggcctggaggagctctacggtttggctctccgtttttttaaggagaaggatggtaaggccttccatcccacttatgaagaaaagttgaagctggtggccttgcacaaacaggtgctcatggggccctataatccagacacttgcccagaggtgggttttttcgacgtcctgggcaacgatagacggagggagtgggccgccctgggcaacatgtccaaggaggatgccatggtcgaattcgtcaaacttttgaacagatgctgtcaccttttctccacctacgtggcttcccacaagatcgagaaggaggagcaggaaaaaaaacggaaagaggaagaagagcgccgtagaagggaagaggaggagagagagagactccagaaggaggaagagaagcggaggagagaggaagaagaacggcttcgcagagaagaagaggagcggagacggatagaggaggaacggctgaggttagagcaacagaagcaacagataatggctgcattgaatagccagaccgccgttcagtttcagcagtatgcagctcagcagtatcctgggaattacgagcagcaacaaatcctgattaggcagctccaggaacagcattaccagcaatatatgcagcagctctatcaagtgcagttggcccagcagcaggccgcgttgcagaaacagcaagaggtggtagtggctggaagctcactccccaccagttcaaaagtcaacgcaactgtcccttctaatatgatgagtgtaaatgggcaggctaagacacatactgattcgtccgaaaaagagctggagcctgaagctgctgaggaggccctggagaacggccctaaggagtcccttcctgtgatcgccgccccatccatgtggacacgtccacagatcaaggacttcaaggagaagatccagcaagacgcagattctgtaataaccgtaggacggggggaagtggtaactgtgcgggttccaacacacgaagagggatcctatttgttctgggagttcgccactgacaactatgatattgggtttggcgtgtatttcgagtggaccgacagccccaatactgcagttagcgtacacgtgtctgagtcttccgatgatgacgaggaagaagaggaaaacatcggctgcgaagagaaggccaagaagaatgccaataaacccctcttagacgaaatcgtgcctgtgtaccgcagagactgccatgaggaagtgtatgccgggtcccaccaatatcctggaagaggtgtttaccttctgaagttcgataacagctactcgctatggagaagcaagagcgtttattacagagtctactatacccgttag

SEQ ID NO: 177840 - DNA, 2343 bp, synthetic construct
  misc_feature 1..2343: note = Description of Artificial Sequence: Synthetic coding sequence
  source 1..2343: mol_type = other DNA
atgaagcccggcgccaccggcgagagcgacctggccgaggtgctgccacagcataagtttgatagcaagtcccttgaagcttatctgaatcagcatctgtctgggttcggcgccgagagggaggccaccctgaccatcgcccagtatcgcgctggtaagagcaatccgactttctatcttcagaaaggcttccagacatatgtgcttcgcaagaagcctcccggatcccttctccctaaggcacatcagatcgatcgcgaattcaaagttcagaaggcccttttttccattggctttccggttcccaagcctattctgtattgcagcgatacgtcagtaatcggtacagaattttatgtcatggagcatgtacaggggaggatctttagggacctaactataccgggattgtcacccgctgaacgctcagccatctacgtggctactgtggagaccctcgcgcaactacgcagtctgaacatacagagtctacaactggaaggttacggaataggtgccgggtactgcaagagacaagtgtccacttggactaagcagtatcaagctgctgctcaccaggatattccagccatgcagcaactgtccgagtggctgatgaagaacctcccagacaatgataacgaagagaatctaattcacggagactttagactcgataacatcgtgttccatccaaaagaatgtcgggtgatagctgtgctagattgggaactgtcgacaattgggcacccactcagcgacctcgcgcacttttcattattctatttttggcctcgcactgtgcccatgatcaaccaaggcagttattcagagaactccggaattccatccatggaagaattaatctctatctactgtcggtgtaggggaatcaacagcatcttgcccaactggaacttttttcttgcactctcttactttaaaatggctggcattgcacagggagtctattccaggtatctgctaggtaacaacagtagcgaagattcgttcctgttcgcgaacatcgtgcagcccttggctgagacaggactccagctgtccaagcgcacatttagcacagtcctgcctcaaatcgatactaccggccagttgtttgtgcagacacgcaaaggccaagaagtgttgataaaggtgaagcacttcatgaagcagcacattcttccagctgagaaggaagtcaccgagttttatgttcagaatgagaattcggtcgataaatggggcaagcctcttgtgattgacaagcttaaggagatggccaaagttgagggcctatggaatctgttcttgcctgccgtttcaggcctttcccacgtggactacgcactgattgctgaagaaacaggaaaatgctttttcgcgcccgacgttttcaactgtcaggctccagataccgggaatatggaggtcctccacctgtatggttctgaagagcagaagaagcagtggttggaacccctgctccagggtaacatcacctcttgtttttgcatgacagaacccgatgttgctagctccgatgcaaccaacattgagtgcagcatacaaagggatgaggatagttacgtgatcaacggaaaaaagtggtggtcaagtggcgcaggtaaccccaagtgcaaaatcgcaattgtgcttggccgaacacagaacacctctttgtccaggcataagcaacactccatgatcctggtacccatgaacacccccggcgtgaagataatccggcccctgtctgtgtttgggtatacagataactttcatggaggacatttcgagatccactttaaccaggtccgggtgccagccacaaatctgattttaggagaggggcgcggattcgagatttcacaggggagactgggccccggtcgcattcatcattgtatgaggacagtgggtttagccgagagggctttgcagattatgtgcgaacgggctacccagcggatcgcttttaagaaaaagttgtatgcccacgaagtcgttgcccattggattgccgagtcgcgcatcgccattgaaaaaatccgtctccttacccttaaagccgctcattctatggacaccctgggatcggccggcgccaaaaaagagatcgctatgataaaagtagcagccccaagggctgtttctaagatcgttgactgggccatccaggtgtgcggcggggccggcgttagccaggactatccactcgccaacatgtatgccatcactagggttctgaggctcgccgacggcccagatgaagtccacttatccgctattgcgaccatggaactgcgggaccaagctaagaggttaaccgcgaaaatctag

SEQ ID NO: 177841 - DNA, 2031 bp, synthetic construct
  misc_feature 1..2031: note = Description of Artificial Sequence: Synthetic coding sequence
  source 1..2031: mol_type = other DNA
atgaagcccggcgccaccggcgagagcgacctggccgaggtgctgccccagcacaagttcgattccaaatcactggaggcatacctgaaccagcatctctctggttttggggccgagcgcgaggccaccttaactatcgcccagtatagagcaggtaaaagcaatcccacattctatcttcagaaagggtttcaaacatacgtgttgaggaagaaaccgcccgggagtctgctgccaaaagctcaccagattgatcgcgagtttaaagtacagaaagcactcttctctatcggttttccggtgcctaagcctatcctctactgctccgatacttctgtgattggcacagagttttacgtaatggaacatgtacaggggcggatcttccgagacctcactattccaggcctgagtccagctgagaggtctgccatctatgtcgcgacagtggaaacccttgctcagctgagatcgctgaatattcaatccctgcagctggaaggttacggtatcggggctggatactgcaagaggcaggtttccacgtggactaagcagtaccaggcagccgcgcatcaggacatacctgccatgcagcaactgtcagagtggctaatgaaaaatcttccagacaacgataatgaggaaaatcttatacacggggacttcaggttagataatattgtattccatccaaaggagtgtagagtgatcgctgtattggactgggagctcagtacgatcggccatcctctgagtgatcttgcccatttttccctgttctacttctggccgcgaactgtgcctatgatcaaccaggggtcatactcagagaacagtggaattccaagcatggaggaattgattagtatctactgcagatgtcggggaattaattcaattctgccaaactggaactttttcctcgcacttagctattttaaaatggctggtatcgctcagggcgtctacagcagatacctgcttggcaataattcctccgaggattcattcctcttcgccaatatagtgcagccactggccgaaaccgggctgcagctgagcaaaagaacattttccacagtgcttccccagattgacacaactggccagctgtttgtccagacgcggaaagggcaagaggttctcatcaaggtgaagcatttcatgaaacagcacatcttgccagccgaaaaagaggtgactgagttttacgtccagaacgagaactccgttgataaatggggtaagcctctggtcatagacaaactaaaagaaatggcgaaggtcgagggcctctggaatctgttcttacccgcggtgtctggactgtcgcatgtcgactacgccctgatcgccgaagagactggcaaatgtttcttcgcacccgatgttttcaactgtcaagctccagacacaggcaacatggaggtgctgcatctctacggcagcgaagaacaaaagaaacaatggctcgagcctctccttcagggtaatattacgtcttgcttctgcatgactgagcctgatgtcgcctcatctgacgctacaaacattgagtgttcaatccagcgcgacgaagacagttatgttattaacggaaaaaagtggtggtcatcaggggccggaaaccctaagtgcaagatcgcaatcgtccttggccgtacccagaacacgtcactatcccgtgaagtcgttgcgcattggattgccgagagcagaattgccatcgaaaagatacgactgctgactctgaaggccgcgcattccatggatactctgggatctgccggcgcaaagaaagagatcgctatgattaaagtagctgctcccagagcagtgagcaaaatcgtagattgggcaatccaggtgtgtggtggggctggcgtgagccaggactatccccttgctaacatgtatgcgattacgcgagtgcttcgcctggcagatggcccggatgaggtgcatctttccgccatcgctaccatggaactgcgggatcaggctaaaagactgaccgccaagatctag

SEQ ID NO: 177842 - DNA, 918 bp, synthetic construct
  misc_feature 1..918: note = Description of Artificial Sequence: Synthetic coding sequence
  source 1..918: mol_type = other DNA
atggaggtgctgcacctgtacggcagcgaggagcagaagaagcagtggctggaaccgctcctgcagggtaacatcacaagttgtttttgcatgaccgagcctgacgtcgccagtagtgacgccaccaacattgagtgctcgattcaaagggatgaggactcatacgttatcaatgggaagaagtggtggtctagcggggccggtaatccgaagtgcaagatcgcaatagtcctggggcgaactcagaatacttccctaagccggcataagcagcacagcatgatcctggtgcccatgaacacccccggcgtaaaaattatcagaccattaagcgtgtttggctataccgataacttccatggaggccacttcgaaattcatttcaaccaggtgagagttcctgccacaaatcttatcttaggcgaaggccgcgggtttgagataagccagggaaggctggggccaggtcgaatacatcattgtatgagaacggtcggcctggcggagcgcgctctccaaattatgtgtgagcgcgccacccagcgaatcgcgttcaaaaagaagttatacgcccacgaagtggtggcccactggatcgccgagtctagaatcgccatcgagaagatccgtctcctgacattaaaggctgcacactccatggacactcttggttccgctggggctaagaaggagattgctatgattaaagttgccgcaccgagagccgtgtctaaaatcgtagattgggcaatccaggtatgcggtggggcgggagtgagccaagactaccctcttgcaaatatgtacgccatcacgcgagtcttgcgactggctgatggaccagacgaggtccacctgtctgccatagctacaatggagcttagggaccaggctaagcgccttaccgctaagatatag

SEQ ID NO: 177843 - DNA, 1248 bp, synthetic construct
  misc_feature 1..1248: note = Description of Artificial Sequence: Synthetic coding sequence
  source 1..1248: mol_type = other DNA
atgctgtggagcggctgccggcggttcggcgcccggctgggctgccttcctggggggctcagagtgctcgtgcagacaggtcacaggtccctgacctcttgtattgatccatcaatgggactgaacgaggagcagaaggaatttcagaaggtagcctttgacttcgccgcacgagaaatggcacccaatatggctgaatgggaccagaaagaactgtttcctgtcgacgttatgcggaaggctgcccaattaggattcggtggcgtgtatatccagactgacgtgggcgggagcggactgagcagattagacaccagcgtcatctttgaggcacttgccaccggctgtacctctactaccgcatatataagtatccacaatatgtgcgcctggatgatcgactcttttggaaacgaagagcaaagacacaaattctgtccccctctttgtaccatggaaaagtttgcctcctactgtctcaccgaacccggatctgggagcgatgcagcctctctcctgacctctgccaagaagcagggagatcattatatcctaaacggcagtaaagcgttcatttctggcgccggggaatccgatatctatgtcgttatgtgtcgaaccggcgggccgggacccaagggcatatcctgtattgttgttgaaaaggggacccctggtctcagttttgggaagaaggaaaagaaggtgggttggaatagccagccgaccagggccgttatctttgaagattgtgctgtcccagtggcaaaccgcattggcagtgaaggccaggggttcctgatcgctgtgcgcgggttaaacggcggaaggatcaatattgcttcatgctccttgggcgcagctcatgcctccgtgatcctgacacgggaccatctcaacgttaggaagcagttcggtgaacctctggcgtccaaccaatatctgcaatttactctggcggacatggcgacgcggctcgtcgccgcgcgtctcatggtcagaaacgctgcggtcgcactgcaagaagaacggaaagacgccgttgcgctctgctccatggctaaacttttcgctactgacgaatgctttgctatatgcaaccaggccttgcaaatgcatggggggtatggctatctaaaagattacgccgtgcaacagtacgtacgagactcccgggtacaccaaattctggagggcagcaacgaggtgatgcggattctaatatcccggagtctgctgcaggaatag

SEQ ID NO: 177844 - DNA, 1074 bp, synthetic construct
  misc_feature 1..1074: note = Description of Artificial Sequence: Synthetic coding sequence
  source 1..1074: mol_type = other DNA
atgcggaaggccgcccagctgggcttcggcggcgtgtacatccagactgatgtagggggtagcgggctttcccgactggacacatccgttattttcgaggcgctcgccactgggtgtacctcaacaacggcttatattagcatccacaatatgtgtgcctggatgattgactcctttgggaacgaggaacagcgccacaagttttgtcccccattgtgtacaatggagaagttcgcatcatactgcctgacagaacctgggtctggctcggatgcagcatctttgctgacatctgctaagaagcaaggagatcactacatccttaacgggtcaaaggcctttatcagtggagctggcgagagtgacatctatgtggtgatgtgtcggacggggggccccggaccaaaggggatctcctgcatcgtagtggaaaaggggactccaggactgagcttcggcaaaaaggaaaaaaaggtgggctggaacagtcaacctactagagctgtgatctttgaggactgcgccgtccccgtggccaaccgaattggctcagagggccagggattcctgatagccgtgcgaggcctaaacggaggacggataaacatcgcgtcatgctctctcggagccgcccacgcatcagtcattcttacgcgcgaccacctgaatgtgcgaaaacagttcggcgaacccttagcttctaaccagtacctgcagtttaccctggccgatatggccaccaggttggtggctgctcgactgatggtccgaaacgccgctgtggctctgcaagaagagcgcaaagatgcagtagccttatgcagcatggcaaaactgttcgcgactgacgagtgctttgctatttgtaaccaggctttacaaatgcacggcgggtatggctacctgaaagactatgccgtgcagcagtacgtgagagacagtcgcgtgcaccaaatcctcgaggaactgttctggcagggtcctggggtgcagagccgaagctttgttcctttcgggggcccccagattgcattgctattgccatttagcagtggagatctgagagagggctag

SEQ ID NO: 177845 - DNA, 819 bp, synthetic construct
  misc_feature 1..819: note = Description of Artificial Sequence: Synthetic coding sequence
  source 1..819: mol_type = other DNA
atgggcctgaacgaggagcagaaggagttccagaaggtggccttcgatttcgccgcccgggagatggctccaaacatggccgagtgggaccagaaggaactgtttcccgtggatgttatgcgcaaggcagcgcagcttggattcgggggagtgtatatccagaccgacgtgggtggttcgggtttgagtcgactagatacaagcgtgatttttgaggccctggcaaccgggtgcacttctaccactgcatacatcagcattcataacatgtgtgcctggatgatcgacagtttcgggaacgaggaacagagacataagttctgtccgcccctgtgcactatggaaaagtttgcttcctattgcctcactgaacctggttcagggagtgacgcagcgagtctgctgaccagcgcaaaaaagcagggcgatcactatatcctgaatggatcaaaggcatttatcagcggagcgggcgaatctgatatttacgttgtgatgtgcaggaccggcggtcctgggcctaagggcatttcatgcatagttgtcgagaagggtactcccggacttagtttcggaaaaaaggagaaaaaagttggatggaacagtcaacctacccgggccgtcatctttgaggattgcgccgtgcccgttgccaaccgtatcggttcagaaggacaaggattcctcatcgccgtgcgaggtctcaatggaggccgtatcaatatcgctagctgttcccttggctgtcctcgtctctgtcaccctcacccaaggcctccccaatgtcccgaagcagtgtggcgagcttcagggcaatag

SEQ ID NO: 177846 - DNA, 681 bp, synthetic construct
  misc_feature 1..681: note = Description of Artificial Sequence: Synthetic coding sequence
  source 1..681: mol_type = other DNA
atgaagagccggaagaacttcaagaagtggcccctgaccctgctgccagagcgctggctccagatctggcaatctggaacgcggagtatgtgtgcttggatgatcgacagctttgggaacgaggaacagagacacaagttctgtcctccattatgcaccatggagaagttcgcttcctattgcctgacggaacccgggagcggctccgatgctgcatctcttctcacctccgccaaaaaacagggggaccattacatcttgaacgggagtaaagcctttattagtggagctggggagtcagatatttacgtggtcatgtgccgtaccggagggccaggtcccaaagggatctcctgcattgtggttgaaaaggggacccctggcttaagttttggcaaaaaggaaaagaaggtggggtggaattcccaaccaacccgagcagtgatcttcgaggactgcgctgttcccgtagctaacagaataggaagcgaaggacaggggtttctcattgctgtaaggggattaaacggcggacgcatcaacatcgctagctgttccttaggagccgcacatgcaagcgttatcttaactagggaccatcttaacgttaggaagcaattcggcgagcctctggcatctaatcaaaaaaagcaggagacccttaaactgtggatcacctag

SEQ ID NO: 177847 - DNA, 1866 bp, synthetic construct
  misc_feature 1..1866: note = Description of Artificial Sequence: Synthetic coding sequence
  source 1..1866: mol_type = other DNA
atgagcggctgcggcctgttcctgcggaccaccgccgccgcccgggcttgcagggggctggtggtaagcacagctaaccgtagattgcttcgcacgtcaccacctgtgagggcatttgccaaggagctctttctcggaaagatcaagaaaaaagaagtgttccccttcccagaggtatctcaagacgagctcaacgaaattaaccaatttttaggccctgtagaaaagttcttcactgaggaggtggacagcagaaagatcgatcaagaagggaaaatacccgacgagaccttagaaaagctcaaaagcctgggcctcttcggcctacaggtgcctgaagaatacggaggtttagggttctccaacaccatgtacagcaggctgggcgaaatcatctcaatggacggatcaataactgtaaccttggcagctcaccaggcaattggtctcaagggcatcatcttggctggtaccgaggagcagaaagccaagtatttaccaaaattggccagtggagagcatatcgctgcattttgtctcacagagcccgcttcagggtcggacgccgcgtcgattcgcagtagagccactctgtcagaggacaagaagcactatattcttaatggctctaaagtgtggataacaaacggcggtctggccaatatctttacagtgtttgctaagactgaagttgttgactccgatggaagcgtcaaagacaagattacagctttcattgtggaacgagatttcgggggcgtgacgaatggcaagcccgaggacaagctcggtatcagaggatccaatacatgtgaagtccacttcgaaaacactaagatccctgtagagaatatcctgggagaagttggtgacgggtttaaggtagccatgaacatcctgaacagcggacgatttagtatggggagtgtggttgctggcctcctcaaacggttgattgagatgactgcggagtacgcttgcactcggaaacaattcaacaagaggctgtcagagttcggcctaatacaggagaaattcgccctgatggcgcaaaaagcctatgtcatggagtcaatgacctacctcaccgctggtatgctggaccaaccaggatttcccgattgtagcatagaggccgcaatggtcaaagtattcagttccgaagctgcttggcagtgcgtctcagaggctctgcaaatcttaggagggcttgggtacacaagagattacccatacgaacggattttacgagatacccggattcttctgatttttgagggcacaaatgaaattttacgcatgtatatagcgttaactgggctgcagcacgccggtaggattctgacaactaggattcacgagctcaagcaggctaaggtgtcgaccgtcatggacaccgtgggacgacggctgcgagacagcctagggagaactgtggatctgggactgacgggaaatcacggggtcgttcacccatcactggcagactctgccaacaagttcgaggaaaatacatactgttttgggaggaccgttgagacactcctgcttcgcttcggcaaaactatcatggaggagcagctggtcttgaagagggtcgccaacattctgattaacttatatggtatgactgcggttctttcacgcgcatctcgctcaatacgcattggtttgcgaaaccacgaccatgaggtgctgctcgctaacactttttgcgtagaagcctacctgcaaaacctctttagcctgagccagttggataagtatgcccctgagaacttggatgaacagatcaagaaagtgtcacagcagatccttgaaaagcgtgcctacatttgtgcccaccctctagacaggacctgctag

SEQ ID NO: 177848 - DNA, 1467 bp, synthetic construct
  misc_feature 1..1467: note = Description of Artificial Sequence: Synthetic coding sequence
  source 1..1467: mol_type = other DNA
atggacggcagcatcaccgtgaccctggccgcccaccaggccatcggcctcaaaggcatcattcttgcgggcacagaagagcagaaggccaagtatttacccaagttggcctccggcgagcacatagcggccttctgcctcactgagcccgcaagcggctctgatgccgcatccattaggagtcgagcgacactgtctgaggacaagaagcactatatccttaacggcagcaaggtatggataactaacggaggcttagccaacatatttactgtttttgccaaaactgaagtggtggacagcgatggatccgtcaaggacaagattactgcattcatcgtggaacgggactttggcggagtgacaaatggtaagcctgaggataagctggggattcgcggatcaaacacctgcgaagtccactttgagaataccaaaatccccgtggagaacattctcggtgaggtgggggatggcttcaaagtggcaatgaacatcttgaattccggaaggtttagtatgggctccgtggtggccggactccttaaacggctaatagaaatgacagctgaatatgcgtgcacacggaaacaattcaacaaacgtctgtcagaattcggactgatccaggagaaatttgcgctgatggcacaaaaggcctatgtcatggaatcaatgacctacctaacggccggcatgctggatcagccggggtttcctgattgctcgatagaggcggcaatggtcaaagtgttctctagtgaggcagcttggcagtgcgtgagcgaggcgctgcagattctcggcggcctgggctacactcgcgactacccatatgaacggatcctgagggatacaaggatcctcctgatattcgagggcaccaacgagattctcagaatgtatatcgcgcttacagggctccagcatgctgggagaattctgacgacacgtattcacgagctgaagcaggcaaaggtgagcaccgtgatggacactgtgggcagacgattaagggattctcttggtcgcacagtggatttgggcctgactggcaatcatggcgttgtccacccctcgctggcagacagtgcaaacaaattcgaggagaacacatattgcttcggcagaacagtggagactctacttttgagattcgggaagacaatcatggaagagcaactggttctgaagcgtgtcgctaatatcttaattaatctttatggaatgaccgccgttttgtctcgcgcctcgcgtagcatccgcatcgggctaagaaaccacgatcatgaagtgctcctggccaacacattttgcgtagaggcctatctccaaaatctctttagccttagccagctggataagtatgctcccgaaaatttggatgagcaaattaaaaaagtgagccagcagattttggaaaagagggcctacatctgcgcccatcctttggatcggacatgttag

SEQ ID NO: 177849 - DNA, 507 bp, synthetic construct
  misc_feature 1..507: note = Description of Artificial Sequence: Synthetic coding sequence
  source 1..507: mol_type = other DNA
atggaggagcagctggtgctgaagggcggccagcacccccaccagcctgtctggcacgatggacgcgccgtggccggccagcctctgcatccccactgggccccccagccccgtccccggggctcactggggcagcacctgctccgaggatcactgctggctgagagtttacagccactgagtgccggtcaggtgtgcagtcgcaaaccgcggtccaggttgcgcaaatgcccatcccggagtctaagaagtgagcctatttccgtgccaactctttggacaggccacgccgagagggggcagtgccccctgcttccacctgccccaacccatggccccttgttagacgactgttattcattcttcaggcgtctaggccttagtcaggtcaagccttttgtaccccgactgcatctcaaagggtgtcgtctagcctgggaaagtttgtttcaggtgttgacctgccggcagtgtagtctgacaggccctagccagctcctgaactag

SEQ ID NO: 177850 - DNA, 1239 bp, synthetic construct
  misc_feature 1..1239: note = Description of Artificial Sequence: Synthetic coding sequence
  source 1..1239: mol_type = other DNA
atggccgccgccctgctggcccgggccagcggccccgcccggcgggcgttgtgccccagggcttggcgtcagctacatacaatctaccagtccgtggagctgcccgaaacccaccagatgctgctgcagacatgtcgggattttgccgaaaaggaactcttccctatagctgctcaagttgacaaggagcatctgttccctgctgcccaggtgaaaaaaatgggaggcctaggactcttggccatggatgtgccagaggagcttggtggtgcgggcctcgactacttagcctacgctattgccatggaggaaatttccagggggtgcgcgagcacaggcgtaataatgtccgtgaataactcactgtacttaggcccaatcctgaagtttggcagcaaagagcagaaacaggcatgggtgactccctttactagcggcgacaaaataggctgtttcgccctgtctgagcccggcaatgggtctgatgccggagcggcgagcaccaccgcccgcgctgaaggcgacagctgggtgctcaatgggacaaaagcttggattacgaatgcttgggaagcaagcgcggccgtggtgttcgcatccaccgaccgtgccctgcaaaataagggtatttctgcttttctagtcccaatgcccactccagggctcactcttggcaagaaggaggataaactggggattcgaggaagctccacagcaaatctgatattcgaggactgcagaatccccaaggatagcattttgggtgaacccggcatgggcttcaaaattgctatgcagaccctggacatgggacggatcggaattgcctcccaggctctaggcatagcccagactgccttggattgtgctgtgaactatgcggagaatcgcatggccttcggagctcctctcacaaaactgcaggtgatacagtttaagcttgcagatatggcactcgcacttgagagcgcaaggcttctgacctggagagctgccatgctcaaagacaacaaaaaacctttcataaaagaggccgccatggctaagctggcagcctccgaggccgcgacggctatctctcatcaggctatacagattctgggggggatgggatatgtaacggagatgcccgcggagcgtcattatcgcgacgcgcgcataactgagatttatgagggaacctccgagatccagcgtctcgtcatcgctggtcacctcctgaggtcatacagaagctag

SEQ ID NO: 177851 - DNA, 1365 bp, synthetic construct
  misc_feature 1..1365: note = Description of Artificial Sequence: Synthetic coding sequence
  source 1..1365: mol_type = other DNA
atggccgccggcttcggccggtgctgccgggtgctgcggagcatctcgagatttcactggaggagtcagcataccaaggcgaatagacagagagagcctggcctgggttttagctttgagttcactgaacagcaaaaagaatttcaggctaccgccagaaagttcgctcgagaagagatcatcccggtggctgcagagtacgataagaccggggaatatcctgtgccattgatccgccgcgcttgggagcttgggctgatgaatacccatatccctgaaaattgcgactatagcgtgtgtcccctattagaggcctgtactttatatttggacgctttttttcttctcttaactggcagcaacctgaacctgcacttaaacctgggtggactcggactggggacgttcgatgcttgtctcattagtgaagagctggcttacggctgcactggagtgcagaccgccattgagggaaactctctgggtcaaatgcccatcatcatcgctgggaacgatcagcagaaaaagaagtacctcggtcgaatgactgaagaaccactgatgtgtgcctactgtgtaactgagcccggggccggtagcgacgtcgccggtatcaaaacaaaggccgagaagaaaggggacgagtacattatcaacggccaaaaaatgtggatcactaacggtggcaaagccaattggtactttctcctagcgagatccgatcccgatccaaaggcccctgccaacaaggcctttactggattcatagtagaggccgacacacccgggattcagattggtcggaaggagcttaacatgggacagcggtgttctgacactaggggaatcgtgttcgaggacgttaaagtcccaaaggagaacgtgctaataggggacggtgcaggttttaaagtggccatgggagcattcgacaaaacgcgacctgttgtggctgctggtgccgtaggtctagcacagcgcgccttagatgaggccacaaaatacgcactcgaaagaaaaactttcggtaagctactggtggagcaccaagccatctctttcatgttagctgagatggccatgaaggttgagttggcacgcatgtcttatcagcgtgccgcctgggaagtcgacagcggccgccggaacacgtactatgcttcaatagccaaggcgttcgccggggatatcgcaaatcagctggccacagacgcagtacagattctaggtggtaacggctttaacaccgaatatcccgttgaaaaactcatgagagacgcaaaaatttatcaaatttacgaaggtacctctcaaatccaaagattaattgtcgccagagaacatattgacaagtataagaactag

SEQ ID NO: 177852 - DNA, 1266 bp, synthetic construct
  misc_feature 1..1266: note = Description of Artificial Sequence: Synthetic coding sequence
  source 1..1266: mol_type = other DNA
atggccgccggcttcggccggtgctgccgggtgctgcggagcatcagccgttttcattggcgcagtcaacataccaaggccaacagacaacgggagcctgggttgggtttttcgtttgaatttaccgagcaacaaaaggagttccaggctaccgctaggaagtttgcaagggaagagattatccctgttgcagcagagtacgataaaactggcgagtaccccgttcccctgatccgacgggcatgggagctgggcttaatgaacacacatattcccgaaaactgtggcggcttgggattaggcacattcgacgcatgcctaatcagcgaggaactcgcctatggttgcaccggggtccaaacagccatagaaggaaattccctgggccagatgcccataatcattgctgggaacgaccaacagaagaaaaagtatctgggccgcatgactgaggaacctcttatgtgcgcttactgtgtgaccgagcctggtgccggcagcgacgtggcgggtatcaagactaaggcggagaagaagggtgacgagtacattatcaatggccaaaaaatgtggattacaaatggaggcaaggccaactggtacttcctcctggcaagatcagatcccgacccgaaggctcccgcgaacaaggcattcaccggatttattgtggaagctgatacccctggtatccaaatcggacggaaggagttgaatatgggtcagcgctgctctgacactcggggcatagtttttgaagacgtcaaggtgccaaaggagaatgtcctaattggcgacggggccggctttaaagttgccatgggcgcattcgacaagaccagacctgtagtggccgccggggcagtggggctggcgcagagggcgctggacgaggctaccaaatacgccctggaacggaagacctttgggaagttattggtcgagcatcaggctatttcctttatgctggcagagatggcaatgaaggtcgagttggctcgcatgtcttaccagagagcagcttgggaagtggattctggccgacgtaacacatattacgcctccattgccaaggcgttcgccggcgacatagcaaaccagctcgcaactgatgctgttcagatattggggggtaatgggttcaacactgagtaccctgtggaaaagttgatgagggatgcaaagatataccagatctacgagggcacatctcaaatccaacgtcttatagtggcccgggaacacatcgacaagtacaagaactag

SEQ ID NO: 177853 - DNA, 1278 bp, synthetic construct
  misc_feature 1..1278: note = Description of Artificial Sequence: Synthetic coding sequence
  source 1..1278: mol_type = other DNA
atggccgccggcttcggccggtgctgccggtgcagcctgcaggtgttacgatccatctccaggttccattggcggtcccagcatactaaagcaaatagacagcgcgagccagggctcgggttttctttcgaattcacagagcagcaaaaagaatttcaggcaactgcacgaaagtttgctcgtgaggagattattcctgtggcagcggaatacgacaagacgggggagtacccggtcccactaattcgtcgggcatgggaactcggactaatgaatactcacattccagagaactgcggcggcttagggctgggcaccttcgacgcctgccttatatccgaagagctagcctatggatgcactggagtgcagaccgccatcgaaggcaactcccttggtcaaatgccaatcattatcgcaggcaatgaccaacagaagaagaagtacctcgggcgcatgacggaagagccccttatgtgtgcttactgcgtaacagagccaggggccgggtcagacgtggctggcatcaagaccaaagctgagaagaaaggcgacgagtacatcatcaacggacaaaagatgtggatcacaaacgggggcaaggcaaactggtactttctgctggcacggtcagatcccgaccctaaagctccggctaacaaagcctttactggcttcatagtggaggccgacactccaggaatccagattgggagaaaagaattgaatatgggccagagatgttccgatacccgggggattgtgttcgaagatgtaaaggtccctaaagagaacgtcctcattggcgatggtgctggttttaaagtggcgatgggggcattcgataaaacacggccagttgtcgctgctggggccgttggccttgctcagcgcgccctggacgaagcgacgaaatacgccctagaaagaaagaccttcggtaaactgctggtggaacaccaagccatctcattcatgctcgctgagatggccatgaaagtggaactggctcgtatgtcataccagcgggctgcgtgggaagtcgattccgggcgtcggaatacctactatgcttctattgccaaagcattcgccggggacatagccaaccagcttgcaaccgacgcggtgcagatcctgggcgggaatggtttcaataccgagtatcctgtggagaaactgatgcgcgatgccaagatatatcagatttatgagggcaccagccagattcagaggcttattgtggcaagggaacacatcgataagtacaagaattag

SEQ ID NO: 177854 - DNA, 1158 bp, synthetic construct
  misc_feature 1..1158: note = Description of Artificial Sequence: Synthetic coding sequence
  source 1..1158: mol_type = other DNA
atgctgcaggagttcaccgagcagcagaaggagttccaggccaccgcccgcaagttcgctagggaggagatcatccctgtcgccgcggaatacgacaaaaccggagaatatccagtgcctcttatcagaagagcgtgggagctcggactgatgaacactcacatccctgaaaactgtgggggcctggggctcggcaccttcgacgcgtgtcttataagcgaagagttggcctatggttgtactggagtgcagacggcaatagagggcaactccttaggtcaaatgccaattattatcgcaggcaacgatcagcagaaaaaaaaatatcttggcagaatgaccgaggagccgcttatgtgtgcctattgtgtaaccgaacccggcgccggatctgacgttgcaggcattaagaccaaagctgaaaaaaaaggagatgagtacataattaacgggcaaaagatgtggatcactaacggcgggaaagccaattggtactttctcctcgccaggagtgaccctgatccaaaagcaccagcaaataaagcattcaccgggttcatcgtagaggctgacactcccggaatacagatcgggcggaaggaactgaacatgggacaacgatgctcggacacaagaggcatcgtattcgaggacgtgaaagtgcctaaggaaaatgttctgatcggcgacggtgccggcttcaaggtcgccatgggggctttcgataaaacacgccctgtggttgcggccggtgccgtgggcctggcgcagcgggctttagatgaggcaaccaaatatgcgctggagcggaaaacttttggcaaacttctcgtagagcatcaggctatctcttttatgctggcagaaatggctatgaaggtcgagctagctcgcatgagttaccagagagctgcctgggaagtggattctggtagacggaacacatactacgccagtattgccaaggcctttgctggcgacatcgccaaccagttggcaacagacgcagttcaaattttgggcgggaacggttttaataccgagtaccctgtggaaaagctcatgcgcgatgctaaaatctatcagatttacgaagggacgtctcagatccagaggctcatcgtggcaagggaacatatcgacaagtacaagaattag

SEQ ID NO: 177855 - DNA, 699 bp, synthetic construct
  misc_feature 1..699: note = Description of Artificial Sequence: Synthetic coding sequence
  source 1..699: mol_type = other DNA
atgtggatcaccaacggcggcaaggccaactggtacttcctgctggcaagatcagaccccgatcctaaggcaccggccaataaagccttcaccgggtttatcgtggaagccgacactcccggcattcaaatcggccgcaaagaacttaatatggggcagaggtgttctgataccagggggatagtgttcgaggatgtcaaggttcccaaagagaacgtcctcataggagacggcgctggatttaaggtagctatgggcgccttcgacaaaacaagaccagtggttgccgcaggcgctgtcggcctggctcagcgcgcccttgatgaggccaccaagtacgctctcgagaggaagacctttggaaagctcctggtggagcaccaggcaatctcattcatgctcgccgagatggccatgaaggttgagctggcgcgaatgtcctaccagcgcgccgcgtgggaggtcgactctggccggaggaatacctattatgcatctatcgccaaagcctttgccggcgacatcgctaatcagcttgctaccgatgccgtccagatattggggggaaacggcttcaatacagagtacccagtcgagaagcttatgcgcgacgctaagatctaccagatctacgaaggaacttcacaaatacaacgcctgatcgtcgcacgcgaacatattgataaatacaaaaactag

SEQ ID NO: 177856 - DNA, 1446 bp, synthetic construct
  misc_feature 1..1446: note = Description of Artificial Sequence: Synthetic coding sequence
  source 1..1446: mol_type = other DNA
atggacggcgccgtgatggagggccccctgttcctgcagagccagcggttcgggactaaaagatggcgaaagacctgggctgttctgtatccggcctccccccacggagtagcgaggctagaattcttcgaccataagggttcaagcagtgggggtggaagggggtccagtaggaggcttgattgtaaagtcatccggctggctgaatgcgtgtctgtcgcacccgttacagtggaaacaccccctgaaccgggagccactgcattccggttggataccgctcaacggtcccacttgctcgctgccgatgctccatccagtgccgcgtgggtgcagactctgtgtcgtaacgcctttcccaaaggcagctggacactggcgccaacagataatcctcctaaattgtctgcattagaaatgctcgagaacagtctgtattccccgacatgggaaggatctcagttttgggtgaccgtgcagcgaaccgaggcggccgagaggtgcggcctccacgggagctacgtcctccgagttgaggcagagcgactgaccctgctgaccgtgggtgcccaatcacagatccttgagccccttctcagttggccatatactctgttgaggcgctatggtcgcgataaagtgatgttcagttttgaggcaggcagacgatgcccatcaggccccggtacatttacctttcagactgcacaaggcaacgacatctttcaggcagtggaaactgccatccacagacagaaggctcaggggaaagctgggcagggtcacgacgtcctccgcgctgacagccacgagggtgaggttgccgagggaaaacttccgagccctcccgggccacaggaactcctggactcgccaccggcactgtacgcggaacctttggattccttgagaattgcaccatgcccatcccaggacagcctttactcggaccctttggattccactagtgcccaagctggcgaaggagtacagagaaaaaagcccctctactgggacctctacgaacacgctcaacagcaacttctgaaggccaagcttactgacccaaaagaggaccccatctatgatgagcctgaaggtctggccccagtgcctccacaggggctgtacgatctgccccgtgaacccaaggatgcttggtggtgccaggctcgggtcaaagaggagggatacgagttaccatacaaccccgcaactgacgattacgcggtacctccccccagatcaactaagccgttgctagcccctaaaccgcagggccctgccttccccgaaccgggaacggccacagggtctggaatcaaatctcacaacagcgccctatattcacaggtgcagaaatcaggcgcttccggcagttgggattgcggcctttcacgggtaggcaccgataaaacaggcgtaaaatccgaaggctccacttag

SEQ ID NO: 177857 - DNA, 1299 bp, synthetic construct
  misc_feature 1..1299: note = Description of Artificial Sequence: Synthetic coding sequence
  source 1..1299: mol_type = other DNA
atggagggcctggccgtgcggctgctgcggggcagccggctgctgcgccggaattttctcacctgcctaagttcttggaaaattccacctcacgtcagtaaaagttcgcagtccgaggcactcctcaacattaccaataacggcattcattttgcacccctgcaaacatttaccgacgaggaaatgatgataaaatcttcagtgaagaaattcgcccaggaacagattgcccctctagtctccacaatggatgagaacagtaagatggaaaagtcggtcatccaggggttatttcagcaaggactgatggggattgaggtggacccggaatatggaggcacaggcgcgtcctttctgagcaccgtgctggttatcgaagagcttgccaaagtggacgctagcgtggccgtgttctgcgaaattcagaatacgctgataaatacactgatacgcaagcatgggacagaagagcagaaagctacttaccttccacagctgaccaccgagaaggtcgggtctttttgcctgtccgaggcgggagccggaagtgacagctttgccctgaaaacaagggccgacaaagagggcgactattacgtgcttaatggctctaagatgtggatttctagtgctgagcatgcaggcctcttcctggtgatggccaacgtggatcctaccatcgggtataaagggataaccagcttcctggtcgatcgggatacacccggactgcatatcgggaagcccgagaataaactgggcctgcgcgcatcctccacttgcccactgacttttgagaacgtgaaggtgccagaagccaatattctcggacaaatcggccacggatataaatatgccattggttcactgaacgaggggcgcattggcattgcggcacaaatgctgggtctggcccagggatgctttgattacacaattccctacatcaaggaacgaattcagtttggaaaaagacttttcgacttccagggcttgcagcaccaggtggcccacgtcgccacgcagcttgaagccgctagacttcttacctacaacgcggcccggttgctggaagctggtaagccgttcatcaaggaagccagcatggcaaagtactacgcttccgagattgccgggcaaaccacatctaaatgcatcgaatggatgggcggcgtggggtatactaaggactaccctgtggagaagtattttcgggatgccaaaattgggaccatctacgagggtgccagcaatattcagcttaacacgattgctaagcatatagacgcggaatactag

SEQ ID NO: 177858 - DNA, 993 bp, synthetic construct
  misc_feature 1..993: note = Description of Artificial Sequence: Synthetic coding sequence
  source 1..993: mol_type = other DNA
atgggcatcgaggtggaccccgagtacggcggcaccggcgccagctttttgagcaccgtgcttgtcatagaggaattggccaaagtcgacgcttcagtggccgtgttctgtgagatccagaataccctgataaatactttgatcaggaaacatggaaccgaggaacagaaggctacatacctgccccaattaactacagaaaaggtcggttctttctgtctgtccgaggctggtgccggctcagattctttcgctctcaagacacgcgcagataaagagggagactactacgtcctgaatgggtcaaaaatgtggatctcaagcgccgagcacgccggccttttcctcgtgatggccaacgtcgacccaacaataggctataagggtatcacctcctttttggtggaccgcgatacccccggccttcacatcggcaaaccagagaataagctcggacttcgcgcctccagcacttgtccactgacatttgagaatgtcaaagtgcctgaagccaacattttgggccaaatcggccacggatacaagtacgccataggaagcctgaatgaaggcaggatcggaatcgccgctcagatgcttggcctggctcagggctgtttcgattataccatcccctacattaaggagagaatccagtttggtaaacgacttttcgactttcagggactgcaacatcaagtagcgcatgtggctactcagttggaggcagcacgcctactgacatacaatgccgcccgccttctagaggctgggaagccttttattaaggaggcatctatggcaaagtattatgcttccgagatcgcgggccagaccacctctaaatgcattgaatggatggggggggtaggttacacaaaagactatccagttgaaaaatactttagagatgccaaaatcggaacaatctacgagggcgcaagcaacatccagctaaacacaatcgctaagcacatcgacgcggaatactag

SEQ ID NO: 177859 - DNA, 1968 bp, synthetic construct
  misc_feature 1..1968: note = Description of Artificial Sequence: Synthetic coding sequence
  source 1..1968: mol_type = other DNA
atgcaggccgcccggatggccgccagcctgggccggcagctgctgaggctagggggcggatcatctaggctgacggctttactgggccagcccaggccaggcccagcgcggcgaccgtatgcaggtggtgcagcccagctggcactcgataaatctgactcccaccccagcgacgcgctgaccagaaaaaagccggctaaggccgagagcaaatcttttgccgtcgggatgttcaaaggacagttgacaacagaccaggtatttccgtatccaagcgtgctgaatgaggagcagacacaattcctgaaggagctagtcgagcccgtttcacggttctttgaagaggttaacgatccagctaagaacgatgccttagagatggtggaagagactacctggcaggggttgaaggaactgggcgcattcgggctccaagtgccaagcgagctggggggcgtgggcctgtgtaatacgcagtatgccaggctcgtcgagatcgttggcatgcacgacctgggcgtgggcatcacactgggggctcaccagtcaataggttttaaagggatccttctgttcggaactaaggcacagaaggagaaatacctgcccaagctcgcctccggagagacagtggctgcattctgtctcacggagccctctagcgggagtgacgcggcgtccattcggactagcgctgttccatcgccctgcggaaaatattatacgctcaacgggtccaagctgtggatctctaacggagggctggctgatatattcaccgtgttcgccaagacgccagtcacagatcctgcaacaggtgctgtgaaggaaaaaattaccgcctttgtggttgagcgagggtttggcggtattacccacggccctccagagaagaaaatgggcattaaagcttctaacaccgccgaggtgttctttgacggcgtcagggtccccagtgaaaacgtgcttggagaggtgggcagtgggttcaaagtcgcaatgcatatcctgaataacggccgcttcggaatggccgccgcgctggcaggcacaatgcggggtataatcgctaaggccgtggatcatgctacaaataggacccagttcggggagaagatccacaatttcggactgatccaggagaagctagcccgcatggtcatgctgcagtatgtaacagagtccatggcctatatggtgtcagctaacatggatcagggtgccacagacttccagatcgaagctgcgatctcaaagatattcggaagcgaagccgcttggaaagtaacagacgagtgtattcagatcatggggggaatggggttcatgaaagaaccaggcgtcgagcgcgtgctgcgggatttgcggatcttccgaatattcgaaggaaccaatgacatcctgcgcctgtttgtggcactgcaagggtgtatggataaagggaaagagctgagcgggctggggtcagcactgaagaacccattcggtaatgctggactgcttctgggagaagccggcaaacagctcagacggagggccggactcggcagtgggttgagtctaagcggcctggtgcatcctgagctctcaagatccggggagctggccgtccgggccctggagcagtttgcaacagtggttgaagcaaaattaattaaacataaaaaaggtattgttaacgagcagttcctgctgcagagattggctgacggagctatcgatctatacgccatggtcgtcgtgctgtcaagggcgtctaggtctctgtcagaggggcatccaaccgcccagcacgaaaagatgctatgcgatacttggtgtatcgaagctgccgcaagaatcagagaggggatggcagccctgcagtccgacccctggcaacaggagctgtacagaaatttcaagtccattagcaaggccctggtggaacggggaggtgtcgtgacatcaaatcctttgggattctag

SEQ ID NO: 177860 - DNA, 1902 bp, synthetic construct
  misc_feature 1..1902: note = Description of Artificial Sequence: Synthetic coding sequence
  source 1..1902: mol_type = other DNA
atgcaggccgcccggatggccgccagcctgggccggcagctgctgaggttgggcgggggcagttcacgcttaacggcgctgctggggcagccccggcccggacccgcccgtcgtccatacgcgggaggggcagcacaggaatccaagagttttgcagtgggcatgttcaagggccagctgacaacggaccaagtctttccctatccttccgtgttaaatgaagaacagacgcagttcctgaaggaactcgttgaacctgtaagtcgctttttcgaagaagttaacgaccctgccaagaacgacgcattagaaatggttgaagaaacgacatggcagggactgaaggagctcggtgctttcggcctgcaggtccctagcgaacttggcggcgtggggctatgtaatacccaatacgcccgactggtcgagatcgttggcatgcatgatctgggagtgggcattacactgggggcgcaccagagtatcgggttcaagggaatcctgctgttcggcacgaaggctcaaaaggagaagtatttacctaagttggccagtggtgagactgtggccgccttctgtttaactgagccatcctctggttctgatgccgctagtattcgtacttctgcggttccctccccatgtgggaagtactacacacttaacgggagcaaactgtggatctctaacggaggactggccgatatctttaccgtttttgcaaagacacccgtcacggatcctgctactggggccgtgaaagaaaagatcaccgccttcgttgtggaacgaggctttgggggaataacccatgggccacctgagaagaaaatgggaattaaggcctccaatacggccgaagttttttttgacggcgttcgagtaccttctgagaatgtgctgggggaagtgggcagcggctttaaagtggctatgcacatcctgaataatgggagattcggtatggcagcagccctggccgggaccatgcgggggattatagccaaggccgtggaccacgcaacaaatcgtacccagtttggggagaagatacataatttcggcctcattcaggaaaagctggccaggatggttatgttgcaatatgtaaccgagtccatggcctacatggtatcagcgaacatggaccagggcgctacagacttccagattgaggcagctatctctaaaatattcggcagcgaagccgcctggaaagtaacagatgagtgcatacagatcatggggggaatgggattcatgaaggagcccggcgtggagcgggtactgcgggatctccggatctttcgtatctttgaaggtacaaacgatattttaaggctgttcgtggcactgcaaggatgtatggataaggggaaagagctctccggcttggggagtgccttgaagaatccatttgggaatgcaggactcctcctcggtgaggctggcaagcagctacgccgccgtgctggactggggagtggcctgtcgctgagcggtttagtgcacccagaactgtctcggtcaggtgagctcgcagtccgtgccctcgagcaatttgcaactgttgtcgaggctaaactgatcaaacataagaagggtatcgtcaatgaacagtttcttctgcaacgccttgccgacggcgcaattgacctttatgctatggtggtggtcttatccagggccagccggagcttgtccgagggccatccaaccgcccagcatgaaaagatgttgtgcgacacctggtgtatcgaagcggctgcaagaattagagagggaatggcagccctccaaagcgacccttggcagcaggagctgtatcgaaatttcaaaagcatctctaaggccttagttgagcgcggcggagtggtgaccagcaacccactggggttctag

SEQ ID NO: 177861 - DNA, 2106 bp, synthetic construct
  misc_feature 1..2106: note = Description of Artificial Sequence: Synthetic coding sequence
  source 1..2106: mol_type = other DNA
atgccccggggcccccagcccagcgccgcccggtgcaccgtggacgacgaatccggcctcggtgccccaggtcgcggcagagccggacgccagtcctgggtgcgtgctagggctagtggcgccagacgagattcagagatgcaggccgccagaatggccgcctcgctcggcagacaactgctgcggctgggagggggatcgtctcgtcttaccgctctgctagggcagcctaggcctggacctgccaggagaccatatgccggaggtgcagcccagctggcactcgataaatcggatagccacccatcagacgccctgactaggaagaagcctgctaaggctgagagtaagagcttcgccgtgggtatgttcaaggggcagcttacaacagaccaggtcttcccgtaccctagcgtcctcaatgaggaacagactcagttcctcaaagagctcgtggagcccgtttctcggttctttgaggaggttaacgaccctgctaaaaacgatgcactggaaatggtcgaggaaacgacctggcagggcctgaaagagctgggagcctttggactgcaagtcccatcagaattggggggggtggggctgtgtaacactcaatatgcaagattggtggagatcgtgggtatgcacgatctcggcgtcggaattaccctgggcgcccaccaatctattgggtttaaaggaattctactgtttggcacaaaggctcagaaagagaaatacctgcccaagttggcatccggtgaaactgtcgcagcattttgcttgactgagccctcttcgggatcagatgcggcttccattcgcacttctgcagttcctagcccatgtggaaagtactacaccctaaatgggtctaagctatggattagtaatgggggactggctgatatttttaccgtcttcgctaagacgcctgtaacagaccctgctaccggcgccgtgaaagaaaagatcacagcattcgtggtcgagagggggttcggaggcatcacccacggtccaccagaaaaaaaaatggggattaaagcctctaatacagctgaagtattttttgatggcgtgcgggtcccaagtgaaaatgttttgggtgaggtgggttccggatttaaggtcgcaatgcacatccttaacaacggccgctttggaatggccgccgccctggcaggtaccatgagggggataattgcaaaggcagtagatcacgcaactaatcggactcaattcggggaaaaaattcacaacttcggtctgatccaggaaaaactggccaggatggtcatgctgcaatacgttactgaaagcatggcgtacatggtctctgctaatatggaccagggcgcaacagattttcagatcgaagctgccatctctaaaatttttggttcagaggccgcgtggaaggtcacggatgagtgcatccaaatcatgggcggaatgggcttcatgaaagagcccggggttgaaagagtgcttcgtgatctccgcatcttcagaatctttgagggcactaatgacattctcaggctgttcgtggcactgcaggggtgcatggataagggaaaagaactatccgggctggggagtgccctaaaaaacccctttggtaacgccggattgcttcttggcgaggctggaaaacagctcaggaggagggccgggcttggttcagggctgtccctgagtggattggtgcacccagagctgtccagatcaggcgaattggccgtcagggcccttgaacagtttgccaccgtggtcgaagccaaattaataaagcacaagaagggcatcgtgaacgagcagtttctcctgcagcgcttagcagacggcgccatcgatctctatgctatggtggtggtcctgtccagggcatctcggagtctgagtgaagggcaccctaccgcccagcacgagaaaatgttgtgtgacacttggtgcattgaagcagcagctcgcattcgagagggcatggccgcattgcaatccgacccctggcagcaggagctatatagaaatttcaaaagtatctccaaggccttggtggagcgaggcggggtggtgacctctaaccccctgggcttttag

SEQ ID NO: 177862 - DNA, 2106 bp, synthetic construct
  misc_feature 1..2106: note = Description of Artificial Sequence: Synthetic coding sequence
  source 1..2106: mol_type = other DNA
atgccccggggcccccagcccagcgccgcccggtgcaccgtggacgacgagagtgggctcggggctcccggtcgaggaagagcagggcggcagtcctgggtgcgcgcgagagcctccggagcaagaagagatagcgagatgcaggcagcgcggatggccgccagtctgggacgtcagttactgcggttaggtggcggatcttctaggctcaccgcgctgctcggccagccaaggccagggcctgcgaggagaccttacgctggcggcgccgcacaattagctctggacaaatctgactcgcacccttctgatgcacttaccagaaaaaaacctgcaaaagcggaatccaagtccttcgccgttggcatgttcaaaggacaactaaccaccgaccaggtgttcccctatccatccgtactgaacgaggaacagacacagttcctgaaagagctcgtagagccagtgtcccgatttttcgaggaagttaatgaccccgctaagaacgacgctctagaaatggttgaagagacaacttggcagggcctgaaagaactgggtgcttttggcctgcaggtccccagcgagctgggcggggttggactgtgcaacacacaatacgctcggctcgtggagatcgttgggatgcacgatctgggagtgggaatcacattgggagcccatcagtctattggattcaagggtattctgctttttgggactaaggctcagaaggagaagtacctgcctaaactggcctccggtgaaaccgtcgcagccttctgtttaaccgagccaagctccgggtctgatgctgccagtattagaaccagtgccgtgccatccccttgcgggaaatactacacattaaacggttccaagctatggatcagcaatggcggactggctgacatcttcactgtgttcgccaagacaccggtgacagacccggcgacaggcgccgtcaaagagaaaatcaccgctttcgttgtggagcgggggttcggtggaatcacgcatggtccacccgagaagaagatgggaattaaagctagtaacacagccgaggttttctttgacggagtaagggtccccagtgaaaacgtgcttggcgaggtaggatctggttttaaagtggccatgcatattctgaacaacggacggttcggaatggcagccgctctggcaggcacgatgcggggaatcattgccaaagccgtcgaccacgccactaaccggactcaattcggcgagaaaattcataattttggactgattcaggagaagctcgcccgcatggtcatgctgcagtatgtcacggaaagcatggcctatatggtgagtgcaaacatggaccaaggagcgacagactttcaaattgaggcagcaatctctaagatattcgggagcgaggcagcatggaaggtgactgacgaatgtattcaaattatgggagggatgggatttatgaaggaacctggtgtagagagggtcttgcgagacctgagaatttttcggatcttcgaaggcaccaatgatattctaagactgtttgtggccctccagggttgcatggataaggggaaggagctaagcggactcggcagcgcccttaaaaatccgtttggtaatgctggcttgctactcggtgaggctggcaagcagttgagaagaagagcaggcctcggtagtggcctcagcttgagtggcctcgttcaccccgaactgtctagatctggggagctggctgtcagggctttggaacaatttgccacagtggtcgaggccaagcttattaaacacaagaagggcattgtaaatgaacagtttctgttacaacggctcgctgacggcgcgatagacctctatgccatggtcgtcgttctgtcccgggcttctaggtccctttccgagggccaccctactgcccagcacgaaaaaatgctgtgtgatacctggtgtatcgaagctgccgcccgtattcgagagggcatggcagctcttcaaagcgacccatggcagcaggaactatataggaattttaaatcgatttccaaagcgctagttgagagagggggagtagtcacctccaacccgctgggtttctag

SEQ ID NO: 177863 - DNA, 2037 bp, synthetic construct
  misc_feature 1..2037: note = Description of Artificial Sequence: Synthetic coding sequence
  source 1..2037: mol_type = other DNA
atgctgggcggcctggccgccgccgccggcacccggatcatgggcaaggagattgaggccgaggcccagaggcctctccgccagacttggcggccaggccagcccccagcaatgactgcgaaaactatgagttcacggctgacggccttattggggcagcccaggcccggaccagccaggcgaccttacgccgggggggccgcccagcttgcgttagacaagagcgactcgcatccaagcgatgccctgaccagaaagaaacccgccaaggccgaatcaaaaagcttcgcagtgggaatgttcaaagggcaactgactacggaccaggtattcccttacccttccgttctgaacgaggagcaaacccagttcctgaaagagctcgtggaaccagtcagcaggttttttgaggaagtgaacgacccagccaagaatgacgccctcgagatggtcgaggagaccacttggcagggcttaaaggaattgggcgctttcggcctccaagtgccctccgagctaggcggtgtgggtctatgtaacactcaatacgcccggttggtagagatcgttggcatgcacgatctaggcgtcgggattacattgggcgcccaccagtccattggatttaagggaattttgctgtttggaaccaaagcccaaaaagagaaatacctcccgaaactggcctctggggagacagttgccgcgttctgtctgactgaaccatcaagcggctcagatgccgcctccataaggaccagtgcagttcccagcccatgtggaaagtactacactttgaatgggtccaagctgtggatatcgaacggtggcctcgcagacatctttaccgtgtttgcaaaaacacctgtgaccgatccagccaccggcgccgtgaaagaaaagattaccgcttttgtagtggagaggggcttcggcggaatcacacatggaccgccagaaaagaaaatggggataaaggcctccaacactgctgaagtgttctttgatggtgtgcgagtgccaagtgagaatgtccttggagaagtcggctctgggtttaaagtggccatgcacattctgaataatgggaggttcgggatggctgccgctctggctggtactatgaggggcatcatagccaaagcagtggaccacgctacaaatcggacccaattcggggaaaagatacacaattttggacttatacaggaaaagctggctcgcatggttatgctacagtacgtgacagagtccatggcctacatggtgtctgccaacatggaccagggggccacagactttcagattgaagccgccatcagcaagatttttgggagcgaggcggcatggaaggttacagacgaatgtatccagattatgggcggaatgggcttcatgaaggagccaggcgtggagagagttttacgtgacctgagaatcttccgcatcttcgagggcactaatgacatactgcgcctgtttgtcgccctacagggctgtatggacaaggggaaagagctatctggccttggatctgccttgaaaaaccctttcggaaatgctggcctgctcctgggagaggccggcaaacagttgagacgacgagccggactgggctcaggtctatccctgagcggactcgtgcaccccgaattgtcacgcagcggggaactggccgtcagggcattagagcagttcgcgaccgtagtggaggcaaagctcattaagcacaaaaaaggcatcgtaaacgaacagtttctgctccaacgcctggccgatggtgcaatcgatctgtatgcgatggttgtcgtgctgagccgagcatctagatctttgtctgaagggcaccccactgcccagcatgaaaagatgctgtgcgatacatggtgcattgaggctgcggcaagaattagggaggggatggcagcactgcaatcagacccctggcagcaggagctctaccgtaattttaagagtatcagtaaagcactcgtcgagagaggcggggtggtcacctctaacccactcggtttctag

SEQ ID NO: 177864 - DNA, 1983 bp, synthetic construct
  misc_feature 1..1983: note = Description of Artificial Sequence: Synthetic coding sequence
  source 1..1983: mol_type = other DNA
atgaaccccgacctgcggcgggagcgggacagcgccagcttcaacccagaactgctcacgcatattctagatgggagccctgaaaaaacgcgccgccggagggagattgagaacatgattctaaatgaccccgatttccagcatgaggatctcaacttcctgacaagatcgcagaggtatgaagttgctgtgcggaaaagtgcaatcatggtaaaaaagatgcgcgagttcgggatagctgaccctgacgagatcatgtggttcaagaattttgtccatcgtggtcggccggagccattggacctccatttagggatgtttctaccaacgttactccaccaggcaactgccgaacaacaggagagattcttcatgcctgcgtggaacctggaaattattggcacctatgcccagacagagatgggtcatggcacacacctcaggggcctggaaactacagctacttatgatccggaaacgcaggagttcatactgaattcccccacagtcacctccatcaagtggtggccaggagggttgggcaaaacttcgaatcatgctatcgtccttgcccagctgattactaagggcaagtgctatggcctgcacgcgttcattgtccccatacgtgagattggcacacacaagccccttcctggcatcactgtgggggatatcggacccaagtttggatatgacgagattgacaatggctacttgaagatggacaaccacaggatacctcgcgagaatatgctgatgaaatacgctcaggtaaagccggacgggacctatgtgaagcctctgtctaataagctgacttacgggacaatggtgtttgttcgtagtttcctcgtgggggaagccgcaagagccctctcgaaagcctgtactatagcaattcgttattcagcggtccggcaccagagcgagatcaaacccggagaacccgagccacagattctggactttcagactcagcaatacaaactgttccctcttctcgccactgcctatgccttccagtttgtaggcgcgtacatgaaagagacgtatcacagaattaatgaaggcattggccagggcgacctgagtgagctgccggagctgcatgccctgactgccggtctgaaggcctttacgtcctggacagcaaacacgggaatcgaggcttgtcggatggcctgtggggggcacggctactcgcactgctccggattgccgaacatttacgtcaattttacaccttcatgtaccttcgagggagaaaacaccgtaatgatgctgcaaacagcaagatttttgatgaagtcttatgaccaggtccactctggtaaactggtgtgcgggatggtttcttacctgaacgatttacctagccagaggatccagcctcagcaggtggcggtgtggcctaccatggtcgacatcaattctcccgagtctctgacagaggcctataaactgcgggcagcgagacttgtcgagattgcggcaaagaacctgcagaaagaagttattcaccgaaaaagcaaggaggtcgcatggaacctgacttccgtggatctggtgcgggcctccgaagcccactgccactacgtggtcgtgaagcttttcagtgagaaattgctcaagatccaggataaggccatccaagccgtgctgaggtcactttgtcttctctacagtttgtacggaattagtcagaatgccggtgacttcctccaagggtccatcatgaccgaacctcagattacacaggtgaaccagcgggtaaaggagctgttaacactgattcgttctgacgcagtagcactcgtggatgcttttgacttccaggacgtcaccttaggctctgtgctcggtcggtatgacgggaatgtgtatgagaacctgtttgaatgggctaagaactcaccattaaacaaagcagaggttcacgaatcctacaaacacctgaagtctctccagagtaagctgtag

SEQ ID NO: 177865 - DNA, 1983 bp, synthetic construct
  misc_feature 1..1983: note = Description of Artificial Sequence: Synthetic coding sequence
  source 1..1983: mol_type = other DNA
atgaaccccgacctgcggcgggagcgggacagcgccagcttcaaccccgaattgctgacccacatcttggacggaagcccagaaaagacaagacggcgccgggaaatcgaaaacatgatcctcaacgatcccgattttcaacacgaggatctgaattttctaacaaggtcacaaaggtatgaagtggccgtgcggaagtcagctatcatggttaaaaaaatgcgagagttcggtatcgctgatcctgatgaaatcatgtggttcaagaagcttcacctggtaaatttcgtagaacccgtgggtctgaattactccatgttcatccccaccctgctcaatcagggcacaacagcgcaaaaggagaagtggctgttatcttccaaaggcctgcagatcatcggtacatatgcacagaccgaaatgggccacgggacacatctgcgcggactggagaccacagccacctacgatcccgaaacacaggagttcatcctgaattcccccaccgtgacgtccatcaaatggtggccgggaggccttgggaagacttcaaatcacgccattgtgctggctcaactcattactaagggtaagtgttacgggctgcacgccttcatcgtgccaattagggagattgggactcataaaccgctgcccggaatcaccgtgggcgatatcggccccaaatttgggtacgacgagattgacaatggctacttgaagatggacaaccataggatccccagagagaacatgttaatgaaatacgcacaggtgaaaccggatgggacctacgtgaaaccactcagtaataagctcacttacgggaccatggtgttcgtccggtcattcctggttggcgaggctgcgcgtgcactctccaaagcctgtaccatagccattaggtattctgcggtccgacaccagagcgagataaagcccggcgagcccgagccacagattcttgacttccagacccagcagtacaagctgtttcccctcctcgcgaccgcttatgcttttcaatttgtaggagcctatatgaaggagacctaccatagaataaacgaggggatcgggcagggggatctatccgagttgcccgagcttcacgctctgaccgccggcctcaaggcctttacctcttggacagcgaacaccggaattgaggcctgccgcatggcatgtggaggacatggatatagccactgttccggcctgccaaacatctatgtcaactttaccccgtcctgtacttttgagggggagaacacagtgatgatgctgcagaccgctcgattcctaatgaagagctatgaccaggtccacagcggcaagctggtttgtggcatggtcagctacctgaacgatcttccatcacagagaatccagcctcagcaggtggcagtgtggcccaccatggttgacattaactcccccgaaagcctgactgaggcatataagctgagagcggcaaggctcgtggagatcgctgcaaaaaatctgcagaaggaagtgattcacaggaaaagcaaagaagttgcatggaatttgacctcagtcgacctggtgagagccagcgaagctcactgccactacgttgtggtcaaattgttcagcgagaagctgttgaaaattcaggataaagccattcaagctgttttaagaagcctgtgcttgctttatagtctctatggcatcagccagaatgcaggagatttccttcaggggtccattatgaccgagcctcagataacccaggtaaatcaaagagtaaaggagcttttaacgcttatacggtctgatgcagtagccctcgttgatgccttcgatttccaagatgtgaccctgggttccgtgcttggacgctatgacgggaatgtatacgaaaatcttttcgaatgggcaaagaactctccgctgaacaaggcagaggtgcacgaatcttacaagcatttgaagtctctccagtctaaactgtag

SEQ ID NO: 177866 - DNA, 1869 bp, synthetic construct
  misc_feature 1..1869: note = Description of Artificial Sequence: Synthetic coding sequence
  source 1..1869: mol_type = other DNA
atgatcctgaacgaccccgacttccagcacgaggacctgaacttcttgacacggagccagagatatgaggtggccgtgcgcaaatccgctatcatggttaagaagatgcgcgaattcggtatcgcagacccagatgaaatcatgtggtttaaaaattttgtgcaccgcgggaggccagaacccctggacttgcacctgggcatgtttttgcctacattgttgcaccaggcgaccgcagaacagcaggagagattctttatgcccgcctggaacttagagattatcggaacatatgctcaaacggagatgggtcatggaactcatctgagagggctggagacaactgccacatatgatccagagacgcaggagtttatcctgaattcccctactgtgacctcaatcaaatggtggccgggaggactaggtaagactagtaaccacgctatagtgcttgctcagttgattacgaaaggaaagtgctatgggctccacgcatttatcgtgcccattcgcgaaatcggaacacacaagcccctacccggtattaccgtgggcgatattggcccaaagttcgggtacgacgagatcgataacggctatctcaaaatggacaaccatcggatccctcgcgaaaatatgctcatgaagtacgcacaggtaaaacccgacggcacatatgtgaaaccactttcaaataagctaacatacggcaccatggtgtttgtgcgcagcttcctggtgggtgaggcagcccgggccctgtcaaaagcgtgtacaatcgctattagatactccgcagtccgccaccagtcagaaatcaaacctggagagcccgagccgcaaatcttggactttcagacccaacaatacaagttatttccgcttctggccaccgcatacgccttccaatttgtaggagcctatatgaaggaaacttaccatcgtattaatgagggtatcggacaaggtgacttatctgagctgccagagctccatgccctcacagcaggtcttaaagctttcactagctggacagccaacaccgggattgaagcgtgtcggatggcttgtggaggacatggctacagccattgcagtggcctgcccaacatatacgtgaactttaccccgtcatgcacttttgaaggagaaaatactgtaatgatgttacagactgccagatttttgatgaagtcgtacgatcaagtccactcagggaagctcgtttgtggaatggttagctaccttaatgatttgcccagtcaacgtatccagccccagcaggtcgctgtctggcctaccatggtggacattaatagccctgagtctttaaccgaggcctacaagctcagggctgccaggctcgtggagattgcggctaagaaccttcagaaagaagttatccacagaaagagcaaggaagtggcgtggaacctcacttcggttgatctagtacgagcctctgaggctcactgtcactatgtggtcgtaaaactctttagtgagaaattgctgaagatacaggataaagctatacaggcagtgctgaggagtctctgtcttctttactctctatacggaattagccaaaatgccggcgactttctgcagggctctataatgactgaaccgcaaatcactcaagtgaatcagcgagtgaaggaactgttgactctgattaggtctgatgcagtcgctctggtggacgcttttgactttcaggacgtcaccttaggatctgtgctaggtaggtatgatggtaatgtatatgagaacctgttcgagtgggccaagaactcccctttaaataaagctgaagtccatgaaagctacaagcacttgaagagtctccagtctaaactttag

SEQ ID NO: 177867 - DNA, 1779 bp, synthetic construct
  misc_feature 1..1779: note = Description of Artificial Sequence: Synthetic coding sequence
  source 1..1779: mol_type = other DNA
atggccgccttcatccagcggacccccgacaactggcacctgcggccggacggaaatggccctcgatttgtgcaccgcggccgtccagaacctttggacctgcacctgggaatgttcctgcctacgctgctgcatcaggcaactgccgagcagcaggagcggtttttcatgccggcatggaatctcgagatcattgggacatacgcacagaccgaaatgggacacggcacccacctaagagggctcgagacaaccgccacatatgatcccgagacccaggagtttatactgaattcacctacagttacgagcatcaagtggtggcctggtgggttgggcaagacttccaatcatgcgatcgtcctggctcagctgatcaccaagggtaaatgctatgggttacatgcctttattgtgccgatcagagaaatcgggacccacaagccgctgcccggtattaccgtgggagatataggacccaagtttgggtacgacgaaatagataacgggtatctgaagatggataaccacaggatcccccgcgagaacatgctgatgaagtatgcccaagttaagcccgacggtacctacgtgaagccactctccaacaaactgacttacggtactatggtctttgtgcgctcttttctggtgggcgaggcggctcgcgccctctcaaaagcgtgtactattgcaatcagatacagcgccgtgcgtcatcagtccgaaattaagcctggcgagcccgaacctcagatcctcgattttcagacgcagcagtacaagctctttcccctgctcgccaccgcctacgcattccaattcgtgggcgcctatatgaaagagacctatcatagaattaacgaaggcatcggtcagggcgatcttagcgagcttccagaactgcatgcattgaccgcgggcctcaaagcctttaccagttggacagccaataccggtattgaagcctgtcggatggcatgcggcggacatggctatagccattgctcgggcctccccaacatttatgtcaatttcacaccgtcatgtaccttcgagggagagaataccgttatgatgctccagaccgctcggtttctgatgaagtcttacgatcaggtacactctggcaagctggtgtgtggaatggtttcgtatcttaacgatcttccgagtcagcgtatccagcctcaacaggtggccgtgtggccaacgatggtcgatatcaattctcctgaatcactgacggaggcctacaagttgcgcgcggcacgcttagtggaaatcgccgctaagaatctacagaaagaagtgattcacaggaaaagcaaagaggtcgcatggaacctgacaagcgtcgacctggtgcgcgcttcggaagcacattgccactacgtggtggttaagctgttctctgaaaagttacttaagatccaggataaggccattcaggcagtgctgagatcactatgtctgctctacagcctctacggaatttctcagaacgctggagatttcctgcagggatctattatgactgagccccagattactcaggttaatcagcgagttaaagaactcctcactctgatcagaagtgatgcggtggccctggttgacgcctttgatttccaagacgtcactctcggctcagtgctgggaaggtatgacggcaacgtatacgaaaatttgtttgagtgggcgaagaactctcctctcaataaagcagaggtgcacgagtcttacaaacacctgaagtccctgcagagcaaactgtag

SEQ ID NO: 177868 - DNA, 1983 bp, synthetic construct
  misc_feature 1..1983: note = Description of Artificial Sequence: Synthetic coding sequence
  source 1..1983: mol_type = other DNA
atgaaccccgacctgcggcgggagcgggacagcgccagcttcaaccccgagcttctgacccacatcttggacggatcaccggagaagacacggagaagaagagagattgagaatatgatcctgaatgatcccgacttccaacatgaggatcttaattttctgacaagatcgcagcgctatgaggttgccgtgcgcaagagcgctatcatggtcaaaaagatgcgcgaattcggcatcgccgatcctgacgagattatgtggtttaagaactttgtgcaccgtgggcgcccggaacctctggacctccacctcggaatgttcctgccaaccctcctccaccaggccacagcagagcagcaggagaggtttttcatgcccgcttggaacttagaaatcatcggcacttatgcccagacagagatgggccatgggacacacttacggggactagagaccacggcgacttatgatccagagactcaggagttcattcttaacagccccacagttaccagcatcaaatggtggccaggtggcctcggcaagacatcaaatcacgccattgtcttagcacagctcataacaaaaggtaagtgttatggtttacatgcctttatcgtgcctatcagggaaatcggcacccacaagcccttgcctggtatcaccgtgggcgacatcggacctaagttcgggtatgatgagattgataatggctacctgaagatggacaatcaccggatccccagagaaaacatgctgatgaaatacgcccaggttaagcccgacggcacctatgttaaacctttgagcaacaagctcacttacggaaccatggttttcgtgaggtcttttcttgtgggagaggccgctagagccctatcaaaggcatgcactattgctattcgatacagcgcagtgaggcatcagtccgagataaagccaggagagcccgagccccagatacttgacttccagactcagcagtacaaactcttccctcttcttgcaacagcctacgccttccagtttgtcggcgcctacatgaaggaaacttatcaccggatcaacgaggggatcggccagggggacctctctgagctgcctgaactccatgccctgaccgccggcctgaaagcgtttaccagttggacagcaaacacaggtattgaggcttgccggatggcatgcgggggtcatgggtactctcactgctccggcctgcctaacatctacgttaatttcactccaagctgcaccttcgagggggaaaataccgtcatgatgctgcagacagctcgcttcctgatgaaatcttacgatcaggttcattcaggcaagttggtttgcggcatggtgtcctacctaaatgacttaccttcccagaggatacaaccccagcaggtggccgtttggcccaccatggtggacatcaatagtccagaaagtctcaccgaagcctataagctcagggccgcacgactcgttgagattgccgccaaaaacttgcagaaggaagtgattcaccggaagagtaaagaggtggcctggaatctcacatcagtcgatctcgtgcgcgccagcgaagcacactgccactatgtcgttgtaaaattgttttcggagaaactgctcaagattcaggacaaagccatacaggccgtcctcagaagcctctgtctgctgtactcgctctacgggataagccaaaatgccggcgattttcttcagggatccatcatgaccgaaccccagattacccaggtgaaccaacgggttaaggagttgctgacccttatcaggagtgatgcggttgcactcgtcgacgcttttgacttccaggatgtaacacttggaagtgtgctcggaaggtacgatgggaatgtgtacgagaacctatttgagtgggcgaaaaactccccactgaataaagccgaggtccacgagtcctataagcacctgaaatcgctgcagtccaaactgtag

SEQ ID NO: 177869 - DNA, 2046 bp, synthetic construct
  misc_feature 1..2046: note = Description of Artificial Sequence: Synthetic coding sequence
  source 1..2046: mol_type = other DNA
atgggcagccccgtgcaccgggtgagcctgggcgacacctggagcagacagatgcacccagacatagagagcgagaggtatatgcagtcgttcgatgtggagcgactgaccaacatcctcgatggcggggcccagaacactgcccttcgccgcaaggtagaaagtatcatccattcttacccggagttttcctgcaaagataattacttcatgacacaaaacgagcggtacaaagccgccatgcgcagagcatttcacatccgcctcattgcaaggcggctcgggtggctggaggacggccgggagctgggatacgcatatagggcgctgtcaggggacgtcgccctgaatatccatcgagtgttcgtgagggcattgcgatcccttggcagtgaggagcaaattgctaagtgggatcctctgtgtaaaaacatccaaatcatcgccacttacgcgcaaacggagctgggccatggcacttacttgcagggcttggagacggaagctacctacgacgccgcaacgcaggagtttgtaatccactctccaacgctgactgccacaaaatggtggcctggagacctgggacgctctgccactcatgcactggtacaagcacagcttatttgcagtggggctcggcgggggatgcatgcattcattgttccaatacgcagtctgcaggatcacaccccgttacccggcataatcattggggacattggaccgaaaatggacttcgatcagacagataatggatttctgcaactgaaccacgtcagagtgccgagggagaacatgttgtctcggttcgctcaggtccttcctgatggcacatatgtgaagctggggaccgcacagagtaattacctgcccatggtggtagttcgtgtggagttgttatctggggagatactgcctatcctgcagaaggcctgcgtcatagcaatgcggtatagcgtcatcaggagacagtctcggcttcgacctagcgatcccgaggccaaagtgctagactaccagacccaacagcagaagctgtttcctcaattagcgatttcctatgcattccactttctcgcggtgtctctcctggagttttttcagcactcttatactgcaatcttaaaccaggatttctcttttctgccggaattacacgccttaagtaccgggatgaaggcgatgatgagcgaattctgcactcagggagcagagatgtgtagaagggcatgtggtgggcacggttattccaaactcagtggcctgccaagtttggttactaagctgtctgctagctgtacgtacgagggtgagaacaccgtgctgtatctccaggttgcaaggttcctggttaagtcgtacctgcagacccagatgtcccctggctccactcctcaaaggtcgttgtctccctcggttgcatacctcaccgcccctgacctggcacggtgtccagcacagagggccgccgatttcctgtgccctgagctttatactacggcatgggctcacgtggcagtgagattaattaaggacagtgttcagcacctacagactctaacacagtctggcgccgaccagcacgaagcgtggaaccaaacgactgtgattcaccttcaggctgcaaaggtgcattgctactacgtgacggtcaaaggatttactgaggcattagagaaactcgagaatgaacctgccattcagcaagtcctgaaaagactgtgtgacttgcacgctatacacgggattctcactaactcgggcgatttcttgcatgacgctttcctctctggcgcacaggtagatatggccaggaccgcataccttgacctgttacgcctgattcgcaaggacgctattcttctgacggatgcattcgacttcaccgaccagtgtctgaactccgcattgggctgttatgacggaaacgtctacgagaggttattccagtgggctcaaaaaagcccaacaaacacacaggagaatcccgcgtatgaggagtacatccgcccactattgcagagctggagatccaagctgtag

SEQ ID NO: 177870 - DNA, 516 bp, synthetic construct
  misc_feature 1..516: note = Description of Artificial Sequence: Synthetic coding sequence
  source 1..516: mol_type = other DNA
atgggcagccccgtgcaccgggtgagcctgggcgacacctggagcagacaaatgcacccggatatcgaaagcgagagatatatgcagtctttcgatgtggagagactgaccaatattctagacggaggcgcccagaatactgccctgcgaagaaaggtggagtccatcatccactcttatccagagttcagttgtaaggacaactactttatgacccagaatgagcggtataaggccgccatgaggagagccttccatattcgattaatcgctcggaggctgggctggctcgaggacgggagggaactggggtacgcgtacagggccctttcgggggatgtggcactgaatatacaccgtgtatttgtgcgcgctctgaggtctctcggtagtgaagaacagatcgccaaatgggacccattatgcaaaaacattcagatcatcgccacgtatgctcagaccgaacttggacacgggacctatctccagggtctagagacagaagctacttattag

SEQ ID NO: 177871 - DNA, 2103 bp, synthetic construct
  misc_feature 1..2103: note = Description of Artificial Sequence: Synthetic coding sequence
  source 1..2103: mol_type = other DNA
atggccagcaccgtggagggcggcgacaccgccctgctgcccgagttcccccgtggcccgttggacgcctacagagcccgcgcttcattcagctggaaagagttagcccttttcaccgagggcgaggggatgctccgcttcaagaaaaccatattttcagctctggaaaatgaccccctttttgccagaagtcccggggcggacctgagcctggaaaaatatcgcgagcttaatttcctgcgctgcaaacgtatctttgaatacgacttcttgtctgttgaagatatgtttaaatcacctttgaaagttcctgcgttaatccaatgcctgggtatgtatgactcatctctggcggccaagtacctcctacatagtttggtttttggctccgcagtgtacagcagcggatccgagaggcaccttacctacattcagaagatttttaggatggaaatatttggctgcttcgccttgacagagctgtcccacggttccaatacgaaggcgatccgcactaccgcacattacgaccctgcgacggaggaatttattatccactctcctgacttcgaggcagctaagttctgggtcggaaacatgggaaagaccgctactcatgccgtcgtctttgcgaaactctgcgtccctggcgaccagtgtcatgggcttcacccattcatcgtccagattcgcgacccaaaaacccttttgcctatgccgggcgtaatggtcggcgatattgggaagaaattggggcagaacggcctggataacggcttcgcaatgttccacaaggttcgggtgcctaggcagtccctcctcaatagaatgggagatgttacccctgaaggaacatacgtctcgcccttcaaggacgtgcggcagcgatttggcgcatctctggggagtctctcctccggcagggtgtctattgtgtcactagctattctaaatctaaaattagccgtagctattgcattgagattttctgcgacccgccgtcagttcggtcctactgaagaagaggagattccagtcttggagtatccaatgcagcagtggcggctcctgccttatctggcagctgtctacgctctggaccatttttcaaaatcattgtttcttgacttggttgaactccagcgtggtttggccagcggggataggtccgccagacaggccgagctgggtagagagatacacgcgctggcatccgctagcaaaccacttgccagttggaccacacaacagggcattcaggagtgtagagaagcatgcggtgggcacggctatttggccatgaaccgactgggagtgttgcgggacgacaacgatccgaactgtacgtacgagggagataataatattttgctgcagcagacatctaactatctattggggctgttagctcaccaagtacacgacggagcgtgctttcggtcacccctgaagtcagtggacttcctcgatgcctaccccgggatcctggaccagaaattcgaggtgagcagtgtggcagattgtctggatagtgcagtggccctagcagcctacaagtggctggtatgttacttattgcgggagacctatcagaagttgaaccaagaaaagcggagtggctcatcagacttcgaggcaagaaacaaatgtcaagtatctcatggcaggcctttggccctggcctttgtagaactgaccgtggttcaaaggttccacgagcacgtgcatcaaccatctgtgcctccttctctgagagccgtcctgggtcgcctgtccgccctttacgccctctggagtctctctcgccacgctgccctcttgtatagagggggctacttctccggcgagcaagctggtgaggttctcgaatccgctgttctcgccctttgctcccaattaaaagatgacgcagtagccctggtggatgtgattgcaccgcccgattttgtcctggacagccccatcggcagggcagacggggaactctacaagaacctgtggggcgccgttctgcaagagagtaaggtattggagcgagcttcctggtggcctgagttttcagtcaacaagcccgtgatcggctcgctcaagagcaaactttag

SEQ ID NO: 177872 - DNA, 1875 bp, synthetic construct
  misc_feature 1..1875: note = Description of Artificial Sequence: Synthetic coding sequence
  source 1..1875: mol_type = other DNA
atggccagcaccgtggagggcggcgacaccgccctgctgcccgagttcccgaggggtcctctggacgcttaccgcgcaagggcctcatttagttggaaggaattggccctgtttacggaaggtgaaggtatgctccgtttcaaaaagacaattttttcagcactcgagaacgacccactcttcgctagaagtcccggggcagacctcagcctggaaaagtatcgcgagctgaacttcctccggtgtaagagaatctttgagtatgacttccttagcgtggaggatatgttcaagagcccattgaaagtgccagccctgattcagtgtttagggatgtacgattcctcccttgccgcaaaataccttcttcactctttggtgttcggctccgcagtttatagcagcggctcagaacgccatcttacatatattcagaagatcttccggatggaaattttcgggtgctttgcactcaccgaattgtcccatggttcaaacaccaaggctatcagaacgactgcccactacgatcccgcaaccgaggagtttatcatccactctcctgacttcgaggccgcgaagttttgggtgggcaatatggggaagacggccactcatgctgtggtgtttgccaagctgtgcgtcccaggtgaccagtgtcatgggctacacccatttatcgtgcaaatccgggatccaaagaccctgcttcccatgcctggtgtgatggttggagatataggaaagaagctgggccaaaacggtcttgacaacggctttgctatgttccataaggtgagggtccctaggcagagtcttctgaaccgaatgggcgacgtgacacctgaaggaacatatgtttcaccctttaaagatgtgagacagcgattcggagcatccctgggaagcttgagctccgggcgcgtgagcatcgtgtcgctggctattttgaacctgaagctcgctgtcgcaattgcgctgcggttctctgctacacgccggcagttcgggccaacagaagaggaagaaataccagtgctggaatacccaatgcagcagtggaggctcttaccttatctagccgccgtgtacgccctggatcacttctctaagtctctgtttttggatctggtggaactccagaggggcctggccagcggggaccgaagcgcacgccaggctgaactgggccgcgagatccatgccctggcatccgcctctaaacctctggccagttggacgacgcagcagggaattcaggagtgcagggaagcctgcggcggccatggctatctagccatgaataggctgggcgtcctcagagatgacaatgatcccaactgcacatatgagggggacaataacatacttttgcagcagacatctaactacctcctgggactgctggcccaccaggtacatgatggggcgtgtttccgtagtcccctcaagtctgtcgacttcctggacgcctacccaggaatcttagaccagaaattcgaagtgtcatcggtcgctgattgtttagattcagcagttgccctagccgcctataaatggctggtgtgctatctgctgcgtgaaacctatcagaaattaaatcaagaaaagcggtctggtagcagcgactttgaagcccggaataagtgtcaagtgagccacggccggcctctggcattggcattcgtggagttgaccgtggtgcagcgtttccacgagcatgttcatcaaccatcagtcccccccagcctgcgcgccgtgctgggtcggttatctgctctgtacgcattgtggagcctgagccgtcacgccgctctgctttaccgagccgagagaagatgctcttgtccggggcgcagagacagaagcagttag

SEQ ID NO: 177873 - DNA, 2103 bp, synthetic construct
  misc_feature 1..2103: note = Description of Artificial Sequence: Synthetic coding sequence
  source 1..2103: mol_type = other DNA
atggccagcaccgtggagggcggcgacaccgccctgctgcccgagtttccaaggggccccctcgacgcgtatcgtgctagagcttctttcagctggaaagaactggctctgttcacagaaggagaggggatgctccgattcaaaaagaccatctttagcgccctggagaacgatccactattcgccagaagcccaggggccgatctctcattggagaagtatagggagctcaatttcttacggtgtaaacgaattttcgagtatgactttttgtcagttgaggatatgtttaagtcccccttgaaagtcccagccctaatccagtgcttaggtatgtatgattcatctcttgcggctaaatatttactgcactcacttgttttcggtagtgctgtctacagcagcggcagtgagaggcatctcacatacatccagaaaatttttcggatggagattttcggctgctttgcactcactgagctatcgcacgggtccaacaccaaggcaatacgaaccactgcccactatgaccctgcaaccgaggagtttatcatccactcgcctgactttgaggctgctaaattctgggtcggaaatatgggcaagacagccacccacgccgtcgtcttcgcgaagctttgtgtcccaggtgaccagtgccacggactgcacccgtttatagttcaaattcgagaccccaaaactcttctgcccatgcccggtgttatggtaggggatattggaaaaaagctgggccagaacgggctcgacaatggttttgccatgtttcacaaggttagggttcccagacagtcacttcttaataggatgggagacgttactcccgaaggcacttacgtctccccgtttaaggatgtcaggcagcgctttggcgccagtctaggtagtttatctagcgggagggtctctattgtatcattggccattctgaacctgaaactcgccgtcgcaatcgctctgcgcttttctgccacaagacggcagttcggcccaaccgaagaggaggagattccagtgctggaatatccaatgcagcagtggaggctgctgccctatttggccgcagtgtatgctctcgatcatttttcaaaatctttattcctcgatcttgtcgaacttcagcgcggcctcgccagcggcgacagatctgccaggcaggctgaactgggcagagaaatccacgccctagcctccgcgagcaaacccctggccagctggaccactcagcagggtattcaggagtgccgcgaggcctgcggtggccatgggtacctcgctatgaaccggttgggggtcctgcgcgatgacaatgaccccaactgcacatacgaaggagataacaatatcctcctgcagcaaaccagcaattaccttcttgggctgctagcccatcaggtgcatgacggggcatgctttagaagcccgctcaagtccgttgactttttggacgcctacccgggaatcctggatcagaagttcgaggtgtctagcgtcgcagattgccttgacagtgccgtggccctggccgcctacaagtggctagtgtgctatctgctccgcgagacctatcagaaattgaaccaggaaaaacggtccggcagtagcgattttgaggctagaaacaagtgccaggtgtcccatgggcgccctctggcattagctttcgttgaactgaccgttgtgcagcgcttccacgagcatgtccaccagccttccgttccacccagcctgagggcagtccttggccggctgagcgccctctatgcgctctggagcttaagtcggcacgctgcgttgctctaccgcgggggctatttcagcggggagcaagctggtgaagtgctggagtccgcagtactggccctttgctcacaactcaaagatgacgcggtggctttagtggacgtgatcgctcctcctgactttgtcttggattcacccattggccgagctgatggagagctatataaaaacctgtggggagctgttttacaggagtcaaaggtcctagagagggcctcttggtggcccgaattctcggtcaataagcccgttatcggctctctgaagagcaagctctag

SEQ ID NO: 177874 - DNA, 2175 bp, synthetic construct
  misc_feature 1..2175: note = Description of Artificial Sequence: Synthetic coding sequence
  source 1..2175: mol_type = other DNA
atgccccggaacagcggcgccggctacggctgcccccacggcgacccttccatgctggacagccgcgaaacacctcaggagagtcggcaagacatgatcgtgcggacgacacaagagaaacttaagacatccagtttgaccgatcgacagccactgagcaaggaaagccttaatcacgctcttgagctctcggtacccgagaaggttaataatgcccaatgggatgcgcccgaggaagcgctctggaccacgcgagccgatggtagagtccgcctgaggattgacccgagctgtccacagctcccatacaccgtgcatcgcatgttttatgaagccctggataagtacggagacctgatagcccttggtttcaagaggcaagacaagtgggaacacatctcatattctcagtactatctcctggccaggcgcgccgccaagggcttcttaaagcttggactgaagcaggctcactcggtcgcgattttaggctttaacagtcctgagtggttctttagcgccgtgggaaccgtatttgctggtggtatcgtgactggtatttataccacatcttctcctgaggcctgtcagtatatagcctatgactgttgtgccaatgttattatggtagatacccagaaacagttagagaaaattctgaaaatctggaagcaactcccacatcttaaggcagttgtgatttacaaagaacccccccccaacaaaatggcaaacgtctacacaatggaggaattcatggagttgggaaatgaagtccctgaggaagcactagacgctattatcgacacacagcaaccaaatcagtgctgcgtattggtttatacctctggcactaccggtaacccaaaaggggtaatgctgtcccaggataatattacctggactgcccggtacggaagccaagctggtgatatcaggcctgccgaggtgcagcaggaagtggtggtgtcttacctcccactgtcacatatcgctgcccagatctacgatctctggaccgggatccagtggggcgcccaagtgtgcttcgcagagccagatgcactcaaaggctcactggttaacactctccgggaagtcgaacctacgagccatatgggtgtgccaagggtgtgggaaaagattatggaaaggatccaagaggtcgctgcacaatcaggtttcatacgcaggaagatgctgctgtgggcaatgagtgtcactcttgagcagaatctgacatgccccggcagcgacttgaaaccatttacaaccagactggcagactatttagtcctcgccaaagttcggcaggccctgggcttcgccaaatgtcaaaagaatttttatggcgccgcccctatgatggcagagacacagcactttttcctgggcctcaatattagactatacgctggttacgggctgtccgaaacttccgggccacacttcatgtcctcgccctacaattacaggttgtattccagcggaaagctggtccctgggtgtcgagtgaagctcgtgaaccaagacgctgaagggatcggcgagatatgtctctggggccggacaatcttcatggggtatcttaatatggaagacaagacttgcgaagcgattgatgaggagggctggctccatacaggagacgcagggagactcgacgcagatggcttcctctacatcacaggcagactgaaggaacttattattacggccggcggagaaaatgttccaccggtacccattgaggaggcagtgaagatggagctgcctataatctccaacgctatgctcatcggcgaccagaggaagttcttaagtatgctcctcactcttaagtgcacattagaccctgatacaagcgaccaaaccgataatctgaccgagcaagctatggagttttgtcagagagtgggaagtcgggcaacaacagtgtccgagatcattgagaagaaggatgaggctgtgtaccaagccattgaagaaggcatacgcagagtgaacatgaatgcagcagctcggccgtaccatatacaaaagtgggctattctggaaagagatttcagtatttcaggcggggaactcggtccaacgatgaagctcaaaaggctgaccgtgcttgagaagtataagggtataatcgattctttttaccaggagcagaagatgtag

SEQ ID NO: 177875 - DNA, 1449 bp, synthetic construct
  misc_feature 1..1449: note = Description of Artificial Sequence: Synthetic coding sequence
  source 1..1449: mol_type = other DNA
atggccaacgtgtacaccatggaggagttcatggagctgggcaacgaggtgcccgaggaagctttggacgccataattgacactcaacaaccgaaccagtgctgcgtgcttgtttatacgagtggcaccacaggaaaccccaaaggagttatgttaagtcaggacaatattacatggacagctcggtacggcagtcaggccggcgatatccggcctgccgaggtgcagcaggaagtggttgtgtcttaccttccattaagccatatagccgctcagatttatgatctttggaccggcatccagtggggagcacaggtatgcttcgcagaacccgatgcactgaaagggtccctggtaaatacgctccgcgaagtcgagcccacatctcacatgggagtccctagagtgtgggagaaaatcatggagcgcatccaggaagtagctgcccaaagcggcttcatccgcagaaaaatgctcttgtgggcaatgtcggtaacactggagcagaacctcacatgtcctggctccgaccttaagccttttacaactcgtttagccgactacctggtgttggctaaggtgcgtcaagctttaggcttcgcaaagtgtcagaaaaatttttatggtgcggctccgatgatggcggagacccagcatttcttcctcgggctgaacattaggttatatgccggctatgggctgtccgagacaagtggcccccactttatgtccagcccttataattatcgactgtactcttcaggcaagttagtcccaggttgccgcgtgaagctggtgaaccaggacgcagagggaatcggggaaatttgtttgtggggaaggacgatatttatggggtatctgaatatggaggacaaaacctgcgaggccattgacgaagaaggatggctgcacacaggtgatgccggaagactagatgccgacggcttcctgtacatcactgggagacttaaagaattaattattactgccggcggagaaaatgtaccgccagtgcctatcgaggaagctgtcaagatggagctccctattatctctaacgccatgctgattggcgaccaacgaaaatttctgagtatgctcctgacgctgaaatgcactctcgatccggatacatccgatcagactgataatttgacagaacaagctatggaattttgtcagagagtgggctcacgggcaacaaccgtgagcgagatcattgagaaaaaagacgaggctgtctatcaagctatcgaggaggggataaggagagttaacatgaacgccgcagcccggccctaccacattcaaaagtgggctatcctggagcgtgacttctcaatctcgggaggcgaactgggccccactatgaagctcaagaggctcaccgtgcttgagaaatataaggggataattgacagcttctaccaggagcagaagatgtag

SEQ ID NO: 177876 - DNA, 2001 bp, synthetic construct
  misc_feature 1..2001: note = Description of Artificial Sequence: Synthetic coding sequence
  source 1..2001: mol_type = other DNA
atgaccggcacccccaagacccaggagggcgccaaggacctggaggtggacatgaataagactgaagtgacacccaggctgtggaccacctgtagggatggggaagtactgcttcgcctctccaaacacggtccgggccacgagactcctatgaccatccctgaattttttcgtgaaagcgtgaaccggtttggcacctaccccgcgctggccagtaagaatgggaagaaatgggagattctgaactttaatcagtactacgaagcatgcaggaaagccgcgaaatccctcattaaactcggactagaacggtttcacggggttggcattttgggctttaacagtgctgaatggtttatcacagctgtgggcgctatcctggctggcggcctctgcgtcggaatatatgcaactaactcagctgaggtttgtcagtatgtgattacacacgctaaagtgaatattctgttggtcgagaacgaccagcagctgcaaaagatactgtccatcccccagagtagccttgagcctctcaaggcaattatccagtatcgtctgcccatgaagaaaaataataatctctattcctgggacgacttcatggagctggggaggtctatccctgacactcagctggagcaagtcattgaaagtcaaaaggccaaccagtgcgccgtgttgatatatacatcaggtactaccgggatccccaaaggggtgatgcttagccacgataacattacttggatcgccggggccgtgaccaaggatttcaaactgactgataagcacgaaacagttgtgagctatctaccactgtcgcatatagccgcccagatgatggacatttgggtaccaataaagatcggagccctgacttactttgcccaagccgacgcgctcaagggcacactggtatcaaccttgaaggaagttaagcccaccgtgttcatcggcgtgccccaaatctgggaaaagattcacgagatggtgaagaagaatagcgcaaaatcgatggggctgaagaaaaaggctttcgtttgggctaggaatattggttttaaggttaacagcaaaaagatgctgggaaagtacaatacaccagtttcataccgaatggctaagacactggttttctcaaaggtgaagactagtctaggtctcgatcattgccactcttttatatccggaacggctccccttaaccaggaaacagcagaattcttccttagcttggatataccgattggcgagctctacggactttccgagagcagcggcccccacaccatttctaatcagaacaactatcggctcctgtcgtgtgggaagattttaactggctgcaagaatatgctcttccagcaaaataaggacggaattggcgagatatgtctgtgggggagacacattttcatggggtatctcgagtccgagactgagactacagaggccatcgacgatgaggggtggctccactcgggagatctcggccagcttgatgggttaggttttctgtacgtgaccggccatatcaaagagattctgattaccgccggcggcgagaatgtaccaccaattcccgtcgaaaccctcgtgaaaaagaaaatcccaataatcagcaatgccatgctggtcggtgataaactaaagttcttgagcatgttgctgactttaaagtgtgagatgaaccagatgtccggagagcctcttgataagctgaatttcgaggccattaacttctgtcgcggactgggtagccaagcctcgacagtcacagagatcgtgaagcagcaggatcccctcgtatacaaagctattcagcaaggcatcaacgccgttaaccaggaagcgatgaacaatgcccaacggattgagaaatgggtcatcttggagaaggatttttcaatttatggaggagagttggggcctatgatgaaattaaagcggcattttgtggcacagaagtataagaagcagatcgatcatatgtaccactag

SEQ ID NO: 177877 - DNA, 1848 bp, synthetic construct
  misc_feature 1..1848: note = Description of Artificial Sequence: Synthetic coding sequence
  source 1..1848: mol_type = other DNA
atggccgtgtacgtgggcatgctgcggctgggccggctgtgcgccgggtcgtccggcgtgctgggcgcgcgcgcagccctgtctcgcagctggcaggaagctcggctccagggcgtgcgctttctgagcagcagggaagtcgatcggatggtatccacccccattggtggactatcctacgtgcagggttgcacaaagaaacatctgaactcgaagactgtggggcagtgtctagagacaactgcccagcgtgtgcctgagcgggaagccctggtggtgttgcacgaggacgtgcggctaacttttgcacagctaaaggaagaggtagacaaggctgcaagcggcctcctgtccataggactttgtaaaggggataggctgggcatgtggggtccaaactcatacgcctgggtcctaatgcagttagctaccgcccaggcgggcattatcttagtctccgtgaacccggcctatcaggccatggagctggagtacgtcttaaagaaggtcggatgcaaggcccttgtgtttcctaaacaattcaagacacaacagtactataatgtgctgaaacagatctgtcccgaagtcgagaatgctcagcctggagcattgaagagtcagcgcttaccagacttaaccaccgtcatcagtgtggacgcacccctgccaggcacactgctcctggatgaggttgtggccgccgggtccacccggcagcacctggaccagctacaatacaatcagcagtttctgtcctgccatgaccctataaatatccagtttactagcggcaccacaggatcgccaaaaggggcgactctcagccactacaacatcgtgaacaacagcaacatcctcggggagcggctgaagctgcatgagaagacccctgaacaactccgaatgatccttcctaatcctctgtaccattgtctggggtctgtcgccggaacaatgatgtgcttgatgtacggagcaacactgatcctggcctctcctatttttaatggcaaaaaggccctggaggcaatcagtcgagagagggggacatttttatacggtacaccaaccatgttcgtggacatcctgaaccagcctgacttctcctcatacgatatcagtacgatgtgtggtggtgtgattgcaggctcccccgctcctccagaactcatccgtgcaatcattaataagatcaacatgaaagatctggttgttgcttacggaacaacggagaattcccccgtcacctttgcccattttcccgaggataccgtggagcagaaggccgaatcggtcggtcgcataatgccacatacagaagctcgcattatgaatatggaggccggcacactcgccaagctgaatacaccaggcgagctgtgtattaggggatactgcgtgatgttgggatactggggtgaaccccaaaagactgaagaagcagtcgaccaagataaatggtattggaccggcgacgtggccactatgaatgagcaggggttctgcaagattgttggccgctccaaggacatgatcattcggggtggtgaaaatatttacccagcagagttagaagacttttttcacacgcaccctaaggtccaggaagttcaggtggttggcgtcaaggacgatagaatgggtgaggaaatatgcgcctgcatcaggttgaaggacggggaagaaactactgtggaggaaattaaagcattctgcaaaggaaaaatatcacacttcaagattcctaagtatatcgtgttcgtgactaactacccactcacgatttctgggaagattcagaaattcaaactacgagagcagatggagcgacatctgaatctgtag

SEQ ID NO: 177878 - DNA, 1923 bp, synthetic construct
  misc_feature 1..1923: note = Description of Artificial Sequence: Synthetic coding sequence
  source 1..1923: mol_type = other DNA
atggccgtgtacgtgggcatgctgcggctgggccggctgtgcgccggcagttccggggtgcttggcgctagggctgccctgagtagatcttggcaggaggctaggcttcagggcgtgcgtttcctgagtgctcgaggggggatggaggccgggaggcagaggatcagcgtgccctcctcatttactgcctcagccgctgctcactcaagagaggtggaccgcatggtgagtacaccgattggaggactgagctacgtgcaggggtgcaccaaaaagcatttgaattcaaaaacggtcgggcaatgccttgaaacaacagcccaacgggtacctgagcgcgaggccctcgtggtgctacacgaagatgttcggctgacattcgcacagctaaaggaagaggtggacaaggctgcgagtgggctgctctccattggactgtgtaagggcgacaggctgggaatgtggggaccaaatagctacgcatgggtgcttatgcagctggccactgctcaagcaggtattattttggtctccgtgaacccagcctaccaagcaatggaattggaatatgtgctcaaaaaggtaggatgtaaagcactggtattcccgaaacagttcaagacccaacagtactataatgtccttaaacaaatttgtccggaagtggagaatgcgcagccgggggctctcaaaagccaacggctgcctgatctaacgaccgtaatctccgtagatgccccgctgcccggaacgctcctgctggatgaggtggtcgctgccggttccaccaggcaacacctcgatcaattgcaatataatcagcaattcttgtcttgtcacgatcccatcaacattcagttcacttctggcactacggggtcacctaagggcgctaccctgtcccactacaatatagttaataacagcaacattttgggtgaacgtctgaagctccacgaaaaaactcccgagcagcttcgcatgatccttccaaatcccctgtatcactgcctgggttccgttgccggtacgatgatgtgtctgatgtacggcgccaccctgatcttggcctccccaattttcaacgggaagaaggctcttgaggcgataagcagggaaagaggaacgtttctctacgggactcccacaatgtttgtggatatcctgaaccagcctgatttttcctcgtatgatatttctaccatgtgcggtggagtaatagctggctctcctgctccaccggagctgattagggctattataaacaaaatcaacatgaaagatctggtggtagcatatggcaccaccgaaaactcccccgtgacgttcgctcatttcccagaggatacggttgagcagaaagctgaatctgtggggcgcattatgccgcacactgaggcaaggatcatgaacatggaggcaggaaccctggccaagctgaatacccccggcgaattgtgtatccgggggtactgtgtcatgctgggatactggggcgaacctcaaaaaaccgaagaggccgttgatcaggataagtggtactggacaggcgacgttgctaccatgaatgaacagggcttctgtaagatcgttgggaggtctaaggacatgattatacgcggtggagaaaatatataccccgccgaactagaagacttctttcatacccatcccaaggtccaggaggtccaggtggtcggcgtcaaagatgacaggatgggtgaggagatttgcgcctgtatccgcctgaaagatggggaggaaacaacggtcgaagagatcaaggccttctgtaaaggtaagatttcccatttcaagattccaaagtacatcgtatttgtgaccaactaccctctgacaatcagcggcaagattcagaagttcaaactgagagagcagatggagaggcatctcaacctgtag

SEQ ID NO: 177879 - DNA, 1809 bp, synthetic construct
  misc_feature 1..1809: note = Description of Artificial Sequence: Synthetic coding sequence
  source 1..1809: mol_type = other DNA
atggccgtgtacgtgggcatgctgcggctgggccggctgtgcgccgggtcctctggggtcctgggtgcgagagccgctctcagcagaagttggcaggaggcccggctgcagggtgtccgcttcctttcctcaagggaagtcgaccgcatggtgtccaccccaatcggcggcttgtcgtatgtccagggatgcacaaaaaagcacctcaactctaagactgtcggccagtgcctcgaaacgactgcccagagggttccagaaagagaggccctcgtggtgctgcatgaagatgtacgcctcaccttcgcccagcttaaggaggaggtagacaaagccgctagtggattgttgagtattggactctgtaagggggatcggttagggatgtggggcccaaattcctacgcatgggtcctgatgcaactcgccacggcccaggctatggagctggagtatgtactcaagaaagttggttgcaaggctctggtgtttccaaaacaattcaagacccagcagtactacaacgtgctcaagcagatttgccctgaagtggagaatgctcagccaggtgcactgaaaagtcaaagattacctgatctgaccaccgttatttcagtagacgccccgctcccaggcacattgctcctggacgaggtggtggctgctggaagcaccaggcaacacctcgatcagctccagtacaaccagcagtttctgagctgtcacgatcccataaatatacagtttactagcggtactactgggtcacccaagggcgctacgttgtcccactacaatatcgttaataactccaacattctgggtgagcggctcaaactacatgagaaaaccccagagcagttgcgcatgatcctacccaatcctctataccactgcctcgggtcagtggccgggacgatgatgtgcctaatgtatggcgcaacactgattcttgctagccccatcttcaacggaaaaaaggccctggaggcaatctctagagaacgtggtacctttctctatggcacgccaactatgttcgtcgatatcctcaaccaacctgatttctcctcctatgatatctctacaatgtgcggaggcgttatcgccggatcgccagccccccctgagttaattagagccattatcaacaagatcaatatgaaagatctggtagtcgcatatggcaccaccgaaaatagccccgtgacgtttgcgcactttccagaggataccgtggagcagaaggctgagagcgtggggcggatcatgccccatactgaggctcgcattatgaacatggaagccggtactttggccaagctgaataccccaggtgagttatgtatcagggggtattgcgtgatgctcgggtactggggagagccgcagaaaacggaggaagccgttgatcaggacaaatggtactggacaggagacgtagccacgatgaacgagcagggattttgcaagatcgttgggcggtcaaaggacatgattatccgcgggggggagaatatataccctgcagagctggaggatttctttcacactcaccccaaagtgcaggaggtccaagtagtcggcgtgaaagacgaccggatgggcgaggagatctgtgcatgcatcaggctgaaagacggggaagagaccaccgtggaggagattaaggcattctgtaaaggaaagatttcacacttcaagatcccaaaatatattgtcttcgtcacgaactatcctctcaccataagtgggaaaatccagaagtttaagctgagagagcagatggagcggcacttgaacctctag

SEQ ID NO: 177880 - DNA, 1719 bp, synthetic construct
  misc_feature 1..1719: note = Description of Artificial Sequence: Synthetic coding sequence
  source 1..1719: mol_type = other DNA
atggccgtgtacgtgggcatgctgcggctgggccggctgtgcgccggcagctccggagtccttggcgcgcgcgcagcattaagccggagttggcaggaagctcgcctgcagggcgtacgctttctcagcagcagagaggtcgaccgtatggtctctactcccatcggtggactttcctacgtccagggctgcactaaaaaacatctcaactcaaagaccgtgggacagtgccttgagacgactgcgcagcgggtgcctgagcgggaagctctggtggttcttcacgaggacgtgcgattgacattcgctcagttaaaagaggaagtatctgtaaatcccgcttaccaggccatggaattggagtatgtgctcaaaaaggtgggctgcaaggcacttgtattcccgaaacagttcaaaacgcagcagtactacaatgtgctaaagcagatttgtcccgaggtggagaacgctcaaccgggagctcttaaaagccagcgcctcccagacctgactactgttattagcgtggacgctcccctgcccggaactcttctgctggatgaggtggtggctgctgggagcacacggcagcatcttgaccaactacaatataaccagcagttcctgagctgtcacgatcccatcaacatccagttcacatcgggcacaaccggaagtccgaaaggagccacactgtctcactacaatatcgtgaacaacagcaacatcctcggagagaggctcaaattgcacgaaaagactcctgaacaacttcggatgattctgccaaatccactttatcactgcctgggatccgtggcaggtaccatgatgtgcctgatgtatggcgctaccctgattctggcctccccgatttttaacgggaagaaggccctggaggccatcagcagggagcggggtacattcttgtacggtaccccaaccatgttcgtggatattctcaaccagcccgatttctctagctatgatattagtaccatgtgcgggggagttattgccggttctccagctcctccagaactgattcgcgccattataaacaaaattaatatgaaggatcttgtggtcgcatatggaaccaccgagaattcccctgtgacatttgcccattttccagaggatacagttgaacagaaagcagagtcagtaggccgcatcatgccacacaccgaggcccggattatgaacatggaggcgggcacgttagcgaagctaaacacccccggcgagctgtgcatcagaggctactgtgtgatgctcggctattggggcgagccacaaaagacagaagaggccgtggatcaagacaagtggtactggacgggagacgtggcaactatgaatgagcaggggttctgcaagatcgtcggacggagtaaggatatgatcatcaggggaggagagaacatttatccagccgagctggaggatttctttcacactcatccgaaagtgcaagaagtacaggtggttggtgtgaaagatgatagaatgggggaggaaatctgcgcatgcattcggctcaaggatggtgaagaaacaacagtggaggagattaaggccttttgtaaggggaagatctcacactttaaaattcctaagtatatcgtttttgtgaccaattatcctcttaccatcagtggcaaaattcagaaatttaagcttagagagcagatggagcgacaccttaacctgtag

SEQ ID NO: 177881 - DNA, 1368 bp, synthetic construct
  misc_feature 1..1368: note = Description of Artificial Sequence: Synthetic coding sequence
  source 1..1368: mol_type = other DNA
atggagctggagtacgtgctgaagaaggtgggctgcaaggccctggtttttcccaagcaatttaaaactcagcagtactataatgtcctgaaacagatctgcccagaggtcgaaaatgcccaacctggcgccctgaagagccagagattgcctgacttaacgacagtcatcagcgtggatgctcccctgccaggaacccttcttctggatgaggtggtggccgctggttccactcgtcagcacctggaccagctgcaatacaaccaacagttcctttcttgccacgaccctatcaacattcaatttacgtctgggaccacaggatctccaaaaggcgcaaccctgtcccactacaatatcgtgaataatagcaacattctgggagaacgtctgaaattacatgagaagactcctgaacaactcaggatgattctgcccaaccctctatatcactgccttgggtcagtggcagggaccatgatgtgcttgatgtacggagccacactcatcttggcgtcccccatttttaacggcaaaaaggcactcgaagccatttcgagggaacgcggcacatttctgtatggcactccaaccatgttcgtggacatccttaatcagccagactttagcagctacgatataagtactatgtgcggcggcgttattgccgggtcccctgcacctcctgagctgattcgcgctatcatcaacaaaatcaacatgaaagatttggttgtcgcctacggtacaaccgagaattccccagtaacattcgctcacttccccgaggacactgtggagcagaaagccgagtctgtcggccggatcatgccccatactgaggccaggatcatgaatatggaagcaggcacgttagcaaagttaaacacccccggcgaactgtgcattcgcgggtattgcgtgatgctgggttattggggcgagcctcaaaagacagaagaagctgtcgaccaggacaagtggtactggactggagatgtcgcgaccatgaacgagcagggcttttgcaaaatagtcggacggtcaaaggatatgatcatccgaggcggtgaaaatatttacccggcggagcttgaagactttttccacacccaccccaaagtgcaagaagtgcaggtcgtaggagtcaaggacgaccgaatgggcgaggaaatttgcgcctgtattcgactaaaggatggagaggagaccacagttgaggaaataaaggccttctgcaagggtaaaatttctcatttcaagatcccaaagtatattgtctttgtgacaaattaccctctgaccatttcaggcaagatccagaaattcaagcttcgcgaacagatggagaggcacctgaatctctag

SEQ ID NO: 177882 - DNA, 1731 bp, synthetic construct
  misc_feature 1..1731: note = Description of Artificial Sequence: Synthetic coding sequence
  source 1..1731: mol_type = other DNA
atgctgccccacgtggtgctgaccttccggcggctgggctgcgccttggcaagttgcagacttgcgccagccaggcacaggggatcggggctgctgcatacggctccggtggctcggagtgatagatcggctcccgtatttactcgtgcacttgcgttcggggatcggattgctttggtcgatcagcatgggcgtcatacctatagagagctgtatagccgctctcttcgtttgagccaggagatatgtcgtctgtgcgggtgtgttggcggagaccttagggaagagcgtgtcagcttcctgtgtgcaaacgatgctagctacgttgttgcacaatgggccagctggatgtcgggcggagtcgctgtcccattgtaccgaaaacatcctgcggcgcagctcgaatacgtcatttgtgactcgcagtctagtgtagttttggcttcccaagagtaccttgaactgctgtctccagtggtgcggaagctgggagttccattacttccactgactccagccatttacacaggggcagtggaagagcccgctgaagtgccggtccctgagcaagggtggagaaataagggcgctatgattatctatacgtcggggactacaggaaggcctaagggcgtactgagcacccatcaaaacattagagcagtggtgactgggcttgtacacaagtgggcctggaccaaggatgacgttatactgcacgtgctcccactacatcatgtacatggtgtcgtgaatgccctgctgtgcccactatgggtgggggccacctgtgtgatgatgcctgaattttctccgcagcaggtgtgggagaaattcctttcgtccgagacacctcgcatcaatgtattcatggctgtgccaactatttatacgaagcttatggaatactacgacagacacttcacccagccccacgcacaagacttcctgcgtgcagtgtgcgaggaaaagatacgtcttatggtgagcggctccgccgccctgcctttgcccgtgctggagaaatggaaaaatattacaggccataccctgctagagcgctatggcatgacggagatcggaatggccttaagcggcccattgaccaccgccgttagactgcccggcagtgtaggtacacccctcccgggagtacaggtgcggatcgtgtctgagaatccccagagagaggcttgttcatacacaatccatgccgagggtgacgaacgcgggaccaaggtgacccccgggttcgaggaaaaggagggggaactcctagtccggggcccttctgtgttcagggaatactggaacaaaccagaggagaccaagtccgcttttacgttggacggttggttcaaaacaggcgacaccgttgtgtttaaggacggccaatactggatcagaggcagaacttctgtggatataatcaaaacagggggatataaggtgagcgccctagaggtggaatggcatctgctcgcacacccgagcattactgacgtggctgtcatcggggttcctgatatgacatgggggcagagggtgaccgccgtcgtaacactccgcgagggacattccctctcacaccgagagctcaaagagtgggcccgaaatgttctagcaccttatgcggtgccctccgagctcgtgctggtagaggagataccacggaatcaaatgggcaagatcgacaagaaagccttgatcaggcactttcacccctcatag

SEQ ID NO: 177883 - DNA, 1731 bp, synthetic construct
  misc_feature 1..1731: note = Description of Artificial Sequence: Synthetic coding sequence
  source 1..1731: mol_type = other DNA
atgctgccccacgtggtgctgaccttccggcggctgggctgcgcccttgcttcatgtaggttagcccccgctaggcatcgcggaagcgggctcctacacaccgcccccgtggccaggagcgatcgcagcgcccctgtgttcacccgagcacttgcttttggcgatcgaatcgctctcgtggaccagcatggacgtcatacgtacagagagttatatagtagatccctgcgtctcagccaggagatatgcagactttgcgggtgcgtcggcggggatcttcgtgaggaaagggtatccttcctgtgcgctaacgacgccagctatgtggtggctcagtgggccagctggatgagtggaggcgtggctgtgccactgtatagaaagcacccggcagcccagctggaatacgtcatttgtgattcccagtcttcggtggtgctcgcctcccaggagtatttggaactgttgagccctgttgtccggaagctcggtgttccactgctgccactgaccccagcaatctacacaggcgctgttgaagaaccagctgaagtgccagtgcccgagcagggctggcgcaacaagggcgctatgatcatttacacctccggcaccaccggtcggcccaaaggcgtcttatctacgcaccagaatataagagcagtggtgacaggactagtgcataagtgggcctggacaaaagatgacgttattctgcacgtcctgcctctgcatcacgtgcacggcgttgtaaatgctttgctctgtccattatgggtcggagccacctgcgtcatgatgcccgaattctccccacagcaagtatgggaaaagttcttatcttccgagaccccccgcatcaatgtgtttatggcagtgccaacaatctataccaagttgatggagtattacgatcgacattttactcagccccacgcccaagattttctccgcgcagtgtgcgaagaaaagataagacttatggtatctggttccgctgccctacctctcccagtgcttgagaaatggaagaacatcactgggcacaccttactggaaaggtacggaatgacggagatcggcatggctctgtcaggacccctgacaaccgccgtgcggctgcctggcagtgttgggaccccgctgcctggggttcaggtacgcatcgtctccgaaaacccacagcgggaggcgtgtagttacaccatccatgctgagggggatgaaagagggacgaaggttaccccagggtttgaggagaaggagggcgagctcctagtgcgcgggccctctgttttccgcgagtactggaataagcctgaggagactaagtccgccttcaccctagatggctggtttaaaaccggtgacactgtagtgttcaaagatggccaatactggatccggggccgaacttcggttgatattatcaagacagggggatacaaagtctctgctctcgaggtcgaatggcacctgttggctcatccaagtattaccgatgtggcagtcattggcgtgcctgacatgacatggggacaacgagtcacagccgttgtcactctgcgcgagggacactccttgagccacagggagctcaaggagtgggcccggaatgtgctggccccttacgcagtccctagtgagctcgtccttgtggaagaaatccctcgcaatcaaatggggaagatcgataaaaaggctctgattagacacttccatccttcctag

SEQ ID NO: 177884 - DNA, 714 bp, synthetic construct
  misc_feature 1..714: note = Description of Artificial Sequence: Synthetic coding sequence
  source 1..714: mol_type = other DNA
atgctgccccacgtggtgctgaccttccggcggctgggctgcgccctggccagttgtcgtttagctccagccagacacagagggtcgggcttactgcacaccgccccagttgcaagatcagacaggtcagcacctgtgtttacccgggcgttggcctttggtgaccggattgcgctggtagatcagcacggacgacacacttacagagaactgtacagtaggtcactgagactgtctcaagagatctgtagactgtgtggatgtgtggggggtgatctgcgcgaggagagggtttcattcctctgcgccaacgacgcctcatatgtggtggcccagtgggcttcatggatgtctggtggagtggcggtgcccctatatagaaagcacccagccgcacagctcgagtacgttatctgcgatagccagagcagcgtggtcttggcctctcaggagtatttggaactactgagcccagtcgtgcgaaaattgggcgtcccattgctccccctgacccccgctatctacaccggtgccgtagaggagccggccgaagtcccagtaccagaacaggggtggaggaataagggcgccatgattatttacacctcaggcacaactggcagacctaagggagtgctgtcgactcaccaaaacatcagagcagtggtgacagggctcgttcacaagtgggcttggacaaaggacgatgtttag

SEQ ID NO: 177885 - DNA, 2097 bp, synthetic construct
  misc_feature 1..2097: note = Description of Artificial Sequence: Synthetic coding sequence
  source 1..2097: mol_type = other DNA
atgcaggcccacgagctgttccggtacttccggatgcccgagctggtcgacttcaggcaatacgtgcggaccctccctactaacaccctgatgggatttggggcatttgccgccctgaccaccttctggtacgcaacaagacccaagccacttaagccaccctgtgatctctctatgcagtccgtggaagtcgcaggcagcggcggcgcaagaaggagcgccctgctcgactctgatgagccactggtctacttctacgatgacgtgacaacgctctacgaaggctttcaacgaggcatacaggttagtaacaacggaccctgtcttggaagccgcaaaccggaccagccttacgaatggctgtcatataagcaggtggccgaactgagcgagtgtataggttccgccctgattcagaaagggtttaagactgcgcccgatcaatttattggaatctttgcccagaatcggccggaatgggtgattatcgaacaaggatgttttgcatacagcatggttattgtgcccttgtatgacacactgggcaatgaggctatcacctatattgttaataaggcagagttatcccttgtatttgtggataaacccgagaaagccaaactgttgcttgaaggcgtagagaataagctgatccctggactgaaaatcattgtagtgatggacgcgtatggatcagagctggtcgaacggggccagaggtgtggagttgaggtgactagtatgaaggcaatggaagatctgggccgggccaatcgcaggaagccaaagcctccagctcccgaagatctggctgttatttgcttcaccagtggtaccacagggaatcctaagggtgccatggtgacacacaggaacatagtgtcagattgctccgccttcgttaaagcaaccgagaacactgttaatccatgtcccgatgatacgctcatttcatttctgcctctggcgcacatgtttgagagggtggtcgagtgcgtaatgctgtgtcatggcgccaagatcggctttttccagggggatatccggctgctcatggacgatcttaaggtcttacagcctacagttttccctgttgtgccgaggctgttgaatcgcatgtttgacaggatttttggtcaggcaaatacgacactcaaacgatggttgctcgacttcgccagcaagagaaaggaagctgagttgagatcaggcatcattcgaaacaacagcctctgggaccggttaatattccacaaggtgcaatcgtcattagggggaagagtgcgcctaatggtgactggggctgccccagtttcggccaccgtgctgacattcctacgcgctgccttgggatgtcagttttacgagggatacggccagaccgaatgtactgctggatgttgcctgaccatgcccggcgactggaccgccggtcacgtgggtgctcccatgccctgcaacctgattaagctcgtggatgttgaggagatgaattatatggcagccgagggtgaaggagaagtgtgtgtaaagggcccgaacgtgttccagggttacctgaaagatccggcgaagacagcagaagctctggacaaagacggatggctgcatacaggcgatattggtaaatggctgccaaacgggacgctgaagatcattgatagaaaaaagcatatcttcaagttagcgcagggtgagtatatcgcgcccgagaaaattgaaaacatttacatgaggtcggagccagtcgctcaggtattcgttcacggagaaagcttgcaagccttccttattgctattgtggtgccagacgtggagacactatgctcttgggcgcagaagaggggctttgaggggagcttcgaagaactgtgcaggaataaggacgtgaagaaggctattctggaagacatggtgcgcttaggaaaagactctggtctgaaaccgttcgaacaggtgaagggtataaccttgcatcctgagctgttctctatagacaatgggctgctgactccaactatgaaagccaaaagaccagagctgcggaactacttccgttcacaaattgacgatttatactcaacgattaaagtctag

SEQ ID NO: 177886 - DNA, 1584 bp, synthetic construct
  misc_feature 1..1584: note = Description of Artificial Sequence: Synthetic coding sequence
  source 1..1584: mol_type = other DNA
atggtgatcgtgcccctgtacgacaccctgggcaacgaggccatcacctacatagtgaataaggccgagctaagcctcgtgtttgtcgataaaccggagaaggccaagctcttgttggaaggggtggaaaataagctcatcccaggactgaagattatcgtggtgatggacgcatacggatccgaacttgtcgaaaggggccagcgctgcggggtagaggtgacctccatgaaagcgatggaagacttaggacgggcaaaccgccgcaagcccaagccccctgcgcctgaggatctggctgtgatatgcttcacctctggtaccaccggaaacccgaagggggccatggttacgcacagaaatattgtttccgattgcagtgccttcgtgaaggcgacagagaacaccgttaatccctgccctgatgatacgctcatctctttcctgccgctggcgcacatgtttgagagagttgtggaatgtgtgatgctgtgccatggagccaagatcgggtttttccaaggagatatacgcctgcttatggatgatttgaaggtgctgcagcccaccgtgtttcctgtggtgcccaggctgctcaatagaatgttcgaccgaattttcggccaggcgaacacaaccctgaaacgatggttgttggacttcgcctcgaaacgaaaggaggccgaacttagatctggcatcattcgcaacaactccctgtgggatcgcctcatttttcacaaagttcagtcaagtctggggggcagggtgcggctaatggtgaccggagccgcccccgtaagtgccaccgtgctaacctttctccgcgccgcccttgggtgccagttctacgagggatacggacagacagaatgcaccgctgggtgttgcttgacgatgcctggggactggactgctggacacgtgggtgccccgatgccttgcaacctgatcaagttggtcgacgtggaggaaatgaactatatggcagcggagggtgagggggaggtgtgcgtgaagggacccaacgtgtttcagggctaccttaaagatcctgcgaagacagccgaagccctggataaagatggctggctgcacaccggcgacattggaaagtggcttcccaatggtacccttaaaattattgataggaagaagcatatctttaagctcgcacagggagaatatatagcccctgaaaagatcgagaacatttacatgagaagcgaaccggtagcacaggtttttgtgcacggggagtcccttcaggcctttttaatcgcaatcgtcgtgccagacgtggaaactctgtgcagttgggcacagaaacggggatttgaagggtcatttgaagagctgtgccgaaataaagatgtcaaaaaggcaatcctggaagacatggtgcggctggggaaagactctggacttaagccatttgagcaggtaaagggcattactctgcatccagagttattctcaatcgataacgggttactgacgccgacaatgaaggctaaacggcctgagttgcgaaactactttcgctcccagatcgacgatttatatagcactatcaaggtctag

SEQ ID NO: 177887 - DNA, 1584 bp, synthetic construct
  misc_feature 1..1584: note = Description of Artificial Sequence: Synthetic coding sequence
  source 1..1584: mol_type = other DNA
atggtgatcgtgcccctgtacgacaccctgggcaacgaggccatcacctatatcgtgaataaagccgaactgagcttggtgttcgtggacaagcccgaaaaagcgaaactgctcttggaaggcgtagagaataagctgatacctggcctgaaaattattgtcgtgatggacgcctacgggagtgagttagttgagcggggacagaggtgcggtgtggaggtcaccagcatgaaagcaatggaggatctgggaagggcgaaccgccgtaaacctaagcctccggcgcctgaggacctagctgtcatctgttttacaagcggcaccaccggaaatccaaaaggcgccatggtaacacaccgcaacatcgtgtccgattgcagtgcctttgttaaagctactgagaacacagtaaatccatgtccagacgacacccttatttccttcctccctctcgcgcacatgtttgaaagagtcgtagagtgcgtaatgctgtgccatggggctaagatcggcttcttccagggcgatatacgtctcctcatggatgacctgaaggtacttcagccaaccgtttttccagtggtgcctagattgctgaacagaatgtttgatcgcattttcggtcaggctaacactacattgaaacggtggttgctggatttcgcctccaagaggaaggaggcggagctccgcagcggcattatacgtaataacagtctgtgggaccggctgattttccataaagtgcagagcagtcttggcggcagggtccgtcttatggtaacgggagctgccccagtcagcgctaccgtgttgactttcctgcgggccgccttgggctgtcaattctatgaaggatacggtcagaccgaatgtactgccgggtgttgtttaacgatgccaggagattggaccgccgggcacgtcggcgccccgatgccgtgcaatcttattaagcttgtggatgttgaagaaatgaattacatggctgccgaaggcgaaggagaggtctgtgttaaaggccctaacgtgtttcaggggtatctgaaagaccctgccaaaacggctgaggcgctggataaggatgggtggctccacaccggcgacatcggtaagtggctcccaaatggtaccttgaaaatcatcgatagaaagaagcatatcttcaaattggcgcaaggggagtacattgccccagaaaagattgagaacatatacatgcgttctgaaccagtggcccaggtgtttgtccatggggagtcgctgcaggcatttttaattgccatcgtggtgcccgacgtggaaacactgtgtagctgggcccagaaacgaggatttgagggctccttcgaagagctgtgccgcaacaaagacgtcaaaaaagcaattctcgaagacatggttaggttagggaaagactcaggtttaaaaccatttgaacaggtcaaaggaatcacccttcacccagagttattttcaatagacaatgggctactcacacccacaatgaaggctaagcgccctgagttacgcaattacttcaggtctcagatcgatgatttgtattccaccataaaggtgtag

SEQ ID NO: 177888 - DNA, 2097 bp, synthetic construct
  misc_feature 1..2097: note = Description of Artificial Sequence: Synthetic coding sequence
  source 1..2097: mol_type = other DNA
atgcaggcccacgagctgttccggtacttccggatgcccgagctggtggacttcagacagtacgtacgaacgttgcctacgaatactctcatggggttcggagctttcgccgcccttactaccttctggtatgccacacgcccgaagccgctcaaacccccatgtgatctgtcaatgcaaagcgtggaagtggcaggctccggcggcgcaaggcgatctgcactactggactcagacgaacccttggtctacttttatgatgatgtaaccactctatacgagggcttccaacggggcatccaagtgtcgaataacggcccctgtctcggttctaggaaacctgatcagccatatgaatggctgtcctacaaacaggttgccgaactttctgagtgtataggctcggccctgatccagaaaggcttcaagaccgcacctgatcaattcataggaatcttcgcccagaataggcctgagtgggtgataattgaacagggctgttttgcgtatagcatggtgattgtgcccttgtacgacacccttgggaacgaagcaattacctatatcgtgaataaggctgaactcagcctggtgttcgtagataaaccggaaaaggccaagttgctactggaaggcgtggaaaacaaactgatcccgggcctcaagatcatcgtggttatggatgcatacggctccgaactggtcgaaagggggcagcgctgtggtgtggaagtcacgagcatgaaagctatggaagacctcgggagggccaataggaggaaacctaagccacctgctcccgaagacttggctgtgatttgctttacaagcggtactaccgggaaccccaagggagccatggtgacccaccgaaatattgtaagcgattgtagcgcgtttgtgaaggccacagagaacaccgtcaacccgtgtcccgacgatacactgatctcctttctgccactcgcccacatgtttgagagggtggttgagtgcgttatgctgtgtcacggagccaagatcggattttttcaaggagatataagattactgatggacgatcttaaagtgcttcagcctaccgtctttcctgttgttccacggcttcttaatcgcatgttcgaccggatatttggtcaggccaatacaaccttaaagagatggctgttggactttgcctcaaagagaaaagaggccgaactccgatccggtattatcagaaataattctctttgggatagactaatattccataaggttcagtcaagcctcgggggcagagtgaggctcatggtgactggagcagcgccagtttctgcgaccgtgttgactttcctccgagccgcgctgggttgtcagttctacgaaggctacgggcaaaccgagtgcaccgcaggctgttgtttgaccatgcccggtgactggaccgccgggcacgtgggtgcacccatgccctgcaatctgataaagctggtagatgtggaggagatgaattacatggctgctgagggggagggtgaggtgtgtgtgaaagggccaaacgtgtttcaggggtatctcaaggatcctgccaaaaccgccgaagccctggataaagacggttggttgcatacgggggacattgggaagtggctgccgaatggaacgttgaaaatcatcgacagaaaaaagcacatcttcaagttagcccagggagaatatatagccccagaaaaaatagaaaacatatacatgagaagcgagcccgtcgcacaggtcttcgtgcacggagaatcactgcaggcctttctcatagctatagtggttcccgatgtcgaaaccctgtgctcctgggcacagaagagagggtttgagggcagcttcgaggagctctgccgaaataaagatgtaaagaaggctattctcgaggacatggtccgcttgggaaaggactctgggctgaagccgttcgagcaagtcaaaggaattactctccaccctgaattgttctctatagataacggcttactgacgcccacaatgaaagctaagcgccccgagcttcggaattattttcgcagccagattgatgatctgtacagcactattaaagtctag

SEQ ID NO: 177889 - DNA, 1995 bp, synthetic construct
  misc_feature 1..1995: note = Description of Artificial Sequence: Synthetic coding sequence
  source 1..1995: mol_type = other DNA
atgcaggcccacgagctgttccggtacttccggatgcccgagctggtcgattttcggcagtacgtgcggacactccctaccaatacactaatgggtttcggagcctttgccgcattaaccactttctggtatgccacaagacccaagccgctgaaaccaccctgtgacctgagcatgcagtcagttgaagtagccggaagcggcggcgccaggcgctctgccctgcttgactctgacgagcctctcgtttatttctatgacgatgtcactactctgtacgagggcttccagcgtggcatccaggtgagcaacaacggtccatgtttaggctctaggaagccggatcagccatatgaatggctgagctacaaacaatgggtgattatcgagcaaggctgtttcgcctactccatggtaatcgtgcctttgtacgataccctgggtaacgaggccattacatacatcgtcaacaaagctgagctgtccctggtatttgtcgacaagcccgagaaggccaagctgctgctggagggtgttgagaataaactgatacctgggctgaaaatcatcgtggtgatggacgcttatggatccgaactcgtcgaaagagggcaacggtgcggagtagaggtgactagcatgaaggccatggaagacctcggtcgggctaatcgccggaaacctaagccacctgctccggaagatctggctgtgatctgttttacttcagggacaaccggaaatcctaagggagcgatggtcacacatcggaacatcgtatctgattgtagcgcgttcgtaaaggctactgaaaatactgtaaacccctgtcctgatgacactctgatctctttcctgcccctggctcatatgtttgagcgtgtcgtggagtgtgtaatgctgtgtcacggagcgaaaataggtttctttcagggcgacatcaggctcttaatggatgacctgaaggtcttacagccgacagtgtttcctgtggtccccaggctgttgaataggatgtttgacagaatatttggtcaagctaacacaactctcaagcgatggctgttggactttgcatccaaacggaaggaggccgaactgcgaagcgggatcatccgaaataactccctatgggaccgccttatatttcacaaggtgcagtcctctcttggaggacgcgtgcgcctgatggttactggcgctgcaccggtatcagcaacggtcttgacctttctgagagcggcccttggttgtcaattttatgaaggctatggccagacagagtgcaccgcaggctgctgtttaaccatgccgggcgactggaccgccggtcacgtgggtgcccccatgccctgtaatctgatcaaactggtggacgtggaggagatgaattacatggcagccgaaggcgagggggaggtttgcgtgaaagggcccaatgttttccaaggatacctgaaagacccggccaaaacagctgaggccctagacaaggacggctggctgcacaccggagacataggcaaatggctgcctaatggaactctgaaaatcatagatagaaaaaagcacatattcaaactggcccagggtgagtatattgcacccgagaagattgagaatatctacatgcgatccgaaccagtggcacaggtattcgtgcacggcgagtcattgcaggctttcttaattgccattgttgtccccgacgtggagactttatgcagttgggctcagaaacggggctttgagggtagctttgaggagctgtgccgaaataaagacgtgaagaaagccatactggaagatatggttcgattggggaaggactccgggctcaaacctttcgagcaggtcaagggcatcactctgcaccctgagctcttttcaattgacaatggactgctcaccccaactatgaaggctaagaggccagaacttagaaactattttagatcccaaatcgatgacctttattcaaccatcaaggtgtag

SEQ ID NO: 177890 - DNA, 2097 bp, synthetic construct
  misc_feature 1..2097: note = Description of Artificial Sequence: Synthetic coding sequence
  source 1..2097: mol_type = other DNA
atgcaggcccacgagctgttccggtacttccggatgcccgagctggtggactttcgtcagtatgtgagaaccttacccactaatactttgatgggtttcggggccttcgcagccctgaccacattttggtatgcaacaaggccgaaaccgctaaagcccccttgtgacctgtcgatgcagagcgttgaagtggctgggagcggaggcgcacggagatctgccttgctggactctgatgagcctttggtttatttttatgacgacgtaacaaccttgtacgagggctttcagaggggaatccaagtgtctaacaacggcccatgcttggggagtaggaagcctgaccagccatacgagtggcttagctacaagcaggtagcagagctaagcgaatgcattgggtcagcattaatccagaaggggtttaagactgcaccagatcaatttattggaatttttgcccagaaccgccccgaatgggttattatcgaacaggggtgctttgcatatagcatggtgatcgttccgctgtacgataccctcgggaacgaggcaataacatacatcgtgaataaagccgaacttagtttggtgtttgtcgataaacctgagaaggccaaattactgcttgagggggtagagaacaaattgattccagggcttaagattattgtggtaatggatgcatacggcagcgagctggtggaacggggtcagcgatgtggagtcgaggtgacctctatgaaggcgatggaagacctgggacgggccaaccggcggaaacccaagccccccgctcccgaggacttagcggtcatttgcttcacatccggcactaccggaaatcccaagggcgctatggtgacgcatcggaacattgtttccgactgctcagcctttgtcaaggccactgagaacacagtgaatccttgccctgacgacacactgattagcttcttgcccctggcacacatgtttgaaagggtcgtcgagtgcgtgatgctgtgccatggggctaagatcggtttcttccagggtgacatacgactgcttatggacgacctgaaagttctgcagcccacggtcttcccggttgtccccaggttgctgaatcgtatgttcgatagaatatttggacaggcaaacacaacccttaagaggtggctcctggacttcgcgtcaaagcggaaagaagccgagctgcgctctggtattattcgtaataattctctgtgggacagacttattttccataaggtgcagagcagcctgggtggcagagtgaggctcatggtgaccggcgcagctccagtctccgccacagtgctgacgtttctgcgcgctgctttaggttgccagttctacgaaggctacggccagaccgaatgtacggcaggttgttgtctgaccatgcccggggattggaccgcgggccacgtcggcgctcccatgccctgcaacctgataaaattagtagacgtggaagaaatgaactatatggcagctgagggagagggcgaggtatgtgtgaaagggcccaacgtcttccaagggtacttaaaggatccagctaagaccgcagaggcactggataaagatggatggttgcacactggagatatcggtaagtggctccctaacggcacgctgaaaatcattgaccgcaagaaacacatctttaagctggctcaaggggagtatatagcccctgagaaaattgagaacatttatatgaggagcgagccggtggctcaggtgtttgttcatggtgagagtctccaagcgtttttaattgctattgtggtgccggatgtcgaaacgctgtgttcatgggcccaaaagagggggtttgaaggctcctttgaagagctttgcagaaataaagacgtgaaaaaagccattctcgaggacatggtgcggctaggaaaagacagtggcttgaagccattcgaacaggtcaaaggaatcacactgcatccggagctgttctccatcgacaacgggctccttacaccgacaatgaaagccaaacggcccgaactgcggaattatttcagaagccagattgatgacctctattccacaatcaaagtgtag

SEQ ID NO: 177891 - DNA, 2163 bp, synthetic construct
  misc_feature 1..2163: note = Description of Artificial Sequence: Synthetic coding sequence
  source 1..2163: mol_type = other DNA
atgaacaaccacgtgagcagcaagcccagcaccatgaagctgaagcacactattaacccaatcctgttgtattttatccacttcttaatatcactgtatactatactgacatacattcccttctatttcttctcagagtcccgccaggaaaagtccaatagaattaaggctaaaccggttaactccaagccagatagtgcctatcgcagcgttaactcgctcgatggactcgcgtcggtgctgtatcctgggtgtgatacactagataaggttttcacatatgctaagaacaagttcaagaacaaaagactgttgggcacacgtgaagtcctgaacgaagaggatgaggtccagcctaatggtaagatcttcaaaaaggtaatcttgggtcagtacaactggctgtcctacgaggatgtctttgtccgggcattcaattttggcaatggtctccagatgctgggacagaagcccaaaacaaatattgctatattctgtgaaacacgggcagaatggatgatcgccgcccaagcctgctttatgtataatttccagttggtgacactgtacgcaaccttaggcggacctgcgatcgtgcacgcgcttaatgagaccgaggtgaccaatattattacaagtaaggagctgctgcagactaaacttaaggacatcgttagcctggtgccacggctgcggcatattatcacagtcgacggaaaacccccaacatggagcgagttccctaaaggcataatcgtacatacaatggctgcagtggaggctctcggtgccaaggcttccatggaaaaccagcctcacagcaagcccctgccttcggacatcgccgtgataatgtatacatctggctcgactggcttgcccaagggcgtcatgatctctcattctaacattattgccgggattacgggcatggctgagcggattccggagttgggggaggaagacgtgtatatcggctatctgccccttgctcatgttctagagctatctgccgagttagtgtgtttgagccacggatgccgcattggttatagttctcctcagacgctggccgaccagagcagcaaaattaagaaaggcagcaagggggacactagcatgctcaagccgactctcatggcggctgtacccgagatcatggaccggatttataaaaatgttatgaataaggtgtctgagatgagctcattccagcgaaatctttttatcctggcttacaactacaagatggaacagatctctaaaggtaggaacaccccactgtgcgacagtttcgtattccgcaaggtaagatccttgctgggtggcaatattcgcctgctactgtgtgggggcgctccattgtcagcaacaacgcagcgcttcatgaacatttgcttctgctgcccagtgggacagggctatggcctgaccgagagcgcaggggcaggcaccatcagtgaagtgtgggactacaacaccggacgtgtgggcgctccccttgtttgctgcgagattaagctgaagaactgggaggagggtgggtactttaatacggataaaccccacccaaggggggaaatcttgatcgggggccaatctgttaccatgggctattacaagaatgaggcgaaaacaaaagccgatttcttcgaagacgagaacggtcagcggtggctgtgtaccggggacatcggggagttcgagcctgacggatgtctgaagataatagataggaagaaggaccttgtgaagctgcaggctggcgagtacgtgtcactcgggaaagtagaggcggctttaaagaatcttcccttagtggataacatctgcgcatacgccaattcctaccactcttacgtgatcggtttcgtggtgcccaaccagaaagagctgaccgaactagcgcgcaaaaaagggctgaaaggaacgtgggaagagctgtgcaattcctgcgagatggagaacgaggtgttgaaggtcctttctgaggccgctatcagcgcatccctggagaaatttgagatccccgtaaaaattagactgtcacccgaaccatggactcccgaaaccggccttgtcacagatgcttttaagctgaagcgaaaagagcttaaaactcattatcaggccgacatcgaacgcatgtacggtagaaaatag

SEQ ID NO: 177892 - DNA, 2163 bp, synthetic construct
  misc_feature 1..2163: note = Description of Artificial Sequence: Synthetic coding sequence
  source 1..2163: mol_type = other DNA
atgaacaaccacgtgagcagcaagcccagcaccatgaagctgaagcacacaatcaacccaatcctcctgtactttatccactttctgattagcctatatactatcctgacctacattcctttctacttcttctcggagagccgacaggagaaatcaaaccgcataaaggctaagccagtcaacagcaaacccgatagtgcatataggtccgtcaacagcctagacgggttggccagtgtgctgtaccccggatgcgacacgctggataaggtgttcacatacgccaagaacaaattcaagaacaagagactcttaggcaccagggaggtcctcaatgaagaagacgaagtgcagcctaatggcaaaatttttaaaaaggtcattcttgggcaatataactggctttcatatgaggacgtatttgtcagggccttcaatttcggtaatgggctgcagatgttgggacagaagccaaaaacaaatattgccatcttttgtgagaccagggcggaatggatgattgccgcccaggcttgtttcatgtacaattttcaactggtgaccctgtacgccaccttgggcggcccagccattgtgcatgcattgaatgaaaccgaggtcacaaacattatcacctcaaaagagctgctgcagactaagctgaaagacatagtgagtctggtccctaggcttcgacacattattaccgtagatggtaaacccccaacctggagcgagttcccaaaaggcatcatcgttcacacaatggccgcagtggaggctcttggagccaaggcttctatggagaaccagccgcatagtaagccactcccctcagatatagctgtgattatgtataccagtggctcaactggattgccgaagggagtcatgattagtcactcaaatatcatcgccggcattacggggatggcagagcgtatcccagaactgggggaggaagatgtgtacatcggatacctgccactggctcacgtactggagctgagcgccgaactggtgtgccttagtcatgggtgccgtatcggttacagttcgccccagaccttggcagaccagtcttctaaaattaagaaaggtagtaagggggatacaagcatgctcaaacccacactgatggccgcagtgccagagatcatggatcgcatttacaaaaacgtaatgaataaagtgtctgaaatgtccagttttcagcggaacctcttcattttggcatacaattacaaaatggagcagatctctaaggggaggaatacacccctctgtgacagcttcgtcttcagaaaggtgaggagcctgcttggagggaatatacgtcttttattgtgtggcggtgccccactaagtgcgacaacacagagattcatgaatatttgcttctgttgccctgtgggccagggctacggcctgacagagtcagctggagctgggacaatcagcgaagtgtgggactataacaccggtcgcgtcggcgctccgctcgtctgttgcgagattaagctgaaaaactgggaagaaggcggttactttaacactgacaaaccccatcctcgcggagagatcttgatcggaggccagagtgtgacaatgggatactataagaacgaggcaaaaaccaaggcagactttttcgaggacgaaaatggtcagcgctggctttgtactggagacataggcgaattcgaacccgatggctgccttaaaataattgacagaaaaaaggacctcgtgaagctccaggcgggggagtacgtgtctctgggcaaagtcgaagccgctttaaagaacttaccccttgtggacaacatttgcgcgtatgctaattcttaccatagctatgtaattggattcgtcgtccccaatcagaaggaactgaccgagctggcacggaaaaaagggcttaaggggacatgggaagaactttgcaacagctgcgagatggaaaatgaggtgctgaaggtgctaagcgaagccgctatctccgcttcattggagaagttcgaaatccctgtgaagatccggctctccccagagccatggacaccagagaccggcctcgtgaccgatgcatttaagctgaagcgcaaagagcttaaaacacattatcaggcggacatcgagcggatgtatgggaggaagtag

SEQ ID NO: 177893 - DNA, 267 bp, synthetic construct
  misc_feature 1..267: note = Description of Artificial Sequence: Synthetic coding sequence
  source 1..267: mol_type = other DNA
atgaacaaccacgtgagcagcaagcccagcaccatgaagctgaagcacacgattaacccgatccttctttatttcatccacttcctgattagcttatatacaatattgacctacatccctttctatttcttctccgagtcacgccaggagaagtcaaaccgcataaaagccaagcccgtgaatagcaaacctgacagcgcctacaggtcggtgaattcacttgatggcctcgccagtgtactttaccccggatgtgatactctatag

SEQ ID NO: 177894 - DNA, 288 bp, synthetic construct
  misc_feature 1..288: note = Description of Artificial Sequence: Synthetic coding sequence
  source 1..288: mol_type = other DNA
atgaacaaccacgtgagcagcaagcccagcaccatgaagctgaagcatacaatcaatcccatcctgctctacttcattcacttccttatttccctctatactatcttgacatacattccattttactttttcagtgaaagccgtcaggagaaatccaacagaattaaagcaaaacctgtaaatagtaagcctgactcagcctaccgctcggtgaatagtttagacggactggcctccgtcctctacccgggctgcgacaccctagacaaagtctttacctacgcatag

SEQ ID NO: 177895 - DNA, 2052 bp, synthetic construct
  misc_feature 1..2052: note = Description of Artificial Sequence: Synthetic coding sequence
  source 1..2052: mol_type = other DNA
atgctgttcatcttcaacttcctgttcagccccctgcccacccccgcccttatctgtattctgacctttggtgcggccatcttcctgtggctgataactcgaccccagcccgtgctgccactgctagacctgaacaaccaatccgttgggattgagggcggggcaagaaagggcgtgagccagaaaaacaacgatctgactagttgttgttttagcgacgcaaaaaccatgtatgaggttttccagaggggtttggctgtgtccgataacggaccctgtctgggttatcgtaaaccaaatcagccctatcggtggctcagttataagcaagttagtgaccgcgccgagtacttaggatcatgcctgctgcataaaggttataagtcctctcccgatcagttcgtcggtatctttgcgcaaaaccgccctgaatggatcatctctgaactcgcctgctacacttacagcatggtggctgtgcccctgtacgacaccctgggaccggaggcaatagtgcacatcgtgaataaagctgatatcgcgatggtgatatgtgacacgcctcagaaagcgttggtcctgattggaaacgtggagaaagggtttaccccttcattgaaggtgattatcctgatggatccgtttgacgatgacctaaagcagaggggggagaaatcaggtattgagatactgagcctgtatgacgcagagaatttaggcaaagagcacttccgcaagcctgtcccaccatctccggaggatttgagcgtgatctgcttcacatccgggactacaggcgaccctaagggagcgatgataacacatcagaacatcgtgtccaatgcagctgcctttctgaaatgtgtggagcacgcatatgaacctacgccagatgacgtggccatcagctaccttcccctggcccacatgtttgagcgaattgtccaagctgtggtgtacagttgcggcgccagggttggcttctttcaaggcgacattcggctgttagctgacgatatgaaaacattgaagcctaccctctttccggctgtcccccgcctgctcaacaggatatatgacaaggtacagaacgaagctaagacgcctttgaagaaattcctactaaagctggctgtttcaagcaaattcaaggagctccagaaagggatcattagacacgacagcttctgggataagcttatcttcgccaaaattcaggactctctgggggggagggtgcgagtgattgtcacaggtgctgctcccatgagcacctccgtcatgaccttctttagggctgccatgggatgtcaggtgtatgaggcctatggacagactgagtgtacgggtgggtgcacttttactctccctggagactggacatccggacacgtgggcgttccattggcttgcaactatgtaaaactggaggatgttgccgatatgaactattttaccgttaataacgaaggggaagtttgcattaaggggactaatgtgttcaagggttatctgaaggatcccgagaaaactcaggaagccctggatagcgacggctggctacacacgggcgatatcggtagatggttacctaacggtacactcaagataattgatagaaaaaagaacatcttcaagctcgcccagggggagtacatcgcacccgaaaaaatcgaaaatatatataatcgttcccagccggtcttacagatattcgtccatggagaatctctgcggtcctctctggtgggggtagtggtcccagacacggatgtcctcccctccttcgccgctaaactaggagtcaaaggctccttcgaggagttgtgccagaaccaggtagtgagagaagcaatccttgaggacctacagaagatcggcaaggaatcaggactgaagactttcgagcaggtgaaggccatcttcctacatccagaacccttctcgattgagaacgggttgctaacccctactctgaaagcgaagcgaggtgagctttccaagtacttcagaacacagattgacagtttatacgagcacatacaggactag

SEQ ID NO: 177896 - DNA, 2052 bp, synthetic construct
  misc_feature 1..2052: note = Description of Artificial Sequence: Synthetic coding sequence
  source 1..2052: mol_type = other DNA
atgctgttcatcttcaacttcctgttcagccccctgcccacccccgcgctcatttgtattctgactttcggtgcagcgatcttcctgtggctcatcacccgacctcagcccgtcctaccattgcttgacctcaataaccaaagcgtaggcattgaggggggcgcccggaagggagtctctcaaaaaaacaatgatctgacctcctgttgcttcagtgacgccaaaaccatgtatgaggttttccaacgcgggctggctgtctcggacaacggcccctgcctggggtaccgtaaacccaaccaaccctaccgttggctcagttataagcaggtctcagaccgggccgaatacttgggttcttgtctcttgcataagggttataaaagcagccctgaccaattcgtgggcatctttgcccaaaatcgacccgaatggatcatcagcgaactggcgtgctacacatatagtatggtggcggtccctctgtatgacaccctaggccccgaggcgatagtgcatatcgttaacaaggctgacatcgccatggtaatttgtgacactccacagaaggctttggttcttatcggtaatgtcgagaaggggtttacgccttccctgaaggtcatcattctgatggatcccttcgatgatgaccttaaacaaagaggagagaaaagcggcattgagatattgtcactttacgacgcggaaaatttaggcaaggagcattttaggaagcccgtgccgcctagtcccgaagatctaagtgttatttgctttacctctgggacaaccggcgacccaaagggggcaatgatcacgcatcaaaatatcgtcagtaatgcggcagctttcctaaaatgcgtggagcacgcttacgaacccactcctgatgacgtggcaatatcttatttgcctttggctcacatgtttgagagaatcgtccaggcagtagtttacagctgtggcgctagagttggtttctttcaaggcgatattaggctgttggccgacgatatgaagactttgaagcccacactgttccctgcagttcctaggctattgaatcggatctacgacaaagtgcagaacgaggcgaaaactcctttgaaaaagttccttttgaagctggcagtgtctagcaaattcaaagaactccagaaaggcatcatcaggcatgatagtttttgggacaagcttatctttgccaagattcaggactctctgggggggagggtgcgtgtcatagtgactggcgcagccccaatgagcacctcagttatgaccttctttcgggcggcgatgggctgtcaggtgtatgaggcgtatggacagactgaatgcacaggaggttgcactttcacccttccaggtgattggacgtcaggacatgtgggggtccccctcgcctgcaattatgtgaaactggaggacgtggccgacatgaactatttcacagtgaacaacgagggggaggtgtgcattaagggcactaatgtgtttaaggggtatctgaaagatcctgagaaaacacaggaggctctggacagcgatgggtggctgcatacaggagatatcggcagatggttacccaacggaactctcaagattatcgacaggaagaaaaacatattcaagctggcccagggagaatatattgccccagagaaaatcgagaacatctataaccgcagtcagcctgtcctgcaaatttttgtacatggtgagtccctccgatcttctttagtgggagtcgttgtcccagacaccgatgtactgcctagcttcgcagccaagctgggagtgaaggggtcctttgaggagctgtgtcagaatcaggtggtgagagaggccattcttgaagatctccagaagattggaaaagagtctgggctgaagaccttcgagcaggtgaaagcgatttttttgcaccccgaacctttctctatcgagaacggcctcctgacccctacactgaaagcaaagcggggtgagctgagcaagtacttccggactcagatcgatagtctgtacgagcacattcaggactag

SEQ ID NO: 177897 - DNA, 2220 bp, synthetic construct
  misc_feature 1..2220: note = Description of Artificial Sequence: Synthetic coding sequence
  source 1..2220: mol_type = other DNA
atggacgccctgaagcccccctgcctgtggcggaaccacgagcgggggaagaaagaccgtgactcctgcggaaggaagaactcagaacccggatccccgcattcattggaggcactccgtgacgccgcaccctctcagggcctgaattttctgttgttgtttactaaaatgttgtttatatttaatttcctgttcagtcccctacctaccccagcactgatctgtattttgaccttcggggctgctatctttctttggttaatcactagacctcagccagtcctaccactgcttgatttgaataatcagagcgtgggaatcgagggaggagctcgaaaaggggtgagccagaagaacaatgatcttacttcctgttgtttctccgacgcaaaaacaatgtacgaggtgttccagcggggactggctgtctcagacaatgggccttgcctgggctatcgtaaacctaatcagccatatcggtggttgagttacaaacaggtaagcgatcgcgctgagtatctcggatcctgtctactccacaaggggtacaagtcctctccagaccagttcgtgggaatcttcgcccagaacagacctgagtggataatatccgagctggcctgctacacatactcaatggtcgcggttcctctgtatgacaccctgggtccagaggccattgttcacatcgtgaataaagctgacattgccatggtgatttgtgatacaccccaaaaggccttggtgctcataggaaacgtcgaaaagggcttcaccccctctttgaaggttattattctgatggacccatttgacgacgatttgaagcaacgtggtgaaaaatcagggattgagatcttgagcctgtacgatgctgagaacttgggaaaagaacacttcaggaagccagttccccccagtcctgaagacctgtcagttatatgcttcacttcaggaaccacgggtgatcctaaaggagccatgatcactcaccagaacatcgtgtcaaatgcggccgcttttctgaaatgcgttgagcatgcttatgaacctacacctgatgatgtggcaataagttacctccccctggctcacatgttcgagcggatcgtgcaggcagtcgtctactcgtgtggagccagggtgggattcttccagggagatatccgactcttagcagacgatatgaaaaccctcaagcccaccctgtttccggccgtgcctagattactgaaccgaatttacgacaaggttcagaacgaagctaaaaccccattaaagaaatttctgcttaaactcgcagtgtctagcaagttcaaggaactgcaaaaggggattatccggcatgattccttctgggataagctgattttcgccaagattcaggattccctggggggaagagtcagggtcatagtgaccggcgcagcccccatgtcaacatctgtgatgaccttcttccgcgcagcaatgggttgtcaggtatacgaagcctatggtcagactgaatgtacaggtggctgcaccttcaccctcccaggagattggacttcaggacacgtcggcgtgcccctagcttgcaattacgtcaaattagaagacgttgccgacatgaactactttactgtgaacaatgagggcgaggtgtgcattaaaggcaccaacgtgtttaagggatatttgaaggacccggagaaaacacaggaggcactcgatagtgatggttggctgcataccggcgacattggacggtggctcccgaacggaacactgaaaatcatcgatcgcaaaaagaacattttcaagttagcccagggagagtatatcgcacctgagaaaatcgaaaacatctataataggtcacagccagtgctccaaattttcgtgcatggagaatctctgcgcagctctctagtgggtgttgttgtgcctgacacggatgtcttgccaagttttgccgctaaactaggggttaaaggaagtttcgaagagctgtgccagaatcaggtggtaagggaagcaatattagaggatttgcagaagatcggcaaggagagcggcctgaaaacctttgagcaggtaaaagcaattttcctacaccctgaacccttcagtatcgaaaacgggctccttacccccacattgaaggccaagagaggcgagctcagtaagtactttcgtacgcagatcgactccctgtacgagcacatccaggactag

SEQ ID NO: 177898 - DNA, 1398 bp, synthetic construct
  misc_feature 1..1398: note = Description of Artificial Sequence: Synthetic coding sequence
  source 1..1398: mol_type = other DNA
atgctgttccccggcgccagcatcgtgcccgagtgctggctgctggttctcatccaaaatctcgggaaggaacactttcgaaagcccgtgcctccctcccccgaggacctctctgtgatttgttttacatcggggaccaccggtgaccccaagggcgccatgattacccatcagaacatcgtctccaacgctgccgcatttttaaaatgtgtggaacacgcatatgaaccgacccccgacgacgtagcaattagctatctacccctagctcacatgttcgagcgtatcgtgcaagctgtagtctattcatgtggtgcacgggtggggtttttccagggagacatccggctacttgctgatgacatgaagactttgaaaccaacactcttcccagccgttccaaggctccttaaccgcatctacgataaagtccagaacgaagccaaaacacctctgaaaaagttcttactaaaactcgccgtatcttccaagtttaaggaactccaaaagggaataattcgtcacgactcattctgggataagctcatttttgccaaaatacaggactcgttgggtggacgggtgagagtgatagtcacaggtgcggccccgatgagcacatccgttatgacgtttttccgtgcagctatgggctgccaggtctacgaagcttatggacagaccgagtgcactgggggctgtacattcacactgcctggagattggacctctggacatgtcggggtgccactggcctgcaattacgtaaagcttgaagacgtcgctgatatgaattactttacggttaacaacgaaggcgaggtgtgtatcaaaggtacgaacgtgtttaagggttatctaaaggaccctgagaaaactcaggaggcactggatagtgacggctggctgcacacgggagatattggtcgctggctacctaatggaacactgaagataatcgaccgtaaaaagaacatctttaagctggctcagggcgagtatattgcacctgagaaaattgagaatatctacaatcggtcccaacccgttctgcagatctttgtgcacggcgagtcgctcagatcaagcctcgtaggagtcgtcgtgccagatactgatgtactgccatcgtttgctgccaaattgggagttaagggttctttcgaggagctctgccagaaccaggtcgtccgggaggccattctagaggacctgcagaaaattgggaaggaaagcggacttaagacattcgagcaggtcaaagctatcttcctgcacccggagcccttttcaatcgagaacgggctgcttacacctacactcaaggctaaacgcggtgaactgtcgaaatattttagaacgcaaatcgatagcttgtacgaacacatccaggactag

SEQ ID NO: 177899 - DNA, 2052 bp, synthetic construct
  misc_feature 1..2052: note = Description of Artificial Sequence: Synthetic coding sequence
  source 1..2052: mol_type = other DNA
atgctgttcatcttcaacttcctgttcagccccctgcccacccccgctctcatctgcatccttaccttcggagctgcaatcttcctgtggctgatcactaggccacagcccgtgctgccattgctggacctaaataatcagtctgtcggaatagaggggggtgctcggaaaggggtcagccaaaaaaataacgacctgacctcgtgctgcttttccgacgccaaaacaatgtacgaggtgttccagcgcggcctagcagtaagtgataacggtccatgcctggggtacaggaagccgaatcagccctaccggtggctgagttacaaacaagtgtccgaccgtgccgagtacctggggagctgtctcctgcacaagggttacaagagttctccagaccagttcgtcggcatcttcgcacagaacaggccagagtggatcattagtgagcttgcctgttatacttatagcatggtggcagttcctctgtacgacactttgggtcccgaggcaatagtacatatagtcaacaaggctgacattgccatggtgatatgtgatacaccccagaaagcacttgtacttatcggcaacgtcgagaagggcttcaccccaagcctgaaagtgatcatcctaatggacccttttgatgatgatctcaagcagagaggcgagaagtcgggaattgaaatactgtcgctgtatgacgctgaaaatctggggaaggagcattttaggaagccagtcccccccagcccggaagacctgtctgtgatctgttttacatccggcacaaccggcgatcccaaaggagctatgatcacccatcagaatatagtgtcgaacgcagctgctttcttaaagtgtgtcgaacatgcatatgagcctacccccgacgacgtagctattagttatctgcccctggctcacatgtttgaaagaatagtgcaggctgtggtgtactcctgtggagccagagtcggctttttccaaggagacatccgtctgttggcagatgacatgaaaacactcaagccgacactgttccccgcagtaccaagactgctgaatcgcatctatgataaggtgcaaaacgaagccaaaacccccttaaaaaagtttctgctgaagttagctgttagctctaaatttaaagaactgcagaagggcatcatcaggcatgactcgttctgggacaaactgatcttcgctaagatccaggattcactgggcgggcgggtccgagttattgtaacaggcgctgcaccaatgtcaacaagcgtcatgactttttttagggccgccatggggtgccaggtgtatgaggcctacggacagacggagtgtacgggcggctgcacctttaccctaccaggggactggaccagcggccatgtaggagtgccactcgcctgcaattatgtcaagttggaggatgtggcagacatgaactacttcacggtaaacaatgagggcgaggtctgtattaaagggaccaacgtctttaagggatatttgaaggaccctgagaaaacacaggaggccctggactcagatggttggctgcacaccggagacatcggcaggtggctgccaaacggaaccctgaaaatcattgatcgaaaaaaaaatatctttaagctcgcccagggtgagtatatcgcccccgagaaaattgaaaacatctacaacaggagccagcctgtgctgcagatttttgtgcacggagaatccctcaggtcctcccttgtcggggtggtggttccagatacagacgtgctgccatcttttgctgctaaactgggcgtgaaagggtccttcgaggagctgtgccaaaaccaagttgtccgcgaggccattctggaggacctgcagaagatcggtaaggaatccgggctcaaaacatttgagcaggtgaaagccatcttcctccaccctgaacccttcagcatagagaacggactactgacccccaccctgaaggcaaaaagaggggagctgtcaaagtatttcaggacccagatagactcactttatgaacacattcaagactag

SEQ ID NO: 177900 - DNA, 1980 bp, synthetic construct
  misc_feature 1..1980: note = Description of Artificial Sequence: Synthetic coding sequence
  source 1..1980: mol_type = other DNA
atgctgttcatcttcaacttcctgttcagccccctgcccacccccgcactgatctgtatacttacctttggtgcagcgatattcctgtggttgatcacacggcctcagccagtacttccgctgctcgaccttaataatcagagcgtaggcatcgaaggcggcgcccggaagggggtctcccagaaaaataatgatcttacatcctgctgtttcagcgatgccaaaacgatgtatgaggtctttcaaaggggcctagctgtgtctgacaatggaccatgcctaggctaccgaaagccaaaccagccgtatagatggctcagttacaagcaggtgtcagatagggctgagtatctggggagttgtctcttacataagggctacaagtccagtcctgaccaattcgtcggaatttttgcacagaacaggcccgagtggattatttctgaactggcctgttatacctattccatggttgccgtgccactctacgatactctaggcccggaggctatcgtccacatcgtcaacaaagccgacatcgccatggtcatttgcgacacaccccagaaagcactggtgctaatcggtaatgtagaaaaaggatttacccctagcctgaaggtaattattttgatggatccgtttgatgacgacttaaaacagagaggcgaaaagtctggcattgaaatactaagtctgtacgatgcagagaatctaggaaaggagcatttccgcaagcctgtacctccttcacctgaagacctcagcgttatctgtttcacctccggtactaccggcgatccaaaaggagcgatgattacgcaccaaaacatcgtatccaatgccgccgcttttttaaagtgcgtcgaacacgcctacgaaccaactcctgatgacgtcgcaatttcatacctgccactggcacatatgttcgaaagaatcgtgcaggccgtggtatattcttgtggggcaagagtgggctttttccagggcgacattcgcctgttagcagacgacatgaagaccttgaagcccaccttgtttcctgccgtgcccagattattgaatcgtatttatgataaggtacaaaatgaagccaagacccctctcaaaaagttcttgctcaaactcgctgtctcatccaaattcaaggaattgcagaaaggcataattagacacgatagtttttgggataagctcattttcgccaagatccaggactcacttggtggccgggtgcgcgtgatcgtgacgggtgcagctcctatgtctacaagtgtgatgaccttctttagggccgcgatgggatgccaggtgtacgaagcttacgggcagacggagtgtacaggaggttgtaccttcaccctgccaggcgattggacctcaggacacgttggagtccccctcgcctgtaattacgtcaaactggaggacgtggccgacatgaattactttacggtgaacaacgagggagaagtgtgcattaagggcacaaacgttttcaaagggtacctcaaggatccagagaaaacccaggaggccctggatagcgatgggtggctgcacactggcgatataggcagatggctgcccaatggaacattgaagatcattgaccggaagaaaaatatattcaagctggcgcagggagaatacatagcgcccgagaaaatcgaaaacatctataaccgatctcaacctgtcttgcagatctttgtacacggtgagtctctaagatcatcactagtcggagtcgtggtccctgatactgatgtgttgccgagcttcgctgccaagcttggcgtaaaaggctccttcgaagagttgtgccagaaccaagtgaaagcaattttcctgcacccagaaccttttagcatcgagaacggccttctcacacccacactcaaggccaaaaggggtgaactttcaaaatacttccggacgcagatcgatagcctgtacgaacacattcaggactag

SEQ ID NO: 177901 - DNA, 2169 bp, synthetic construct
  misc_feature 1..2169: note = Description of Artificial Sequence: Synthetic coding sequence
  source 1..2169: mol_type = other DNA
atgctgaccttcttcctggtgagcggcggcagcctgtggctgttcgttgagttcgttctttctctcttggagaaaatgcagactcaggaaatcctccgaatcctgaggcttcccgaactgggagatttgggtcaatttttcaggtccttgagtgctaccactctggttagcatgggggccctggccgcaatactggcctactggtttacacatagaccaaaagccctgcaacccccatgtaatctgctaatgcagtccgaggaggtagaagattccggaggcgcacgccggtctgtcatcggatccggaccacaattacttacccactactacgatgatgcacggacgatgtatcaggtttttcgccgaggtctgtcaattagcggcaatgggccatgtctgggattccgcaaacccaaacaaccctaccagtggctcagttaccaggaagttgctgatcgcgctgaatttctgggtagtggcctgctgcaacacaattgcaaggcttgtacggaccaattcattggggtgttcgcccagaatcggcccgagtggattattgtggagcttgcgtgctacacctattccatggtggttgtgcctctgtacgacactctgggcccgggagccatacggtacataatcaacaccgccgatatttccacggtcatcgtcgataagcctcaaaaggccgtgttgctccttgaacacgtggaaagaaaggaaaccccaggcctcaaacttatcattctgatggaccccttcgaggaggcactcaaggaaagaggtcaaaagtgcggcgtggtgatcaaatctatgcaagcagtggaggactgtggacaggaaaatcatcaggctcccgtgcctcctcaaccggatgacctgtcgatcgtttgtttcacgagtggaacaaccggtaacccaaagggcgccatgctgacccatgggaatgtggtggccgattttagcggcttcttaaaagtgaccgagtcacagtgggcaccgacatgtgcagacgttcatatctcctatctgcccctagctcacatgtttgaaagaatggtgcagtccgtagtatactgtcacggcggcagagttggcttctttcagggcgacatacgactgctgagcgatgatatgaaagctttgtgccccacaattttccccgtggttcccagactgcttaacaggatgtatgacaagatcttttcccaggccaacacacctctaaaacgctggctgctggaatttgcagcaaaacggaaacaggccgaggtgcgcagtggaatcattaggaatgactctatctgggatgagcttttttttaataagatccaggcttcgcttggagggtgcgtacgaatgatcgtaacgggcgctgcaccagcctcccccacagtactcggtttccttcgcgctgccttgggttgccaggtttacgagggatacggccagacagaatgcaccgccggttgcacctttaccacccccggagattggacaagtgggcatgtgggggctccactcccctgtaaccacatcaagttagtggacgtggaggaactgaactactgggcctgcaagggagagggcgagatctgcgtgagaggccccaacgtgtttaagggctacctgaaggatcctgaccgcactaaagaagctctggattctgacggctggcttcacacaggtgacataggcaaatggttacctgctgggacactgaagatcatagataggaagaaacatatttttaagctcgctcagggggaatacgtggccccagagaagatcgagaatatctatataaggagccaacctgtagcccaaatttacgttcatggggacagtttgaaggccttcctcgtcggtattgtggtgcccgatccagaggtaatgccctcttgggcccaaaaaaggggcatagagggtacctacgctgacctgtgcaccaacaaggatcttaagaaggcaatactggaggatatggtgcggctaggcaaagagagcggcctgcactcgtttgagcaagtcaaagccattcacatccactcagatatgttttctgtgcagaatgggctgctgacacctacccttaaggctaaacgacccgaattgcgggagtattttaaaaaacaaatcgaggagctgtattccatcagtatgtag

SEQ ID NO: 177902 - DNA, 1869 bp, synthetic construct
  misc_feature 1..1869: note = Description of Artificial Sequence: Synthetic coding sequence
  source 1..1869: mol_type = other DNA
atgcagacccaggagatcctgcggatcctgcggctgcccgagctgggggacctggggcagtttttccgatccttgagcgctacaacgctggactcaggaggggccagacggagcgtaattggaagtggtccccagctattaactcactactacgacgatgccaggacgatgtatcaggtgttccgacggggactgtccatctcaggcaatggaccatgcctgggtttccgtaagccaaagcagccttatcagtggctaagctatcaggaagtagccgatcgagccgagtttctcggcagcggcctgctgcagcacaattgcaaagcttgtacggatcagtttattggcgtgtttgcgcagaaccgccctgaatggattattgtcgagctcgcctgttatacctacagtatggtcgtggtgccactttacgacacattggggccaggcgctatacgttacatcatcaatactgcagacatttctacagtgatcgtcgacaaaccccagaaagctgtcctcctgctcgagcatgtagagagaaaggagacgcctggtctgaaactaattatcttgatggacccttttgaagaagccctcaaggagcgcgggcagaagtgcggcgtggtgatcaagagcatgcaagccgtggaagactgcggtcaagagaatcaccaagctcctgtccctcctcagcctgatgatctgagtatcgtgtgtttcaccagcggtaccactggaaatccaaagggtgctatgttaacccacggcaatgtcgtcgccgatttctctggctttctgaaggtgactgaaggcgacatcagactattatcagatgacatgaaggctctctgccccactatcttccccgttgtgccaagactgctgaatcgtatgtatgataagattttttcacaagccaacacccccttgaaacggtggttactggaattcgctgcgaagagaaagcaggcggaagtcaggagtgggattatcagaaacgactcaatctgggacgagcttttcttcaataagatacaggccagcctgggcgggtgtgtgcgcatgatcgtgacaggagccgcacccgcctctccaacagtgcttgggtttctcagggcggcattaggctgtcaagtgtatgaggggtacggtcagactgagtgcacggctggctgcactttcacaactccaggcgactggacttctggccatgtcggcgccccccttccttgtaaccatatcaaactcgtcgatgtggaagagttgaactattgggcctgcaagggagagggagaaatttgtgtccgggggcctaacgttttcaaaggctacctcaaggacccagaccgaacaaaagaagccctggactcagacggatggctgcacaccggagacattggtaagtggctccctgccggaacgctcaagattatcgataggaagaagcacattttcaagctcgcccagggcgagtatgtcgcccctgaaaagattgagaacatttatatacgctcacagccagtggcccagatctatgttcacggcgattccctcaaggctttcctcgtcggtattgtcgtgccggacccagaggtcatgccatcttgggcccagaagcgtgggatcgaaggtacctatgcagacctctgcactaacaaagacctgaagaaggctattctggaggacatggtccgtttggggaaagagtctggcctgcacagctttgagcaggtgaaggcaattcacatccactccgacatgttttcagtccagaatgggctgctgacccccaccctgaaggccaagcgccccgaactgcgggagtactttaaaaagcagatcgaagagttgtatagcattagcatgtag

SEQ ID NO: 177903 - DNA, 2094 bp, synthetic construct
  misc_feature 1..2094: note = Description of Artificial Sequence: Synthetic coding sequence
  source 1..2094: mol_type = other DNA
atgcagacccaggagatcctgcggatcctgcggctgcccgagctgggagatctcgggcagttcttccggagtctgtctgccactaccctggtctccatgggagcccttgccgcaattcttgcatattggttcacccatagacccaaggctctacagccgccgtgcaacctgctgatgcagagcgaggaggttgaagattccggcggagccagacgatctgttatcggctctggacctcaactgttgacccattactatgacgatgctcgaactatgtaccaagtgtttaggaggggcttgtctatatccggcaacggtccctgtctgggattcagaaagcctaaacagccctatcagtggttatcctaccaggaggtcgccgatcgggctgaatttttggggtcaggtctgctgcaacataattgcaaagcgtgcacggatcagtttattggcgtcttcgcccagaatagacccgagtggataattgtagaactggcctgctatacatactcaatggtcgttgtacccctttatgacacacttggtccaggggctattaggtacattatcaataccgccgacataagtacagtcattgttgataagccacagaaggccgtcctcctgctggaacacgtagagaggaaagagacccccgggctcaagctaatcattttgatggaccccttcgaggaagctctcaaagagagaggacagaaatgcggagtggtgattaaaagcatgcaggctgttgaagattgcggccaggaaaaccatcaggcacccgtgcccccacagcctgacgacctgagcatagtttgcttcacatccggtactactggcaaccccaagggagctatgctgacacacggtaacgtggttgcagacttttctggctttttaaaggtaaccgaaaaagtgatctttcctcgtcaggatgacgtgcttatttccttcttaccattggcccacatgtttgaaagggtaatacaatccgtggtgtattgtcacggagggagagtgggcttttttcagggcgatataaggctgctcagtgacgacatgaaagccctctgccccacgatctttccggttgtgccaaggttacttaataggatgtacgacaagatcttctcgcaagccaatacccctcttaagaggtggctgttggagtttgccgccaaaagaaaacaggccgaggtgcgcagcggaatcattaggaacgactccatatgggacgagctgttcttcaataagatacaagcatctctcggagggtgcgtcagaatgattgtcactggagccgcccccgccagccctacggtcctgggattcttacgtgctgccctcggctgccaggtttacgaaggatatggtcagaccgaatgtaccgccggttgcacattcaccaccccgggcgattggactagcgggcatgtgggagccccgctgccatgtaatcacattaagctggtcgacgtggaggaactgaactactgggcatgtaagggcgaaggggaaatttgcgtgcgaggacccaatgtgtttaaaggctacctgaaagaccccgataggacaaaggaagccctggacagcgacggctggctccacaccggcgatataggcaagtggctgccagccggtacactcaaaataatcgataggaagaagcacatctttaaactcgcgcaaggagaatacgttgcacccgagaaaatagagaatatctacatccgtagtcagccagtggcacagatctacgtgcatggagacagccttaaagcttttcttgtgggcatcgtcgtccccgatcctgaagttatgccctcttgggcccaaaagagggggatagagggaacctacgcggatttgtgtacaaacaaagacctaaaaaaggccatccttgaggacatggtacggcttggcaaggagtctggcctgcactcttttgaacaggttaaggctatccacatccacagtgatatgttctcagttcaaaatgggctcttgactccaacgctgaaggcaaagcggcctgaactgcgagaatattttaagaaacaaattgaggaactttacagtatttctatgtag

SEQ ID NO: 177904 - DNA, 2094 bp, synthetic construct
  misc_feature 1..2094: note = Description of Artificial Sequence: Synthetic coding sequence
  source 1..2094: mol_type = other DNA
atgcagacccaggagatcctgcggatcctgcggctgcccgagctgggagacttgggccagttttttcggtctttgagcgccacgacactcgttagcatgggtgccttggcagcaattcttgcatactggttcacacacagacccaaggccctgcaacccccttgcaatttgctcatgcagagcgaggaagtcgaggatagcggtggggcccgtcgttctgtgatcggctccggtccccagctcctgacacactactatgacgacgcccggacgatgtatcaggtcttccgccgaggtctttccatctctgggaatggaccttgtttgggattccggaagcctaagcagccttaccagtggcttagctaccaggaagttgccgacagagctgagtttctgggtagcgggctcctgcagcacaactgcaaggcctgcacggaccaattcatcggcgtgtttgcacagaacaggcctgagtggataatcgtggagctggcctgctatacctatagcatggtagttgtacccctgtacgatacactgggacccggggcgatccggtatattatcaatactgcagatatatcaactgttatagtggacaaaccccaaaaagcagttttgttactagagcacgtggaaaggaaggagacacctggactgaagttgattattctgatggatccgttcgaggaggctttaaaagaacgcggccaaaagtgtggggtggttattaaatccatgcaggcagttgaagattgtggtcaggagaatcatcaggcacccgtgcctccccagccagatgatctgtctatagtctgttttacctccggtacgaccggcaatcctaagggcgccatgctgacgcacggcaatgtggtcgccgatttctctggcttccttaaagtgaccgagagccaatgggccccaacctgcgcggacgtgcacatctcctatttgcccttggctcacatgttcgagcgaatggttcaaagcgtcgtgtattgccacgggggtcgtgtgggcttcttccagggcgatattaggttgctgagtgacgatatgaaagctttatgtccaaccatcttccctgtggtgcccagactgctcaataggatgtacgataagatttttagccaggccaacacaccgctcaaacgctggctgttggagtttgcagccaagcgtaagcaggccgaggtgagatccggaattatcaggaatgactcaatatgggacgaactgttctttaataagatccaagcaagtcttggaggatgcgtgaggatgatcgtgacaggggccgccccagcctcccccactgtgttagggtttctacgggcagcattaggctgccaggtatatgaaggttatgggcaaactgaatgcacggccggctgtacctttaccaccccaggtgactggacttctggccacgtgggagctccgttgccttgcaaccatatcaaactggtagatgtcgaggaactgaattactgggcttgcaagggggagggcgagatctgtgttcgcgggcccaatgtctttaaggggtacctgaaggatcccgacagaaccaaggaggcgttagacagtgatgggtggctccataccggagatatcggcaagtggttacctgccggtacactgaaaattattgatcgcaagaaacacatctttaagctcgctcaaggagagtacgtagcacctgaaaaaatagaaaacatttacataagatcacagccagtcgctcagatatacgtgcatggagacagtttgaaggcttttctggtagggatagtggtcccagatcccgaagtgatgccctcttgggcacagaaaaggggtatcgagggcacatacgctgacctctgtactaacaaggacttaaaaaaagctattctggaggacatggtcaggctgggaaaggaaagcggccttcactcttttgagcaggtgaaggctatccacatccactcagatatgttttcggtgcagaacggccttcttacccccaccttaaaggccaaaaggcctgagcttcgcgaatactttaaaaaacaaatcgaggagctttatagcatatctatgtag

SEQ ID NO: 177905 - DNA, 2127 bp, synthetic construct
  misc_feature 1..2127: note = Description of Artificial Sequence: Synthetic coding sequence
  source 1..2127: mol_type = other DNA
atgcccgagttcgtgctgagcctgctggagaagatgcagacccaggaaattttgcgtatcctccgcctccctgaattaggtgatcttggacagttctttagatcactctctgcaacaacccttgtgtccatgggggcattagccgcaatcctggcgtattggtttacccaccgacccaaagccctccaaccgccgtgtaacctgttaatgcagtctgaagaagtagaggattctggcggggctagacggtccgttatcgggagtggaccacagctactgactcactactacgacgacgcccgtacaatgtatcaggtatttcgacgtggactcagcatttccggcaacggcccatgcttgggcttccggaagcccaaacagccctatcagtggcttagctatcaggaggtggctgatcgggcagaattccttggatccggcctcctccaacataattgcaaagcctgtacagaccagtttatcggagtatttgcccagaatagaccagaatggatcattgtggagctggcttgctatacatattctatggtcgtggtccccttatacgatactctcggccctggcgctatccgctacattattaacactgccgatatctcgactgtgatagtcgacaaacctcagaaggctgtattactgctggagcacgtggaaagaaaagagactccaggcctcaagctaataatcctcatggatccctttgaggaggccctcaaggagcgcggccagaagtgtggagtggtcataaaaagtatgcaggctgtggaggattgcggccaggagaaccaccaggctccagttcccccccagccagacgacctcagcatcgtgtgttttacctccggcacgactggcaatccaaaaggcgccatgctgactcacgggaacgtggttgccgacttcagcggtttccttaaagtgactgagaaggtaatatttcctcggcaggacgacgtcctcattagttttctccctctggcacatatgtttgagcgtgtgatccagagcgtggtttactgtcacggaggcagggttgggtttttccagggggatattcgcttgctgtcagatgacatgaaagccctctgccccacaatcttccccgtggtaccccggttgctgaaccgaatgtacgacaaaatctttagtcaagccaatactccgctaaaacggtggctgttagagtttgctgctaagcggaagcaggccgaggtgcgctcaggcatcatccggaatgactctatctgggatgaactgtttttcaacaagatccaggcctcattgggtggctgcgtccgcatgattgtgactggggctgcacccgcgtcacccactgtcctggggtttcttagagccgcgctgggctgccaggtttacgaaggctatggacagacagagtgcactgccgggtgcaccttcacgacaccaggagattggactagcggtcacgtgggggcacctctgccctgcaaccacatcaagctggttgacgtagaggagctgaattattgggcatgtaaaggagagggggaaatctgtgttcgagggcctaatgtttttaaaggataccttaaagatccggaccggacaaaagaagccttggatagtgacggatggctccacaccggtgatattgggaagtggttgccagctgggacacttaaaattattgataggaagaagcatatcttcaagctagctcaaggggaatatgttgccccagaaaagattgagaacatctacatacgctcccagcccgttgcccaaatttacgtacacggagattccctgaaggcgtttcttgtgggcattgtggtgcccgatcctgaagtaatgcccagctgggcgcagaagcgtggtattgaaggcacatacgcggacctgtgcacaaataaggatttgaaaaaagccattctggaggatatggtcagactcggtaaggagagcggcctccactcgtttgagcaagtgaaggcgattcacattcattccgacatgttctccgtccagaacggtctccttacccccaccttgaaagctaagcgaccggagctgagggaatactttaaaaagcagatcgaagaactctattctatatcgatgtag

SEQ ID NO: 177906 - DNA, 2004 bp, synthetic construct
  misc_feature 1..2004: note = Description of Artificial Sequence: Synthetic coding sequence
  source 1..2004: mol_type = other DNA
atgcagacccaggagatcctgcggatcctgcggctgcccgagctgggggaccttggacagttctttcgctctctgagtgccacaacactcgtctccatgggtgccctcgccgccattttggcttactggtttacccatcgacctaaagcactgcagccaccttgcaacctgttgatgcaaagcgaggaggtggaggacagcggcggcgcccggaggagtgtgattggaagcggcccacagctgttaacccactactacgacgacgcacgaaccatgtatcaggtgttccgtcgcgggcttagcatatccgggaacggcccatgcctgggtttccgcaaaccaaagcaaccctatcagtggctgtcttatcaggaggtggcagacagggcagagtttctcggaagcggcctgctgcagcacaattgcaaagcatgtaccgatcagttcattggcgtcttcgctcaaaaccggcccgagtggataatcgtggagctggcttgctacacttactctatggttgtcgtgccactttatgacacactgggcccaggggctattcgctacattattaataccgcagacatttccactgtgattgtggataagccacagaaagctgtgttgctgttggaacacgtggaaagaaaggagacacccgggctgaagctgattatcctaatggatcccttcgaagaggcgctgaaggaacgcggccagaaatgcggcgtggtcattaagtctatgcaggccgtggaggactgtggccaggagaatcaccaagctcccgtgccaccacaaccagacgacttgtctatagtttgcttcacatccggaaccacaggcaacccaaagggcgccatgctcacgcatgggaacgtcgtagccgacttctctggcttcctgaaagtgacagaaagccaatgggctccaacttgcgccgacgttcacatctcctatcttcccctggcccacatgttcgagcgaatggtgcaaagcgttgtgtactgccacggtggacgggttggatttttccagggggatatcagattgctgtccgatgatatgaaggccctttgtcccacaatctttcccgttgtgcctagactcctgaataggatgtacgacaagatcttctctcaggccaacacccccctaaagcgctggctcctggagtttgctgccaagcgcaaacaggctgaggtacgcagtggaattattcgaaacgattccatatgggatgaattattttttaacaagattcaggccagcttgggaggctgtgttagaatgatcgtaactggagcagctcctgcctcacccaccgtgctgggctttttaagggcagctctgggatgtcaggtgtacgaggggtatggacagaccgagtgtaccgccggatgcacattcaccactcccggagactggacttccggacacgtgggtgcccctcttccctgcaatcacattaagctggtggatgtcgaagagttgaattactgggcttgcaagggcgagggtgagatctgcgtgagaggcccaaatgtcttcaagggctacctgaaagatcccgatcgcacgaaggaagccttggattcggatggatggctgcacaccggagatatcgggaaatggctccccgccggcacactcaagattattgacagaaaaaaacatatcttcaagctggctcagggcgagtacgtggctcccgagaagattgagaacatatacatccgcagtcagcctgtcgctcagatatacgtgcacggagacagcctcaaagcattcctggttggcatcgtagtccctgacccagaggtcatgccctcctgggcgcagaagagaggaattgaaggcacgtatgctgatctgtgcactaacaaggacctgaagaaggcgatactggaagatatggtccggcttggaaaggagtcaggcctccattcttttgagcaagatttaccacaatgtcttatccaaattaaggttttttccaaatattag

SEQ ID NO: 177907 - DNA, 2169 bp, synthetic construct
  misc_feature 1..2169: note = Description of Artificial Sequence: Synthetic coding sequence
  source 1..2169: mol_type = other DNA
atgctgaccttcttcctggtgagcggcggcagcctgtggctgttcgtagaattcgtattgtcactcctagaaaaaatgcagacccaggagatccttagaatcctgagactgcccgagctaggtgatttaggacaattctttcgcagccttagcgccactacactggtgtcgatgggcgcactggcagcaatcctggcttattggttcactcaccggcccaaggccctacagccaccctgtaacctgcttatgcaatctgaggaggtcgaagattctggcggcgcacggcgatccgtgattggatcagggccccagttgttgacccactattacgatgacgcaagaacgatgtaccaggtcttcaggcgcggcctctctatatcaggtaatggcccctgcttaggattcagaaaacccaaacagccatatcagtggctgagttaccaggaagtggctgaccgagctgagttcttggggtccggattgctgcagcataactgtaaagcgtgtactgatcagttcataggagtttttgcgcagaacaggccagagtggatcatcgtggaactggcatgttacacatattcaatggtagtggtgcctctgtatgacaccttaggaccaggggccatcaggtatatcattaacaccgctgacatttctaccgtgattgtagataagcctcaaaaggcagtcctgcttttggagcacgttgagcggaaagagacacccggtttgaagctcatcattcttatggatccctttgaagaagccttaaaagaacggggccagaaatgtggcgtggtcataaaatctatgcaggctgtcgaagactgtgggcaggaaaatcaccaggcacctgtccctccccagccagacgacctttcaattgtgtgtttcaccagtggaaccaccgggaatccaaaaggggcaatgctgacacacggtaatgttgtggcagatttctccggtttcctgaaggtaactgaaaaggttattttccccagacaggacgacgtgctcataagtttcttacctctcgcccatatgttcgaacgggtgatacagagtgtggtgtactgccatgggggtcgtgtcggcttcttccagggcgacattcggttgctgtctgacgatatgaaggcgctttgtccaactatcttcccggttgttccccgactcttgaatcggatgtacgacaaaatcttttcccaggccaatactcccctcaaacggtggctgctcgagttcgcggccaaacgcaagcaggctgaagtccgctctggaatcattcggaatgactccatctgggatgaactgtttttcaacaagatacaggccagtctcggaggctgtgtgcgtatgattgtcactggcgccgcgccagctagcccgaccgtgctagggtttctccgggccgcgttgggctgccaggtttacgaagggtacggccagactgaatgtacagccggctgcacattcacaacaccgggtgattggaccagcgggcacgtgggggcacctcttccctgcaatcacatcaagttggtcgatgtcgaagaactaaattactgggcctgcaaaggtgagggggagatctgcgtgcgtggtccgaacgtctttaagggctacttgaaagatcccgatcgtaccaaggaggcactagattctgatggatggctgcacacgggggacatcggcaagtggctacctgccggcaccctaaaaatcattgatcggaaaaagcacattttcaaactggcgcagggagagtatgtcgctcctgaaaaaattgagaacatatatatcagaagtcaacccgtcgcccaaatctatgttcatggcgactctctgaaggctttcttggttggaatcgtggtgcctgaccctgaagttatgccaagctgggctcaaaaaagaggcattgaaggcacttatgcagatctgtgtactaacaaagatcttaagaaggccatactagaggacatggtgaggctcggtaaggaatctgggctacactcctttgaacaggtcaaagctattcacattcactcagatatgttttctgtgcagaatgggctgttgacaccaaccctcaaagctaagcgccctgaactcagagagtattttaagaagcagatcgaggagctctactcaatttccatgtag

SEQ ID NO: 177908 - DNA, 2139 bp, synthetic construct
  misc_feature 1..2139: note = Description of Artificial Sequence: Synthetic coding sequence
  source 1..2139: mol_type = other DNA
atgcagacccaggagatcctgcggatcctgcggctgcccgagctgggggacttaggccagttttttcgctctttaagcgcaaccacactggtcagtatgggagcgctcgccgctatactcgcatactggttcactcaccgacccaaggcactgcagccaccatgcaatctgcttatgcagtcagaagaggttgaagattcagggggggccaggcgctccgtgatcgggagcggaccacagttgctcacacactattatgatgacgcccgtacaatgtatcaagtgtttcgccgcggcctgagcattagcgggaatggcccttgtctgggattccggaagcccaaacagccctatcagtggctctcataccaggaggtcgccgaccgagccgagttcctgggaagcggactgctacagcataattgcaaggcctgtacggaccagtttatcggggtgttcgcgcagaacagacctgaatggatcatcgtcgagttagcttgctacacctattccatggttgtggttcctctttacgatacgctgggacctggtgctatccgctacatcataaacaccggactatcctgtcaggagggtgcgtccgcaactgccagcactcaggcagatatcagcacggttatcgttgacaaaccccaaaaggcagttttactcctggagcatgtggaaaggaaggaaacaccaggcctcaagcttatcattcttatggatcctttcgaagaagctctgaaggagcggggacagaagtgcggagtcgttatcaagtctatgcaggcagtcgaggactgcggacaggagaaccaccaagcccctgtccccccccagccggacgacctgagtattgtttgcttcacttccggaactaccggcaatcccaagggagccatgctgactcatggaaatgtggtagcagacttttcaggcttcctaaaagtcacagaaaaagtaattttcccccgacaggatgacgtcctgatcagttttttgcctctcgcccacatgttcgagcgcgtgatccagtctgtggtgtattgtcatgggggaagagttggatttttccaaggtgacataagactgttatcagatgacatgaaggccctatgccctacaatcttcccagtcgtaccccggctcctcaacagaatgtacgataagatttttagccaagcaaacacaccgctgaagcgctggctgctagaattcgccgcgaagcgcaaacaagccgaggtgcgctcagggattataaggaacgactctatatgggacgaactgtttttcaataagatccaagcctccctgggtggttgcgtaaggatgatcgtcaccggtgctgctcctgcttctccaactgtgcttggattcctgagagccgccttgggatgtcaggtgtatgagggctatggacagaccgaatgcaccgctggctgtacttttaccaccccaggcgactggaccagcggtcacgtgggggctccgctgccatgcaatcatatcaagctcgttgacgtggaagagctcaattactgggcgtgcaagggggagggcgagatctgcgtgcgtggccctaatgtttttaagggctacttaaaagatcccgacaggacaaaggaagcccttgacagtgacggctggttgcacaccggagacattggcaagtggctgcccgcgggcactctcaagatcatcgaccgaaaaaaacacatctttaaactggcccagggcgagtatgtggctcccgagaagattgaaaacatctacattagatctcaacctgtggcccagatctatgtgcatggagacagcttgaaggctttcctggtaggaatagtggtgcccgatccggaggtcatgccctcctgggcccaaaagaggggaattgaaggtacctatgcagacctgtgcacaaataaagacctgaaaaaggccatccttgaggatatggttagacttggaaaggagtctggcttgcacagctttgaacaagttaaggcgatacatatacatagtgacatgttcagtgtgcagaatgggctcctcacaccgacactcaaggccaagagaccagagttgagggaatatttcaagaaacaaatagaagagctctactccatatccatgtag

SEQ ID NO: 177909 - DNA, 2094 bp, synthetic construct
  misc_feature 1..2094: note = Description of Artificial Sequence: Synthetic coding sequence
  source 1..2094: mol_type = other DNA
atgcagacccaggagatcctgcggatcctgcggctgcccgagctgggagacttgggccagttcttccgctcactgtcagcaactacactggtgtccatgggcgccctagcggcaatcctagcttattggtttacccaccgacccaaggccctccagccgccctgtaatctgctcatgcagtcggaagaggtcgaggacagcggaggagcccgtaggtcagttatcgggtctggcccccagttattgacgcattactatgacgatgccaggactatgtaccaggtctttcgccgtggcctgagcatcagtgggaacggtccttgtctggggttcaggaagcccaagcagccataccaatggctgagctaccaggaagtcgccgaccgggcagagtttctgggttcaggacttttacagcataattgcaaagcgtgtaccgatcagtttatcggtgtgtttgcccagaatcgcccagagtggatcatagtagagctggcctgctatacttattctatggtcgttgttccactctacgacacccttggaccaggagccattcgatatatcattaacacagcagatatcagcactgtaatcgttgataagccccaaaaagccgtcttgctcctggagcacgtcgaaaggaaggagactcccgggctgaagctcataatcttgatggacccattcgaagaggccctaaaagagagaggacaaaaatgcggcgtggttatcaaatcgatgcaggccgtcgaagactgcggacaggaaaaccaccaggcacctgtccccccccagcctgacgacctcagcatcgtatgttttaccagcggaaccacgggaaacccaaagggggccatgctgacccatggcaacgtagtcgcggactttagtggatttctgaaggtaacagagtcccagtgggccccaacctgtgccgatgtgcacatctcataccttcctctggcccacatgttcgagcggatggtgcagagcgtggtgtactgtcatggcggaagggtgggctttttccagggtgacatccggttattgtcggatgatatgaaggcgctgtgccctacgattttccctgtggtgccaaggctgctcaacagaatgtatgacaagatcttctcccaggccaatacaccattgaagcggtggttgctggagtttgcggccaagagaaagcaagcagaggtgcgctccggcatcattcggaacgattcaatttgggacgaactgtttttcaacaaaatccaggcctccctgggtgggtgtgtccgaatgatcgttaccggagcagctcccgctagtcctacagtcctgggcttcctgagagctgctctggggtgccaggtgtacgagggctatgggcagacggagtgcaccgccgggtgtacgtttaccacgcctggggattggacaagcggccatgtgggcgctccactcccctgcaatcacattaaattggtggacgtcgaggagctcaactactgggcctgtaaaggggaaggagagatctgcgtgagagggcctaatgtgtttaagggttacctgaaggaccccgatcgaactaaggaagctctcgatagcgatggttggctgcatactggagatataggaaagtggctcccagcaggcactcttaaaattattgacagaaaaaaacatattttcaagctcgcccaaggagaatacgtggctcctgaaaaaatcgagaacatctacattagatctcagcccgttgctcagatctacgtgcacggcgatagtcttaaggccttcctggttgggatcgtcgtgcctgatcctgaggttatgccctcttgggcacagaaacgcggcatagaaggcacttacgcagacctctgcacgaacaaggacctcaaaaaggcaatactggaggacatggtgcgactgggcaaggaatctggactacattccttcgagcaggtgaaagcaatccatatccatagtgatatgttttcggtgcagaacggactcctgacccctacgttgaaagctaagaggcctgagctgagggagtactttaagaagcaaatagaggagctgtactccatctcaatgtag

SEQ ID NO: 177910 - DNA, 1821 bp, synthetic construct
  misc_feature 1..1821: note = Description of Artificial Sequence: Synthetic coding sequence
  source 1..1821: mol_type = other DNA
atgtaccaggtgttccggcggggcctgagcatcagcggcaacggcccttgtctgggctttaggaaaccgaaacagccctaccagtggctgtcatatcaggaagtggcagaccgagctgagtttctggggagtggcctcctgcaacacaactgcaaagcttgtaccgaccagtttataggagtgttcgcccaaaacaggcccgaatggattattgtggaattggcatgctacacctactccatggtggttgtccccttgtatgacacgctgggtcctggtgccattaggtatattataaatacggccgacatctccacagtgattgtagacaagcctcaaaaagctgtgctgctgctcgagcacgttgaacgcaaagagacacccggactgaagctgataatacttatggatccgttcgaggaggctttaaaggaacggggccaaaaatgtggcgtagtgatcaagtcgatgcaggccgttgaggactgcggccaagagaatcaccaagcacctgtgccaccgcagcctgatgacttgtcaatcgtctgcttcacaagcggaacgactggcaaccctaaaggtgcaatgctgactcacggcaatgtcgttgcagatttttcgggctttttaaaagtgacagagaaagtcatttttccaaggcaagacgacgttctcatctcatttctcccccttgcacacatgttcgagcgggtcatccagagcgtcgtttattgccacggcggccgggttggcttctttcagggcgatattaggctgctgagcgatgatatgaaagcactctgcccaacaatcttccccgtagttcctcgtctgctcaatcggatgtatgacaaaattttttcccaagcaaatacgcccctgaagcgatggctcctggaattcgcggccaagcgcaagcaggcagaagttcgttcggggattattaggaatgactcaatatgggacgaactgttctttaataagatccaggcatccctgggtggatgtgttcggatgatcgtaacaggcgcagcgccagcatctccaacagtgctcggctttctgagggccgcccttggatgtcaagtttatgaaggatatgggcagactgagtgtacagccggctgtactttcacgacgcctggtgattggacttctggtcatgtgggcgcacccctaccctgtaaccacatcaaactcgtggatgtggaggagcttaactactgggcttgtaagggggagggagaaatatgcgtcagggggccaaacgtgttcaagggttacctgaaagatccagatcgtaccaaggaggcactcgatagcgatgggtggcttcacaccggggatattggtaaatggctccccgccggaaccctcaagattatcgatcggaagaagcacatctttaagctcgcgcagggcgagtatgtggcccccgaaaagattgagaacatttatatccgatctcaacctgtcgcccaaatctacgtccatggtgatagcctgaaggctttcttagtaggaatcgttgtcccggacccagaggttatgcctagctgggcacagaaaagaggcattgagggtacttacgcagacctctgcacaaataaagacctgaagaaagctatcctcgaggacatggtgagactggggaaggagtcaggtctccatagtttcgaacaggttaaagcgatccacatccacagcgatatgttctccgtacagaacggattgcttacaccgacccttaaggccaaaagaccagagctccgggagtactttaagaagcagatcgaggagttgtacagtatctctatgtag

SEQ ID NO: 177911 - DNA, 1386 bp, synthetic construct
  misc_feature 1..1386: note = Description of Artificial Sequence: Synthetic coding sequence
  source 1..1386: mol_type = other DNA
atgagccggcaggtggtgcggagcagcaagttccggcacgtgttcggccagcctgcaaaggccgatcagtgctatgaagacgtccgcgtaagccaaacaacctgggacagcggtttctgcgccgtgaaccctaagtttgtggccctgatctgtgaagcctctggcggaggcgcatttctcgtgctaccgttaggcaaaacagggagagtcgacaagaacgcaccgactgtgtgtgggcacactgcccccgttctcgacattgcatggtgcccccataatgacaatgtcatagctagcggctcggaagactgtacagtaatggtatgggaaatacctgatggtggccttatgctccctctccgggagccggttgttactctggaagggcacacaaagcgggtcgggatcgtcgcctggcacacgaccgctcagaatgttctgctgagtgccggatgcgataatgtaattatggtctgggatgtggggacaggggcagcgatgctgacacttggccccgaagtgcacccggacaccatatattctgtggattggtctagggacggcggactgatttgtacttcctgtagagataaaagggtgagaatcatcgagcctagaaaaggcacagtggttgctgaaaaggacagaccacatgaagggacgagacctgtcagggccgtcttcgtatccgaaggcaaaatcctcactacaggtttcagccgaatgtctgagcggcaggtggcactttgggacactaagcatctggaggagcctctctctctccaggagttggatacatcctccggggtgctcctccctttctttgatcccgatactaacatcgtgtacctctgcggaaagggtgactcttcgatcagatatttcgaaatcacttctgaagcacctttcctgcactacctaagcatgttttcctctaaggagagccaacgcggaatggggtatatgcccaaacgcggcctggaggtaaataagtgtgaaatcgctcggttctacaagctgcatgaaagacggtgcgagcccattgccatgaccgtgcctcgcaaatccgatctgttccaagaggacctgtatcccccaactgcaggccccgatcccgctctgaccgccgaggagtggctgggtggccgtgatgcaggtccactgcttatcagtctaaaggacggctatgtcccccccaaatctagagagctgagagttaaccgtggactcgacactgggcggagaagagctgccccagaagctagtggcaccccctcttcggacgccgtcagtaggctcgaggaggaaatgaggaaactgcaagctacggtacaggagctacagaaacggcttgatcggctggaggagaccgtgcaggcgaagtag

SEQ ID NO: 177912 - DNA, 1734 bp, synthetic construct
  misc_feature 1..1734: note = Description of Artificial Sequence: Synthetic coding sequence
  source 1..1734: mol_type = other DNA
atgcagtggctgatgcggttccggaccctgtggggcatccacaagtcattccacaacattcatcccgcaccgtctcaactgcgatgtaggtctttatcagagtttggcgcccctcgctggaatgactatgaggttcccgaggaatttaactttgcgtcttatgttttggactattgggcccagaaggagaaggagggtaaaagagggccaaatcctgcattctggtgggtgaatggacagggggacgaggtaaagtggagctttcgagagatgggtgatcttactcgcagggtggccaatgtgttcactcaaacctgcggcctgcagcagggcgaccacttggctctgatgctgccccgcgtccctgagtggtggctcgtcgccgtcggatgtatgcgtacaggcatcatttttatcccagctacaatcctgttaaaggcaaaggatatattgtacagactgcagctaagcaaggccaaaggcatcgtgactattgacgctcttgcttccgaagtcgatagcattgcctctcagtgtccttcactcaaaacgaagttgcttgtttccgaccatagcagagaggggtggctggacttccgatctctggtcaagagtgcctcaccggagcatacctgcgtgaaatccaaaaccttggatccaatggtcattttttttacctcgggaactaccggattcccaaagatggctaaacactcacatggactcgccctacagcccagctttccagggagcaggaagcttcgtagcctaaagacatcagacgtttcctggtgcctctccgattccggctggattgttgccacaatctggactttggttgagccatggaccgctggctgcacggtgtttattcaccacctgccgcagtttgatacaaaagtaataatccagactctgctaaaataccccattaatcacttttggggcgtttctagtatttatcgcatgatacttcagcaggacttcacttcaatacgcttccctgctctggagcactgctacacagggggagaggtggtgctcccaaaggatcaagaggagtggaaacgccggacggggttactactgtacgagaattatgggcaaagcgagactggactgatttgcgctacgtattggggcatgaaaattaagcctggcttcatgggcaaggctacacccccttatgatgtacaagttatagacgataaaggatccattctacctccaaataccgagggtaatattggaatcaggatcaaacccgtacgccccgtgagcctgtttatgtgttatgagggcgaccccgagaaaaccgccaaggtggagtgcggcgatttttataataccggtgaccgaggtaagatggacgaagaaggatacatctgctttctcggccggagtgatgacattattaacgcttctggataccgtattggtcctgctgaagtggaatccgcattggtggagcatccagccgtggccgaatccgctgttgtcggatctcctgatccgatccgtggagaagtggtgaaggcatttatagtcctcaccccacagtttttatcccatgataaggatcagctgactaaagaattacagcagcatgtgaaaagcgtgactgcaccttacaagtatcccaggaaggtggagttcgtctccgagctgccaaaaacaatcacaggtaaaattgaacgaaaggaactgaggaagaaggagaccgggcagatgtag

SEQ ID NO: 177913 - DNA, 1734 bp, synthetic construct
  misc_feature 1..1734: note = Description of Artificial Sequence: Synthetic coding sequence
  source 1..1734: mol_type = other DNA
atgcagtggctgatgcggttccggaccctgtggggcatccacaagagctttcacaatatacaccctgcaccaagtcagctacggtgtcggagcctgagcgaattcggggcacctcggtggaacgattatgaagtgcccgaagaatttaactttgccagctatgttctggattactgggcccaaaaagagaaggagggcaaaagaggacctaaccccgccttctggtgggtcaatggacagggggatgaggtcaaatggtcatttagagagatgggagaccttactcgacgggtggctaatgtgttcactcaaacctgtggcttgcagcaaggtgaccacttggcactcatgctgccacgagtgccggagtggtggctggtcgccgtcggctgtatgcgcactggcatcatcttcatcccggccaccatcttattgaaagctaaggacatcctgtacagactgcagctctccaaagctaaaggaattgtgacaatcgatgctctggccagcgaggttgattccatcgcctctcagtgcccctccctcaaaacgaaactcctggtgtcggatcacagtcgtgaaggatggctcgacttcagatctctcgtgaaaagtgccagccccgaacacacatgtgtaaagagtaagacacttgatcctatggttatcttctttacatccgggacaaccggatttcccaaaatggctaaacacagccacggattagccttgcagccctctttccctggctccaggaaacttcgatcactcaagacaagcgatgtcagttggtgcctgagcgactccggctggatagtggcaaccatatggactctcgtagagccatggacggctggctgtacagtattcattcatcacctgccccaatttgatactaaggtcatcattcaaacgctgctcaagtacccaatcaaccacttttggggcgtgtcctccatttaccgcatgatcctgcaacaggattttacatccatccggtttccggccctcgagcactgctacactgggggagaagtggtgctccctaaagaccaagaggaatggaagcgccgcactgggctgctgttgtacgaaaattacggacagtccgaaacaggcctgatttgtgctacttattggggtatgaaaattaagcccggatttatgggcaaggcaacacccccttacgatgtccaagttatcgatgataaggggtctatactgccccctaacacggagggaaacataggcatacgaatcaagccggtgagaccagttagcctctttatgtgctacgagggagatccagaaaagactgcaaaggtcgagtgcggagatttttacaacaccggagatcgcggaaaaatggatgaggagggttacatctgctttttgggtcgctcagacgacattatcaatgcttctggctataggatcggacccgcagaggtcgagagcgcactcgttgagcacccagctgtggcggagtccgccgtggttgggtctcccgatccgatcagaggagaggttgttaaggcttttattgtcttgaccccgcagttcctgagccatgataaggatcagctgaccaaagagctacagcagcatgtaaagagcgtaacagccccttataagtatccccgcaaagtggagttcgtgtccgagctgcccaaaactattaccggcaaaattgagcgcaaagaactacgcaagaaagaaaccggtcagatgtag

SEQ ID NO: 177914 - DNA, 465 bp, synthetic construct
  misc_feature 1..465: note = Description of Artificial Sequence: Synthetic coding sequence
  source 1..465: mol_type = other DNA
atgcagtggctgatgcggttccggaccctgtggggcatccacaagtcattccacaatattcacccagccccctcccagctgaggtgtcgaagcctgtctgagtttggcgcccccagatggaacgactatgaagtgccagaggaattcaatttcgccagctacgtactggattattgggctcagaaggagaaggaggggaaacgggggccaaatcccgctttctggtgggttaatggccagggcgatgaggtgaaatggagtttcagagagatgggcgatttaacgaggcgggtggccaacgtattcactcagacttgtggtttgcagcagggtgaccatctcgctttgatgctgccaagggtcccagagtggtggcttgtggccgtgggttgcatgaggactgggataattttcatcccagcaacaatactattgaaagctaaagacatcctgtatagattgtag

SEQ ID NO: 177915 - DNA, 1533 bp, synthetic construct
  misc_feature 1..1533: note = Description of Artificial Sequence: Synthetic coding sequence
  source 1..1533: mol_type = other DNA
atgcggcccggcctgagcttcctgctggccctgctgttcttcctgggtcaagcggcgggcgacctgggggatgtgggtccacctatcccatctccaggcttttcatctttcccaggcgtggacagttcctcttcattttcctcgtccagtcgatcagggagctcctctagcaggtcgctggggtctggcggtagcgtgtcacagctttttagcaatttcaccggctccgtagacgatagaggaacttgccagtgttctgtcagtctccccgatacaacttttcctgtcgacagggtagaacgccttgaatttaccgcacacgttctatcccagaagtttgagaaggagctgagtaaagtgcgggagtatgtacagcttatctctgtttatgaaaaaaagctgttaaatctgactgtacgaattgatatcatggagaaagatactattagctatactgaactagacttcgagctcatcaaggtggaggtgaaagaaatggagaagttggtcatacagctcaaagagtcattcggcgggagctctgagatcgtcgaccagctggaagtcgagattcggaatatgacccttttagtggaaaagctggaaacccttgacaagaacaacgtgctggctatccgaagagagattgtggcattgaagactaagctgaaggagtgcgaagcctctaaagaccagaatactcccgtcgtgcatcctccaccaacaccaggatcctgcggtcacggtggcgtggtcaatatcagcaaaccatccgttgttcaactgaactggagagggtttagttacctgtacggcgcttggggcagagactactcgccccagcacccaaataaaggcctgtactgggtggcacccttaaataccgatgggaggctgctggaatattacagactgtacaacacactcgatgatctgctgctctacatcaatgctagagaactccggattacttacggtcaaggcagcggaactgccgtttacaacaacaatatgtatgttaatatgtataacacaggcaacatcgcacgcgtcaatctgaccacaaatactattgccgtgactcaaacattacccaatgcagcgtacaataaccgcttttcctatgccaacgttgcctggcaggatatcgattttgccgtcgatgaaaacggcctgtgggtgatctatagtacggaagcttctacagggaatatggtcattagcaaacttaatgacacaaccctacaagtgctgaatacatggtatacgaagcagtacaagccttcggcttccaacgcctttatggtgtgtggcgttctctacgcaacccggacaatgaacaccagaactgaggaaattttctactactacgatactaacactgggaaggaaggaaaacttgacattgtgatgcataagatgcaggaaaaggtacaatcgatcaactacaacccatttgatcagaaactgtacgtttataatgacggttacctcctgaactatgacctaagcgtattgcagaaacctcaatag

SEQ ID NO: 177916 - DNA, 1734 bp, synthetic construct
  misc_feature 1..1734: note = Description of Artificial Sequence: Synthetic coding sequence
  source 1..1734: mol_type = other DNA
atgcactggctgcggaaggtgcagggcctgtgcaccctgtggggcactcagatgtcatcaaggaccttgtacattaattcccgacaactggtgagtcttcagtggggccatcaggaggttcccgcgaaatttaactttgcctccgacgtgttggaccactgggctgatatggaaaaagcaggcaaaagactgcccagtcctgcactctggtgggtgaatggcaagggcaaggaattgatgtggaacttccgcgaattgtcagagaattcccagcaggctgcgaacgtgctcagtggtgcatgcggtcttcagaggggagatcgggtggccgtcgtcctccctagagttcccgaatggtggctagtgatcttgggctgtatccgagcaggcctgatctttatgcccggaaccatccaaatgaagagtaccgacatactgtatagactgcagatgtcaaaagctaaagccattgtagcgggcgacgaagttatccaggaagtcgacaccgtggctagcgagtgtcccagcctaagaattaaactcctggtctctgagaagtcctgtgacggttggctgaattttaagaaattactcaatgaggcctccaccacgcatcactgtgtggagacaggatctcaggaggcctccgctatctactttacgagcggtacctcagggcttcccaagatggcagagcatagctactcctcactgggcctcaaggccaaaatggacgccggatggacagggctccaggcctcagacataatgtggacaattagcgacaccggttggatcctcaatattttgtgttcactgatggagccctgggctctcggagcctgtacattcgtccacctattgcccaaattcgatccactagtcattcttaagaccctgagttcctaccctatcaagtccatgatgggagctccaattgtctacaggatgctactccagcaagatctttctagctacaagtttccccacctgcagaattgtgtgaccgtgggtgagagcctgctgccggaaaccttggagaattggagagcgcagaccggcctggacatcagggagtcctatggccagacagaaaccggcctgacctgcatggtaagcaagaccatgaaaattaagcctggttatatgggtaccgccgcctcatgctacgatgtacagatcatcgacgataagggaaacgtcctccctccaggaactgaaggggacataggcattcgtgtcaaacccatccgacctatcgggatcttctctggttacgttgataatcccgacaaaactgctgccaatatccgaggagatttctggctgctcggggacaggggaattaaagacgaggatgggtatttccagtttatgggcagagcgaatgatatcatcaatagcagcggctaccgcatcggcccttctgaagtggagaacgcccttatggagcatccggccgtggtggagaccgcagttatttcctctccagatccagtgcgcggggaggtagtaaaagctttcgtggtgttagcctcccagtttctttcccacgaccccgagcagctgactaaagaactccagcagcatgtgaaaagcgtgactgccccatacaagtatccgcgcaaaattgagtttgtgctgaacctcccgaaaacagtcaccggaaagattcaacgcgcaaagctccgagataaagaatggaaaatgtctggcaaagcccgggcacagtag

SEQ ID NO: 177917 - DNA, 1497 bp, synthetic construct
  misc_feature 1..1497: note = Description of Artificial Sequence: Synthetic coding sequence
  source 1..1497: mol_type = other DNA
atgtggaacttccgggagctgagcgagaacagccagcaggccgccaacgtactgagcggtgcctgcggacttcagcgaggtgacagagtggcagttgtactgccgcgagtgcccgagtggtggttggtaatcttgggttgtattagagcagggctcattttcatgcctggtaccattcagatgaagtcaaccgacatcctgtataggttgcagatgtctaaggccaaggcgattgtggccggcgacgaggtgatacaggaggtagacaccgttgcatctgagtgtccatccttgaggatcaagctgctggttagcgaaaaaagctgcgatggctggctgaacttcaagaaactgcttaatgaagcttcaaccacacaccattgcgtcgaaacaggttcgcaggaagcgtctgccatatactttaccagcggaacaagcgggctcccaaaaatggccgagcattcgtacagctccctggggttaaaagcaaagatggacgctggctggaccgggctgcaagcttctgacattatgtggaccatcagcgatacgggttggatattgaacattctgtgctccttaatggagccatgggcacttggagcatgcacatttgtgcatttactgcccaaattcgaccccctagttatactgaagactttatcctcctatccaatcaaaagtatgatgggggcgccaattgtgtacagaatgctgcttcagcaagatctgagttcctataagttccctcacttgcagaattgcgtcacagtcggcgaatccttgctgccggaaacactcgaaaattggagagcccagactggcctggatatccgggaaagttacgggcagacagaaaccgggctgacctgcatggtgagcaagacaatgaagattaaaccggggtacatggggactgccgccagttgttatgatgtgcaaataatcgacgataaaggtaatgtgctgccacccgggactgaaggggacattggtattcgagtaaaacctatccgaccaattggcattttttccggttatgtggacaacccagacaaaacagcagctaatatcagaggtgatttttggcttctgggcgatagagggatcaaggacgaggacggctattttcaattcatgggccgggctaacgatataattaattctagcggctataggatagggccatctgaagtcgaaaatgccctgatggagcaccccgccgtagtggagacggcagtaatcagctcacctgaccctgtcaggggggaagtggtgaaggcttttgtggtactcgcctcccagttcctgtctcatgatccagaacaactgaccaaggagctccagcagcacgtgaaatcagtgactgctccttataagtacccccgcaagattgagtttgtgctcaacctacccaagacagttactggcaagatacagagggccaagctcagggataaggagtggaagatgtcaggcaaggcgagggctcagtag

SEQ ID NO: 177918 - DNA, 627 bp, synthetic construct
  misc_feature 1..627: note = Description of Artificial Sequence: Synthetic coding sequence
  source 1..627: mol_type = other DNA
atgcactggctgcggaaggtgcagggcctgtgcaccctgtggggcactcagatgagtagccggaccctctacataaactccaggcaacttgtgtcattacagtggggccaccaggaggttcctgccaagtttaacttcgcgtcggacgtgctagaccactgggccgatatggaaaaagcaggcaaaaggcttccctctccagcattgtggtgggtgaatggaaagggaaaggaactcatgtggaattttcgtgagctgagtgagaattcccaacaagcggctaatgtgttgagcggggcatgtgggctacagaggggggatagggtcgccgtggtgctgccccgagtcccagagtggtggctcgttatacttggatgcatacgcgccggactgatattcatgcctggaacaatacaaatgaagtctaccgatatcctatacaggcttcagatgtctaaagctaaagcaatagtcgccggcgacgaggtcattcaggaggtggataccgtggcaagtgaatgcccatccctccggattaagctactcgtctcggagaagtcctgtgacggctggcttaacttcaaaaaactgctcaaatataaggttcgacatcgggacgttaagtag

SEQ ID NO: 177919 - DNA, 1050 bp, synthetic construct
  misc_feature 1..1050: note = Description of Artificial Sequence: Synthetic coding sequence
  source 1..1050: mol_type = other DNA
atgcggcacccccccctgatcaccgtgtggcggctggaggccaagatggatgctggctggactggcctccaagcctctgacattatgtggactatctctgacacagggtggatcttaaatatcctatgtagtctcatggagccatgggctctgggcgcttgcacattcgttcatctgctcccaaagttcgatcccctggtgatcctcaaaactctgtcttcttacccaattaaaagcatgatgggcgccccgatcgtgtatcgaatgcttctgcaacaggacctgtcgagctataagtttccgcacctacaaaactgtgtcacggtgggagagagcctcttgcccgaaaccctagagaactggcgggcccagaccgggttggacatacgcgagagttacggccagaccgagaccgggctcacttgtatggtctctaaaactatgaagatcaagcccggatatatgggtaccgcagccagttgctacgacgtgcagatcattgatgacaaaggaaacgtgctaccccccggaactgagggcgacatcggtattcgggttaagcccatccggcctattgggatcttttcaggctatgtcgataacccggataagaccgctgctaatatccggggcgacttctggttgttgggagatcgagggatcaaggacgaggacggttatttccagttcatgggccgggctaacgatattatcaacagttccgggtaccggatcggaccttcagaagtagaaaacgccctcatggaacacccagccgtggttgaaaccgcagtgatcagcagtccggatcccgtgagaggtgaggtcgttaaggctttcgttgtgctggctagccagtttttgtcccatgatcccgagcaacttaccaaggaactccagcaacatgtaaagtctgtaaccgccccctacaaatacccgagaaagatcgaattcgtgctcaacttacctaaaacagtgacaggtaaaatacaaagggcgaaactacgcgataaagagtggaaaatgagcggcaaggcacgagcccagtag

SEQ ID NO: 177920 - DNA, 1734 bp, synthetic construct
  misc_feature 1..1734: note = Description of Artificial Sequence: Synthetic coding sequence
  source 1..1734: mol_type = other DNA
atgcactggctgcggaaggtgcagggcctgtgcaccctgtggggcacccagatgtcatctaggacactttatattaattctaggcagttagtgagtttgcagtggggccaccaagaggtgccagcaaaatttaattttgcatccgacgtgttggaccattgggctgatatggagaaagccggaaagaggcttccctctcccgcactgtggtgggtaaacgggaaaggtaaggaacttatgtggaacttccgcgaattatcagaaaattctcagcaggcagctaacgtactgagtggcgcttgtggcctgcagagaggcgaccgagttgctgtggttctgcctcgagtccccgagtggtggctggttatcttgggatgtatacgcgccggcttgatattcatgcccggtactattcaaatgaagtctactgatatcctgtaccgtctgcagatgtcaaaggcaaaggcaatcgtggcaggagacgaggtgatacaagaggtggacacagttgcctcagagtgccctagcttgaggatcaagctgctggtatctgagaagagctgcgatggctggttgaactttaagaagctattaaatgaggccagcacgacacatcactgtgtggaaaccggctctcaggaagctagtgcgatctactttacatctggcacttctggcttgccaaaaatggcagaacatagttacagcagcctgggtctcaaggcgaagatggacgccggctggacaggactgcaggcaagcgacatcatgtggaccatctccgatactgggtggatactgaacatcttgtgttccctgatggagccttgggccctaggggcctgcacgttcgttcacttactccctaagttcgatccgcttgtgatactgaagacactgtctagctacccaattaagtccatgatgggggcaccgatagtatatcggatgctgcttcagcaggatctcagctcctacaagtttccacatttacagaactgcgtgacagtaggtgaaagtctgctccccgaaacgctcgaaaactggagagcccagaccgggctggacatacgcgagtcttatggccaaacagagaccggcctgacttgcatggtctctaaaactatgaagatcaaaccgggctacatgggtacagccgctagttgttatgacgtacagatcatcgacgataaagggaatgtgctgccaccgggtacagaaggtgatattggcattcgagtcaagcctatccgcccaattggtatcttctccggatacgtcgacaaccctgacaagaccgccgccaacatacgcggtgatttttggctcctgggggatagaggcattaaggatgaggacgggtacttccagtttatgggacgcgccaacgatataatcaattcttcaggctacaggattggtcccagcgaagtggaaaatgcgctcatggagcatccggcagtggtggaaactgcagtcatctctagtcctgatcccgtgcgaggggaagtcgtgaaggctttcgtggttcttgcgagccagtttctgtctcacgaccctgagcagttaaccaaggagctgcagcagcacgtcaagtcagtcaccgcaccttataagtatcccaggaaaattgaattcgttttgaatctcccgaaaaccgtcacagggaaaattcaaagagccaagctcagagataaggagtggaaaatgagcgggaaagcacgggcccagtag

SEQ ID NO: 177921 - DNA, 1734 bp, synthetic construct
  misc_feature 1..1734: note = Description of Artificial Sequence: Synthetic coding sequence
  source 1..1734: mol_type = other DNA
atgcactggctgcggaaggtgcagggcctgtgcaccctgtggggcacacagatgtctagccggactctgtacataaactcccgccagctagtgtctctgcagtggggccatcaggaagtgcccgccaaattcaatttcgcttccgatgtgctagatcactgggccgacatggagaaagcaggaaagaggctgcccagcccggcactttggtgggtgaatggcaaaggtaaggagctcatgtggaacttccgggagctttccgagaacagtcaacaagctgcgaacattctctctggggcttgcggtttacagaggggggaccgcgttgcggtgatgttaccccgagtgcccgagtggtggctagtcattctgggttgtattcgagccggcctgatctttatgccaggtactattcaaatgaagtcgaccgatattctgtaccgtctgcagatgtccaaggcgaaagcaatcgtggctggcgatgaggttatccaggaagtggataccgttgcctccgaatgcccttcactgaggatcaagctattggtctccgagaagtcatgcgacggttggcttaatttcaagaagctgttgaatgaggcctcgaccacacaccattgtgtcgagaccggatcccaagaagcctccgccatctactttaccagcggtacgagtggtttgcctaaaatggcagagcactcatattcttccttgggactaaaggccaaaatggatgcgggctggacaggactgcaggcctccgacataatgtggaccatctctgatacagggtggattttaaatatcctgggctccctgctcgaatcctggaccttaggcgcatgtaccttcgtgcacttgctgccgaaatttgatcctctggtaattttgaaaacactcagtagctaccccatcaagagtatgatgggtgcccctatcgtttaccgaatgttgttgcaacaggatctctcttcgtacaaatttccacatttacaaaactgtttagccggtggggaatccctccttcccgaaactctggaaaattggcgtgcccagacaggactagatatcagagagttctacggccagacagaaaccggccttacctgcatggtcagtaagaccatgaagatcaaaccgggttatatgggaacggccgccagctgttacgacgtccaggtaatagatgataaaggcaatgtgctgccgccgggcaccgaaggagacatcggaatacgggtaaagccaatccgacccattgggatctttagcgggtacgtcgaaaaccccgataagaccgccgccaatatcagaggcgacttctggctcctgggcgatagaggcatcaaagacgaggacggctattttcagtttatgggccgtgcagacgatataattaacagctctggctatcgcattggccctagcgaggtagaaaacgctctcatgaagcaccccgccgtcgtggaaacagctgtcatatccagtcccgaccctgtaaggggtgaggtagtcaaagctttcgtgatacttgctagccagttcctgtcccatgatcctgagcaactcacaaaagagctgcagcagcatgtcaaatctgtcacagcaccatataagtatcccagaaaaattgagtttgtgctgaatcttcccaaaaccgtgaccggcaagatacagcggacaaagctccgcgataaggagtggaagatgtccggcaaagcgagagcccaatag

SEQ ID NO: 177922 - DNA, 627 bp, synthetic construct
  misc_feature 1..627: note = Description of Artificial Sequence: Synthetic coding sequence
  source 1..627: mol_type = other DNA
atgcactggctgcggaaggtgcagggcctgtgcaccctgtggggcacgcagatgagttctcgcacattatacatcaattctagacaactagtctctttacaatggggccaccaagaagtgcctgccaagtttaatttcgcctccgacgtgcttgaccattgggctgacatggagaaagcagggaaacgactgccatccccagccctgtggtgggtcaacggaaagggcaaagaattgatgtggaatttcagagagctatcagagaattctcaacaggcagccaacatcctgagtggtgcctgcggtctgcaacggggggatcgcgtcgcagtcatgctgcccagagtccccgagtggtggctggtgatccttggatgtattagggccggtctaatcttcatgccaggaacaattcagatgaagtcaactgatatcttgtaccgacttcagatgtccaaagccaaagcaattgttgcaggcgatgaggtgatccaggaagtggacaccgttgcaagcgaatgtccctcattgcgcatcaagttgctggtgtctgagaaaagttgtgatggctggctgaacttcaagaaactactgaagtataaggttagacaccgggaagtgaagtag

SEQ ID NO: 177923 - DNA, 1761 bp, synthetic construct
  misc_feature 1..1761: note = Description of Artificial Sequence: Synthetic coding sequence
  source 1..1761: mol_type = other DNA
atgctggcccgggtgacccggaagatgctgcggcacgccaagtgctttcagcggcttgccatattcggctcagtcagagctttgcataaggacaataggaccgccaccccgcaaaacttcagtaactatgaatctatgaaacaagactttaaattggggataccggaatatttcaattttgctaaagacgttctagaccaatggactgataaagaaaaggccggcaagaaacccagtaaccccgctttctggtggatcaataggaatggagaggaaatgagatggtctttcgaggagttaggctctcttagccgtaagttcgccaacatcctgtccgaggcctgctccttgcagcgcggagacagagtgattttaatcttaccccgggtgccagagtggtggcttgccaatgtggcctgccttagaactgggaccgtgttgatacccgggaccacacagttgacccagaaggacatcctgtaccgtttgcagagcagcaaagccaactgtattattaccaatgatgtactggcccctgccgtcgatgcagttgcttcgaagtgcgagaacctgcacagtaagctgatcgtgtccgaaaacagccgggagggctggggcaacctgaaagaactgatgaagcatgcaagcgattcccacacatgtgtgaagaccaagcacaatgagatcatggctatcttcttcacctccggcactagtggttaccctaagatgaccgctcatacgcacagctcttttggcttaggtctgtctgtcaacggtaggttttggctcgacctgacgcctagcgacgtgatgtggaacacaagcgacactggatgggccaaatccgcttggagttccgtgttcagcccctggatccaaggcgcctgcgtctttacacaccacctccctcgattcgaacctacctcaatactgcagactctgagtaagtaccccattacagttttctgtagtgccccgacggtttatcggatgttagttcagaatgacattacctcttacaaatttaagagtttaaagcactgtgtgtcagcgggagaaccaattacgcccgatgtgactgagaaatggcggaacaaaaccggcttggatatatatgagggctatggccagaccgaaaccgtgctgatttgcgggaacttcaagggaatgaagatcaagcccggaagcatgggcaagcccagcccagcctttgatgttaagatagtcgacgtaaatggtaacgtgttgccaccagggcaggagggggatatagggatccaggtattgccaaaccggcctttcggccttttcacccattatgtggacaaccctagcaagactgcctccacactgagagggaacttttacatcacaggcgataggggctatatggataaggacggttatttctggtttgttgcgcgcgccgatgacgtgattctgagttcagggtacagaattggaccttttgaagtcgagaacgcactgaacgaacacccatccgtcgctgagtccgctgtggtcagctcccctgatcccatcaggggggaagtcgtgaaggcatttgtggttctcaaccctgattataaatcccacgatcaggagcagcttataaaagaaattcaggagcacgtgaagaagacgacggcaccatataagtacccccgcaaggtggagttcatccaggagctgccaaagacaataagcggaaagacaaaacgcaacgagctgcgcaagaaagagtggaaaacaatatag

SEQ ID NO: 177924 - DNA, 1317 bp, synthetic construct
  misc_feature 1..1317: note = Description of Artificial Sequence: Synthetic coding sequence
  source 1..1317: mol_type = other DNA
atgctggcccgggtgacccggaagatgctgcggcacgccaagtgctttcagcggctggccatctttggctcagtccgggccctccacaaagacaaccgcactgcgactccgcaaaactttagcaattatgagagcatgaagcaggacttcaagctgggaatacctgagtactttaattttgctaaagacgttctcgaccaatggactgataaagagaaggccgggaaaaaaccatcaaatccagctttttggtggattaaccgaaatggtgaggagatgagatggtcttttgaagagttgggcagtctttcccgcaaatttgctaacatcctgtcagaagcttgctcccttcaaaggggagatagagtgatcctcatactcccccgagttcctgaatggtggctagccaatgtggcttgtctccggaccggcaccgtgcttatcccggggacgacccagctaacccaaaaggatatcctgtatcgtttgcagtccagtaaggccaattgcataatcactaacgatgtcttggctcctgccgtcgatgccgtcgccagtaaatgcgagaatcttcactccaagctgatcgtgtctgagaacagccgagaagggtggggcaatctcaaagagttgatgaaacatgcctcggactctcacacatgcgtgaagaccaagcacaacgaaatcatggccatttttttcacctccggaacatcagggtaccccaagatgactgcgcacactcacagctcctttggtttgggactgtccgttaacgggagattttggttggacctgacgccctcagacgtcatgtggaatacatcagataccggatgggcgaagagtgcctggtcatccgtcttttctccgtggattcaaggtgcctgcgtgttcacacaccacttacctcgctttgaaccaaccagcatactgcagactctgtcaaaatacccgatcacagttttttgcagcgctcccactgtgtatcgcatgcttgtacagaacgacataacttcctacaagttcaaatctctgaaacattgtgtgtcggcgggcgagccaatcacacccgatgtgacagagaagtggaggaacaagacaggcctggatatctacgaaggctacgggcaaacagaaaccgtgttaatatgcggcaatttcaaaggaatgaaaattaagcctggttccatgggaaagcctagccccgccttcgacgtgaaggtgtgcacttcccccagcaggcggatgtttaacaaccccatctgcaccttgcccacttataggctgcctccgtacaagctcagcctgctttag

SEQ ID NO: 177925 - DNA, 1737 bp, synthetic construct
  misc_feature 1..1737: note = Description of Artificial Sequence: Synthetic coding sequence
  source 1..1737: mol_type = other DNA
atgaagcaggacttcaagctgggcatccccgagtacttcaacttcgctaaagacgtccttgaccagtggaccgataaggaaaaggcaggcaagaaacctagcaatccagcattttggtggatcaataggaatggggaagagatgcgctggtcattcgaagagcttggcagtctatcgagaaagttcgcaaatatcctgagcgaggcatgtagcctccaaaggggagatagagtcattctcatcctgcccagagtcccggagtggtggctcgcaaatgttgcttgcctgcgtaccgggacagtgctcatccctggaacaacgcaattaacccagaaagacatcctatatagattgcagagtagcaaggcaaactgcatcattaccaatgatgttctggctccagcagtcgacgccgtggcgtcaaaatgtgagaacctccattccaagctgattgtgagtgaaaactctagggaaggatggggaaatttgaaagaactgatgaaagtttttctgtgtcatcctggatggtctactgtggcccggtcctggctcaccgccacatcaacctcactggtccaggcaatcctgtcactgttgagtagctgggactatcgccatgcaagcgattcccacacatgtgtcaagacaaagcacaatgagattatggctatatttttcacaagcggcacctctggttacccaaaaatgacagcgcacactcactccagcttcgggttggggctgagtgtgaacggaaggttttggttggacctgaccccgtcagacgtgatgtggaacacatcagacaccggttgggctaaatctgcatggtcttccgtattcagtccatggattcagggcgcgtgcgtgtttacccatcatctgccccggttcgaaccaacgtccattctgcagacattgtcaaaataccctatcaccgtgttctgctccgcccctactgtgtacaggatgttggtgcagaatgacattacatcgtacaagttcaaatcgctgaaacactgtgtctcagcaggcgaaccaattacgccggacgtcacggaaaagtggcgcaacaagacaggactggatatctacgagggttacggccagacagaaaccgtgctgatctgcgggaacttcaaggggatgaaaatcaagccaggctccatgggtaagccttcaccagcctttgacgtgaagatcgtagatgtgaacggcaacgtccttccacctggacaggagggtgacattggcatccaagtgctgcccaaccggccttttgggctgttcacccattacgtggacaatcctagtaagactgccagtaccctgagaggaaacttctatattacaggagaccgggggtatatggacaaggacgggtacttttggttcgttgctcgagccgacgacgttatcctttctagtggatacaggataggtccttttgaagtggagaatgcattgaatgagcatccaagcgtcgccgaatccgctgtggtctcctcacctgatcccatccggggtgaagttgtgaaggctttcgttgtgcttaaccctgactataaatctcatgaccaggagcaactgatcaaggaaattcaggagcacgtgaagaaaacaacagcaccctacaaataccccaggaaggtggagtttatccaggagctgcctaagaccatcagcggcaaaactaaaagaaatgagctcaggaaaaaggagtggaaaacaatttag

SEQ ID NO: 177926 - DNA, 1740 bp, synthetic construct
  misc_feature 1..1740: note = Description of Artificial Sequence: Synthetic coding sequence
  source 1..1740: mol_type = other DNA
atgcggccctggctgcggcacctggtgctgcaggccctgcggaactctcgcgcattttgcgggagtcacggaaaacccgcacctttacctgttccccaaaaaattgtggcaacatgggaggcaatcagcttgggacgccagctcgttcccgaatacttcaactttgcccatgacgttttagatgtttggtctcgacttgaggaggccggccatagacctcctaaccccgccttctggtgggtcaacgggactggggctgaaatcaaatggtctttcgaggagctgggaaaacaatcaaggaaggccgccaacgtacttggcggcgcttgtggactccaaccaggagataggatgatgctggtgctcccacgcctacctgagtggtggttggtaagtgtggcctgtatgagaactggaacagtgatgatccctggcgtgacccagctcacagagaaagatctgaagtatcgactgcaggcatccagggctaagagtatcatcacatccgactccctagctccacgggttgatgcaatctccgccgaatgcccttctctgcagaccaaactgctcgtgtctgatagcagcaggcctggatggctgaatttccgagagctgcttcgggaggcctccacagagcacaactgcatgcgcacaaagagtagggaccccctggcgatttactttaccagtggtaccacaggtgcaccaaagatggtggagcatagtcaaagcagctatggtctcgggttcgtggccagcggtcgccgctgggttgctctcacggagagcgacatattctggaacacgactgacacagggtgggtaaaggccgcttggacgctattttccgcgtggcctaatgggagctgtatttttgtgcatgaactccctagggttgacgctaaggttatcctgaacactttatccaagttccctattaccaccttgtgctgcgtcccaactattttccggctcctcgttcaggaagatctcacgcggtaccagtttcagtctctgcggcattgtttaacgggcggtgaggctctcaacccagatgtacgcgaaaaatggaagcaccagacaggtgtcgagctgtacgagggctatgggcagagtgagaccgtggtcatctgcgccaacccgaaggggatgaaaatcaagtctggatccatgggcaaagcctcaccaccgtacgacgtgcagattgtagatgatgaggggaacgtattgcctccgggggaggaaggcaacgtggccgtcaggatacggcccactcgcccattctgcttttttaattgctacttggacaaccccgagaaaactgcagcctcggagcagggcgacttttacattaccggcgacagggcaagaatggataaggatggctacttttggtttatgggcagaaacgacgacgtgataaacagctcgtcataccgcataggtcccgttgaagtggagagcgctcttgctgaacaccccgctgttctggagagtgcagtagtctccagccctgatcccatcagaggggaagttgttaaggcatttatcgttcttacccccgcttatagtagccatgatcccgaggccttgactagggaactccaggagcatgtcaaacgcgttacggccccctacaagtatccgcgcaaagtggctttcgtatcggagttacccaagaccgtgagcggcaagatccagagatctaaactgaggtcgcaagagtggggtaagtag

SEQ ID NO: 177927 - DNA, 2070 bp, synthetic construct
  misc_feature 1..2070: note = Description of Artificial Sequence: Synthetic coding sequence
  source 1..2070: mol_type = other DNA
atggccgcccggaccctgggccggggcgtgggccggctgctgggctcacttcgtgggttatctgggcagccagcgagacccccctgcggcgtaagcgccccccggagggccgcaagtgggccctctggatccgcacccgctgtggccgctgccgcagcccagcctggtagctacccggcattgagcgcgcaggccgcccgtgagcctgcagctttctggggacccctcgccagagatacactggtgtgggataccccgtaccacacagtttgggattgcgatttcagtactggcaaaataggatggttccttggtggtcagctgaacgtatccgtcaactgcctggatcagcacgttagaaaatcccctgagtctgtggctctcatctgggaacgagatgaacccggaaccgaggtgcggatcacatatagagagctcctagaaactacatgtcgcttggctaacaccctgaagcgccacggggtacatcgcggtgatagagtggcaatttatatgcccgttagcccattggccgtggcagccatgctggcctgtgccagaatcggagcagtgcatactgtgatttttgctgggttttcagctgaaagtttggccggacgcatcaatgatgccaagtgcaaagtggtcatcacttttaaccagggccttagagggggccgtgttgtcgaactgaaaaagatcgttgacgaggctgtcaaacactgccctactgtccaacatgttctggttgctcaccggaccgataacaaggttcacatgggggacctggacgttcctctggagcaagagatggcgaaagaggatccggtttgtgctcccgaatcaatgggttctgaggatatgctgtttatgctgtatacttccgggtctacaggaatgccaaagggcatcgtacacacacaggctggatacttactctacgcagccctgacccacaaactggtattcgatcaccaacctggtgacatctttggttgcgtggctgatatcggatggatcacagggcacagttacgtcgtttatggcccactctgcaacggcgccacctcagtcctatttgagagtactcctgtatatcctaatgccggtaggtattgggagacagtggaacggctcaaaattaatcagttttacggtgcgcctacagccgtccgattgctcctcaaatatggagacgcatgggttaaaaaatacgaccgcagtagtttgagaacactcggaagcgtgggagagccaataaactgtgaggcctgggagtggctgcaccgcgtagttggcgactctcgatgcactctggtggatacctggtggcagacagagactggcggtatctgtatcgctcctcggccgtccgaggaaggggcagaaattctccccgcaatggccatgaggccttttttcggcattgtccctgtgctcatggatgagaagggtagcgttgtcgaaggaagcaacgtctctggcgccctatgcatatcgcaggcttggccaggcatggcccgcaccatctacggggaccaccagaggtttgtggatgcctacttcaaagcgtatcccgggtactactttaccggggatggggcgtacagaacagaaggaggttactatcagattacaggcaggatggacgacgtaataaacatatccgggcaccgcttggggaccgctgagatcgaggatgccattgccgaccatcctgccgttcctgaatcggccgttataggttacccccatgatattaaaggggaggcagcctttgccttcattgtggttaaagacagcgccggtgactccgacgtggtcgtccaggagctcaagtctatggttgctaccaaaatagctaagtacgccgtcccagacgaaatacttgtggtcaagcggctgcccaagacccgaagcgggaaagtaatgaggaggctgttgcggaagataatcacctccgaagctcaggaacttggagatacaactacactggaggatccatccataattgccgaaattctgtccgtttaccagaaatgcaaagacaagcaggccgccgcaaagtag

SEQ ID NO: 177928 - DNA, 462 bp, synthetic construct
  misc_feature 1..462: note = Description of Artificial Sequence: Synthetic coding sequence
  source 1..462: mol_type = other DNA
atggccgcccggaccctgggccggggcgtgggccggctgctgggcagccttcggggacttagtgggcagcccgcccgacccccctgcggggtctccgctcctcgccgtgccgccagtggcccttctgggtctgctccggctgtggcagcagcggctgcacaacctggcagctaccccgccctcagcgcacaggcggcccgtgaacccgctgcattttggggccctttagcgcgtgacacactcgtatgggacacaccgtaccacactgtgtgggattgcgatttcagtacgggcaaaatcgggtggttcctaggagggcaacttaacgtctctgtgaattgtctcgaccagcacgtgcggaagagcccggagagtgtcgcgttgatttgggaaagggacgagccgggaaccgaagtgagaatcacttactctccctggctccaaatgccttgtggaccatag

SEQ ID NO: 177929 - DNA, 1455 bp, synthetic construct
  misc_feature 1..1455: note = Description of Artificial Sequence: Synthetic coding sequence
  source 1..1455: mol_type = other DNA
atggccgcccggaccctgggccggggcgtgggccggctgctgggctcccttcgtggattgagcggacagcccgctcggcccccatgcggagtgagcgcgcctcgccgcgcggcaagcggaccatccggatctgcccccgctgtggcagccgcagcagcacaaccaggcagttaccccgcattgtctgcccaggcagccagagaacccgctgccttttgggggcctcttgccagagatacactggtatgggataccccctaccacactgtctgggactgtgactttagtacaggcaagattgggtggttccttggtgggcagctgaacgtctccgtgaattgccttgatcaacacgtgaggaagagtcccgaaagcgtggccctcatctgggaacgggatgaacctgggaccgaggtacgaattacttaccgcgaactgctggaaacaacctgtagattagccaacactctcaagcgccatggggtgcaccgcggggatagagtagccatatatatgcccgtgtcccctctggccgttgccgctatgctggcatgtgcaagaatcggcgctgtgcacacagtcatatttgccgggtttagtgctgagagcctggctggaaggatcaacgacgtgggcgagcctatcaattgtgaggcttgggaatggctgcacagggtggtgggggatagtcggtgcacactggtggacacatggtggcagacggagaccggggggatctgcatagctccgcgcccctccgaagaaggagcagaaatattacctgctatggccatgcgtcctttctttgggatcgtgcccgtcctcatggacgagaagggaagcgttgtggaagggagcaacgtttccggagctctgtgtatcagccaggcttggcccgggatggcacgcaccatctatggggaccatcaacgttttgtagatgcctatttcaaggcttacccaggatactatttcacgggtgacggggcctaccgcacagaaggtgggtactaccagattaccggtagaatggacgacgtgatcaatatctcaggccaccgcttgggaactgctgagatcgaagacgctattgccgatcatcccgcagtacctgaaagcgccgtgattgggtacccccacgacattaagggggaggccgcatttgctttcatcgtcgtcaaggactctgctggcgactcagatgtggtggtgcaggagctgaaatccatggttgccacaaaaatcgctaagtacgcggtgcccgatgagattctggtcgtcaaacgacttcctaaaactcggagtggtaaagttatgcgacgtctgttacgaaagatcatcacttcagaagcgcaggagctgggggacactaccactttggaggacccttccattatcgcggaaattctctctgtttaccaaaagtgcaaggacaagcaggctgccgctaaatag

SEQ ID NO: 177930 - DNA, 1728 bp, synthetic construct
  misc_feature 1..1728: note = Description of Artificial Sequence: Synthetic coding sequence
  source 1..1728: mol_type = other DNA
atggccgcccggaccctgggccggggcgtgggccggctgctgggctccctgcgaggtcttagtggtcagccagctcgcccgccttgtggcgtcagcgcacctagacgggccgcaagcggccccagcggctccgctccagcagttgccgctgccgcagcacaacccggaagctaccccgctctgagcgcccaggctgcccgggagccagcagccttttggggcccactggccagagatactttagtgtgggacacaccttatcacacagtttgggactgcgatttctcaacaggtaagattgggtggttcttgggcgggcaactaaacgtcagcgtcaactgtttggatcagcacgtccgaaaatccccagagtctgtagcactgatatgggaaagggatgagcccggtaccgaagtcagaattacatacagagagctcctggagaccacctgccggctggcgaatacattaaaaagacatggggttcataggggcgatagggtggctatctacatgccagtctcccctctggcagtggctgccatgctggcttgcgctaggatcggcgccgttcataccgtgatatttgccggcttttctgcggagagcttggccggtcgcatcaacgacgccaaatgtaaggtggtcatcaccttcaaccagggcctgagggggggcagggtggtcgagctgaaaaagatcgtcgatgaagcagtgaaacactgccctacagtccaacatgtccttgtggctcaccggaccgacaacaaggtgcatatgggtgacctagatgtacctcttgaacaggagatggcaaaagaggacccagtgtgcgcacccgagtctatgggaagtgaggatatgctgtttatgctatatacaagcgggtcaacagggatgcctaaggggattgtccacacacaggccggataccttctctatgctgccttaacccataagttggtgttcgatcaccagccaggcgatattttcggctgcgtagcggacataggctggatcacaggccattcttacgtggtatatgggcctctatgcaacggtgctaccagcgtcttgtttgaaagcacccccgtctatcccaatgctggaagatattgggaaacggttgagcgccttaagattaatcaattctatggggctcctacagcagtcaggcttctccttaaatacggcgatgcttgggtgaaaaaatatgatcgcagctcgctgcgtaccctggggagtgtgggtgaacctatcaactgcgaggcctgggagtggctgcacagggtggtgggcgacagtagatgtaccctggtagatacgtggtggcagaccgaaacgggaggcatctgtatcgcaccaaggccttccgaggagggcgcagagattctgcctgccatggccatgaggccgttctttggcattgtgcccgttcttatggatgagaagggctcagttgtcgaaggaagtaacgtctccggagccctgtgtatctcacaggcctggccgggaatggctcgtacaatttacggtgatcaccagcgttttgtcgatgcctactttaaggcttaccctggttactattttaccggagatggggcctaccgtaccgaaggcgggtactaccagattaccggcaggatggacgacgtgataaatatacttcagatcgtgggcttctttcgggaagcaatccggaatagtggagacctcctcgagcattag

SEQ ID NO: 177931 - DNA, 1821 bp, synthetic construct
  misc_feature 1..1821: note = Description of Artificial Sequence: Synthetic coding sequence
  source 1..1821: mol_type = other DNA
atgctgaagaccttcctgttcctggagaagtacttcccctgcatcaagtacagctccgcttgcttcccaggcactggcttggacgtgtatgacatcaagtttgcagtcctattgcaccctcaaactgcactgcactttggacctcccccctcactcatggcctttagcagtctgtgctgccgggagctgcttgaaaccacctgccgcctagcaaatacattgaagagacacggggttcatcggggggatcgagttgccatctacatgcctgtgagtcccctcgccgttgcggcaatgttagcttgcgcccgcattggtgctgtgcatactgtgatcttcgccggattttcagcagagtcattagccggtcgcatcaatgatgcaaaatgcaaggtcgtcatcactttcaaccagggactgcgcggcggtagggtggtcgaattaaagaagatagttgacgaggcggtgaagcattgtccaacagttcagcatgttctagtggcacaccggacagacaataaagtccatatgggagatctggatgtccctttggagcaggagatggcaaaagaagatcccgtctgtgctcccgagtcaatgggcagcgaggatatgctcttcatgctttataccagcggctccactgggatgcctaagggaattgtgcatacgcaggcaggatatcttttatatgcagctctcacacataagctggtatttgaccaccagcctggagacatttttggatgtgtcgctgacattggctggattaccggtcattcatacgttgtgtacggccccttgtgtaatggtgcgacctccgtgctgtttgagagcaccccagtgtaccctaacgcagggcggtattgggagaccgtagaacggttgaagattaatcagttttacggagctcccactgcggttcggttgctactgaagtacggcgatgcttgggtcaagaagtatgacaggtcaagcttacggacgctgggttcagtcggagaaccaatcaattgcgaggcttgggaatggctccatagagtcgttggagactctcgctgtactctggtcgacacttggtggcagacagagaccgggggcatctgcattgcccccaggccatctgaagagggagctgaaatcttgcccgctatggccatgaggcccttcttcggtatcgtccctgtcctgatggacgagaaaggaagtgtggtagagggatcaaacgtcagtggggccctgtgcatcagccaggcctggcccgggatggcacggactatttacggcgaccatcagaggttcgtagacgcatatttcaaggcatatccgggctactactttaccggcgatggcgcctataggactgaggggggctattatcagatcacagggcgcatggacgatgtgatcaatatctccggtcaccgattgggcaccgccgagattgaggatgctattgctgatcatcccgctgtcccggaaagtgctgtcataggctacccgcatgatatcaaaggggaagccgcgtttgcattcatcgttgttaaggattcagctggggacagcgatgttgtggtccaggaactcaaatccatggtggcaacaaagattgccaagtacgccgttcctgacgaaatcctcgttgttaagcgactgcccaagacaagaagtggcaaggttatgcgccgactcctcaggaagatcatcacctctgaagcccaggaactaggggatactacaaccctggaggatccttcaatcattgcagagattctgtcagtttaccagaaatgcaaagataagcaagccgcagccaagtag

SEQ ID NO: 177932 - DNA, 1707 bp, synthetic construct
  misc_feature 1..1707: note = Description of Artificial Sequence: Synthetic coding sequence
  source 1..1707: mol_type = other DNA
atgcggcggcggaaggagcggcagccctgggaccggttccacttccttcactttgctcctcacggcagagaattactggaaactacctgcaggctggctaacaccctcaagaggcacggagtgcatagaggagacagagtcgccatctatatgcccgtttcccctcttgctgttgcagccatgctggcttgcgcacgcattggagctgtacacaccgtgatttttgcagggttcagcgccgagagtctcgcaggcaggattaacgacgcgaagtgtaaggtcgtgatcacattcaatcaaggcttgaggggaggtcgagtggttgaactgaaaaagattgtggatgaggccgtcaaacattgccccaccgtgcagcacgtgctggtggctcatcgcacagacaacaaagtccatatgggtgatctggacgtgccactggaacaggagatggccaaagaagatccggtgtgtgctcctgaatctatggggtctgaggatatgcttttcatgctgtatactagcggatcaactggtatgccaaaaggcattgtgcatacccaagcgggatacctgctttatgcagcgctgacacacaaacttgtgtttgaccatcagcccggagacatcttcgggtgtgttgccgacatcggctggattacgggccactcgtacgtggtgtatggtcccctgtgcaacggcgctaccagcgtcctgttcgagagtactcccgtctatcctaacgccggacggtactgggagactgttgagcgcctgaaaattaatcagttctatggggctcctacagccgtgcgcctgctgctcaaatacggagatgcttgggtcaaaaaatatgaccggtcaagcctgcgcaccttgggctccgtaggagagcccattaactgcgaggcttgggagtggctgcacagagtggtgggagactcacgatgcactctggtcgacacttggtggcagactgaaaccggaggaatttgcatcgcacctaggccctcagaggaaggggccgagatcctgccagccatggcgatgcgaccatttttcggtattgtcccagttttgatggatgaaaaggggtcagtcgttgagggatcgaacgtatctggggcgctttgcattagccaagcctggcccggtatggcacgcaccatatatggagaccatcagcggttcgtcgacgcctacttcaaagcatatcctggatactactttactggggacggagcttataggacagagggcggctactaccagatcaccggaaggatggatgatgtgatcaacattagcgggcaccgcttgggtaccgccgagatagaggacgccatagctgatcatccagcagtgccagaaagcgctgtcatcggatacccccacgatattaaaggcgaagccgctttcgccttcatcgtggtaaaggatagcgctggagactctgacgtcgtggtccaggaattgaaatcaatggtcgctaccaaaatcgccaagtatgctgtaccagacgaaatcttagtcgtgaagcggctcccgaaaacccgctccgggaaggtgatgaggcgactgttacgcaaaatcataacatcagaggcccaggagctgggcgataccactacactagaggatcctagtattattgctgaaatcctgtctgtgtaccaaaaatgcaaagacaagcaagctgcagctaaatag

SEQ ID NO: 177933 - DNA, 2145 bp, synthetic construct
  misc_feature 1..2145: note = Description of Artificial Sequence: Synthetic coding sequence
  source 1..2145: mol_type = other DNA
atgggcctgcccgaggagcgggtgcggagcggcagcggcagccggggccaggaggaggccggagccggagggcgggccagatcttggagcccacctccagaagtgtcccgaagcgcacatgtgccctcactccagcggtacagggagctgcaccgtcgatctgtggaggagccccgagaattctggggtgatatcgcaaaagaattttactggaaaaccccctgccccggaccatttctgcgttacaactttgatgtgacaaagggtaagatattcatcgaatggatgaaaggagctacaacgaacatttgctataacgtgctggaccgtaacgtgcacgagaagaaactgggagacaaggttgccttctactgggagggaaacgaacccggggaaaccacccagattacttatcatcagttgctcgtacaggtgtgtcaattctcgaacgtgttgcggaagcagggaatccagaagggagaccgtgtagccatctacatgccaatgattcctgagttggtggttgcaatgttggcttgtgcgcgaattggggccctgcactccatcgtcttcgccgggttctcctccgaatcgctgtgtgagaggatcctcgactccagctgctctcttcttatcactaccgacgccttctatcggggcgagaaactcgtgaatctcaaagagctcgctgacgaggccctccaaaagtgccaggagaagggctttcctgtcagatgctgcatcgtggttaaacacctcgggagagccgaactgggcatgggcgattccacgagccagtcccctccgattaaaagaagctgccctgacgttcaaggtaagctgaaagagaagtctaaaagggtgcagccgcagatatcttggaaccagggtatagacctatggtggcatgaattgatgcaggaggctggcgacgaatgcgagcccgagtggtgcgacgcggaagatcccctttttatactttacacttccggatcaacaggcaaaccgaaaggagtggtccacactgtgggcgggtatatgctgtacgtggctaccaccttcaagtatgtttttgactttcacgctgaagacgtgttctggtgcaccgcagatatcggctggatcaccgggcactcctatgtcacatacggccccttggctaatggggctactagcgtcctgtttgagggaatccctacgtacccagatgtaaatcgcctgtggtcaattgtggacaagtacaaggttaccaagttctacacggcccctaccgccataaggctgctgatgaagtttggggacgagccggtgaccaaacattctagggccagcctgcaggtcctgggaaccgtcggcgagccgattaatcccgaggcctggttatggtaccacagagtggtgggtgctcagcgctgtcctattgtggacacattctggcagaccgagactgggggacacatgctgactcccctccccggcgcgacgcccatgaagcccggctccgccacattcccctttttcggtgtggcccctgcaatcctcaacgaaagtggtgaggagttagaaggcgaggcggaaggctatctggtgtttaaacagccctggccaggaatcatgcggacagtctatggcaaccatgagcggttcgaaaccacatattttaagaagtttcctggttactacgttactggagatggctgtcagcgggatcaggatggatactactggatcaccggcaggatcgacgatatgctgaacgtaagcggccacctgctgtcaaccgccgaagtcgagtctgccctggtggagcacgaggcagtagctgaggcagccgttgtagggcaccctcatcctgtgaaaggcgaatgcctctattgttttgtgacactatgtgatggccatacgtttagccctaaactcaccgaagaactcaagaagcagattcgcgaaaagattgggcccatcgctacgcctgactacattcagaatgccccgggcctgccaaagacccgctccggcaagattatgcgtcgagtgctccggaaaatcgcccagaacgatcacgatctcggcgatatgtctacagttgctgacccatctgtgatctctcacctcttttcgcaccgctgccttactatacagtag

SEQ ID NO: 177934 - DNA, 1956 bp, synthetic construct
  misc_feature 1..1956: note = Description of Artificial Sequence: Synthetic coding sequence
  source 1..1956: mol_type = other DNA
atgatggtgcggtgggccctgctgtgcgagttctggggcgacatcgctaaggaattttattggaaaactccgtgtcccgggccttttctgcgttacaacttcgacgtcaccaagggcaaaatctttattgaatggatgaagggagccactactaatatctgctataatgtcctcgacaggaacgtgcacgaaaaaaagcttggtgacaaggtcgctttttactgggagggcaacgagccaggagagactacacagatcacgtaccaccagctgctggtgcaggtttgccagttctccaatgttttgcggaagcagggcatccagaaaggagatcgggtcgccatctacatgccaatgatacctgagctggtggttgccatgcttgcctgtgccagaataggagctctacactccattgtctttgccggattttctagcgagagtttatgcgaaagaatcctggacagctcatgctctctgcttattacaaccgacgccttttaccgtggggagaaactggttaacctgaaagaattagcagacgaagctctccagaaatgccaggagaaggggttccctgtgcgctgctgtatcgtggtaaagcaccttggtcgcgccgaactagggatgggcgactccacttcgcagtcgccaccgatcaagcgttcttgcccggatgtacagatctcttggaaccaggggatagatctctggtggcatgagctgatgcaggaggctggtgatgagtgtgagccagagtggtgtgacgctgaagaccctctttttatcctgtatacaagtggttctacagggaagccgaaaggcgtcgtacatacagtcgggggttacatgctgtatgtcgctacaacttttaaatacgtgttcgatttccacgcagaggatgtcttttggtgtaccgccgatataggctggatcacaggtcactcctacgtgacatacgggccgctggctaacggcgctaccagtgtgttgttcgaagggataccaacatatccagacgtgaataggctgtggagcattgtggacaaatataaggtgacaaagttctatactgcccctactgccattcgactgctcatgaagttcggcgatgaaccagtcaccaaacattctcgcgcctcattacaggttttaggtacagtgggtgagccgatcaaccccgaggcctggctttggtaccaccgggtagtcggggcccagcgctgtcccatcgtcgacaccttttggcagacagagaccgggggccacatgctgacccccctcccaggggctacacctatgaaacctggtagtgccaccttccctttcttcggagtggcgcccgcaattttgaatgagtccggagaggagctggagggggaagctgagggttacctggtttttaagcagccttggcccggcatcatgaggactgtgtatggaaatcacgagcgatttgaaacaacctactttaagaaattccccggatattatgtgaccggcgacggatgtcaaagagaccaggatgggtattattggatcacaggaagaatcgatgacatgctgaatgtgtccgggcacctcctgagcacggctgaggttgagagcgccctggtggagcatgaggctgtcgctgaggcggcagttgtggggcacccccacccggttaagggtgaatgtctgtattgctttgtgacactttgtgacgggcacacattctcaccgaaacttacagaggaactcaagaagcagatcagagagaagatcggcccaatcgccacgcccgattacattcaaaatgctcctggcttgccaaaaaccagatctggtaaaatcatgaggcgagtgcttcggaagatcgcccagaatgaccatgatttgggcgatatgtctacagttgccgacccttccgtaataagtcaccttttttcccaccgctgcctgaccatccagtag

SEQ ID NO: 177935 - DNA, 2106 bp, synthetic construct
  misc_feature 1..2106: note = Description of Artificial Sequence: Synthetic coding sequence
  source 1..2106: mol_type = other DNA
atgggcctgcccgaggagcgggtgcggagcggcagcggcagccggggccaagaagaggcaggcgccggagggagggccaggagctggagtccaccccctgaagtgtcacgctccgcccacgtgccatcgcttcagcggtaccgcgagctccaccggaggtccgtcgaagagcctcgggaattctggggcgatatcgccaaggagttctactggaagaccccctgccctgggcctttcctgcggtataacttcgacgtcactaaaggcaaaatcttcattgagtggatgaagggagccacaactaacatctgttacaatgtgcttgatagaaatgtgcacgagaagaagctgggcgataaagtggctttctactgggaggggaacgaacctggagagactacccaaatcacttatcaccagttactggtacaggtgtgtcagttttccaacgtcctgaggaagcaggggatacagaaaggcgatcgggtggctatttacatgcccatgatccccgagttagttgtggccatgctggcttgtgcccggatcggtgctctgcacagtattgtgttcgccgggttcagtagtgagtctctgtgtgaacggatcctggattcaagctgtagcctgcttattacaacagacgcattttacagaggggagaaattagtgaacttaaaggaactggcagatgaggcccttcagaagtgtcaggaaaaaggatttcccgtcagatgttgcatagtcgttaaacacttagggcgggctgagctgggcatgggagacagtacatctcagtcacctcccattaagagaagctgtccagacgtacagattagttggaaccaggggatcgacctttggtggcatgagctgatgcaggaagccggtgacgagtgcgagccggaatggtgtgatgctgaggaccccctgtttatactgtatacatctggttcaacagggaagccgaaaggggtcgttcacactgtgggtggctatatgctctatgtggcaacaacgtttaagtacgtattcgacttccatgctgaagacgtcttttggtgcaccgctgacattggttggataactgggcatagctacgtcacatatgggcctcttgctaacggcgcaacaagcgtgctcttcgagggcatccccacgtatccagacgttaacaggctctggtctattgtggacaaatataaagtaacaaagttttacaccgcgccaacagctatacggctgctgatgaaatttggcgacgaaccagtcactaaacactccagagcaagcctacaggtcctgggtaccgtcggcgaacctatcaaccccgaagcctggctttggtatcatcgcgtggtgggggcacagagatgtccgattgtggacaccttttggcaaacagagacaggtggccacatgctgacaccattgcctggcgcgacaccgatgaagcctggatcggcaaccttcccattctttggcgttgccccagccatcctaaatgagagcggtgaagagctggaaggcgaggccgaaggctatctcgtctttaaacaaccatggcccgggatcatgagaaccgtttatggcaatcatgagcggttcgagaccacgtattttaagaaattccccggctactacgttacaggagacggatgtcagagagaccaagacggctactattggatcaccggtaggatcgatgacatgctgaacgtttccggtcatttgctctccaccgccgaggtcgagtccgccttggttgagcacgaggccgtcgctgaagcagcagtggtgggccatcctcaccccgtaaagggcgagtgcctgtactgttttgtgacactatgcgacggccataccttcagcccgaaactcactgaagaactcaaaaagcaaatacgggagaagattgggccaattgccacgcccgattatattcagaacgctcctgggctccctaaaaccagatcggggaaaatcatgcgacgggttctgagaaagattgcccagaacgatcacgatctgggcgatatgtccaccgtggctgatcctagcgtgattagccacctgtttagccacagatgtctgaccattcagtag

SEQ ID NO: 177936 - DNA, 2100 bp, synthetic construct
  misc_feature 1..2100: note = Description of Artificial Sequence: Synthetic coding sequence
  source 1..2100: mol_type = other DNA
atgggcctgcccgaggagcgggtgcggagcggcagcggcagccggggccaggaagaagcaggcgctggcggacgggctcgcagctggtctccaccgccagaagtttccagaagcgcacatgtgcctagcctgcagcgctatagagagcttcataggcgtagtgtcgaggagccacgcgagttttggggagatatcgcgaaagaattttattggaagaccccatgtccaggtccatttctgaggtacaactttgacgttacaaaaggcaaaatattcattgagtggatgaaaggggccactaccaatatatgctataacgtgctagatagaaatgttcacgagaaaaaactgggagacaaggtcgccttctattgggaaggaaatgagccgggtgaaacgacccagatcacataccaccagctgttggtccaggtgtgtcagtttagtaacgtgctgcgcaagcagggcatccagaaaggcgaccgagtggcaatttacatgcccatgatacctgagctggtcgtggccatgctggcttgcgctcgcattggggccttacactctatcgtgttcgccggctttagctcagaaagcctttgcgagagaattcttgattcctcctgctctctccttataactaccgatgcattttatcgcggcgagaagctcgtgaatctcaaggaactggccgatgaggccctgcagaagtgtcaggagaaaggcttccccgtgagatgttgcatagtggtgaagcacttgggacgggcggagttaggaatgggcgactcaacttcacaatcacctccgatcaaaaggtcatgccccgatgtgcaaatcagctggaatcagggcatcgatctatggtggcacgaactcatgcaggaggccggagacgagtgcgagccggaatggtgtgatgccgaacattcaagtagctgcacgcctgtagcgccgcaggctaacccgcgtgtgtggtttacccaactgggtgccacttgttatgtggccaccacctttaaatacgttttcgactttcacgccgaagatgtgttctggtgcacagctgatatcggttggataacgggccactcatacgtcacatacggccctctggctaatggagcaacctccgttctcttcgaaggtatcccgacatacccagacgtcaatcggctgtggagcatcgtggataagtacaaggtaaccaagttttatacagcaccgacagccatacggctcctgatgaagttcggggatgagcctgtaaccaaacattcccgcgctagtttacaagtgctgggaacggtgggagagccgataaaccccgaggcatggctctggtaccatcgggtcgtgggggcacagagatgccccattgtggacactttctggcagaccgagacgggtggtcacatgctcaccccccttcctggcgccacccctatgaagcctgggagcgccactttcccgttttttggtgtcgccccagccattctgaacgagtctggggaagaactagagggggaggccgaaggatatctggtctttaagcagccatggccagggattatgcgcaccgtgtatggcaatcacgagagatttgagactacttattttaagaagttcccgggatactacgtcacgggagacggttgccagagagatcaagatgggtactactggatcaccggccgtattgatgacatgctcaatgtttcagggcaccttctctccactgctgaggtggaatctgctctggtggaacacgaggcggtcgccgaagcggccgtggtaggacacccacatcctgtcaagggtgagtgtttgtattgttttgtgactctgtgcgatggccacaccttctcacccaaactcaccgaggagctgaaaaagcagatacgcgagaagattggccctattgctacccccgattatatccaaaacgctcctggcctgccaaaaactagatcaggcaagatcatgagaagagtgctgcggaagatcgcacaaaacgatcacgatctcggagatatgagtacagtggccgacccatccgtaatctcccacctctttagccacaggtgcctgaccattcagtag

SEQ ID NO: 177937 - DNA, 1230 bp, synthetic construct
  misc_feature 1..1230: note = Description of Artificial Sequence: Synthetic coding sequence
  source 1..1230: mol_type = other DNA
atgcaggaggccggcgacgagtgcgagcccgagtggtgcgacgccgaagatcccttgttcatattgtacacaagcgggtctaccggcaagcccaaaggcgttgtgcacacagtgggggggtacatgctctacgtggcaaccactttcaagtacgttttcgattttcacgcggaagatgttttctggtgcaccgctgatattggatggataaccggccactcttacgttacctacggacccctggcaaacggcgcaacaagtgtactcttcgagggcatcccaacctatccagacgtcaacaggctttggtcgatcgtggataagtataaggtgaccaagttttatactgccccaacggcgatccggttgctcatgaagttcggggacgaaccagtcaccaagcattcacgcgctagtctccaggttctcggtacagtgggtgaacctataaacccagaagcatggttgtggtaccatcgggtggttggagctcagagatgtcctatagttgatacattttggcagaccgaaacaggcgggcacatgctgactccactgcccggggcgacgccaatgaagcccggttcagcgactttcccattcttcggtgtggccccagcaatccttaacgagtccggcgaagagcttgagggtgaagctgagggctacctagtgtttaagcagccttggcctggcatcatgaggacagtgtatggaaatcacgagcggttcgagacaacctatttcaagaagtttcccgggtattacgtgacaggtgacggctgccagagagatcaggacggctactattggattaccggtcgcattgatgacatgttaaacgtgtcagggcatctcttgagcactgccgaggttgaaagcgccctggtggaacatgaggcagtcgccgaagccgctgtagtcggtcacccacatccagtgaaaggggaatgcctgtactgcttcgtgacgttgtgcgatggccacaccttttcccctaaattgacagaagaactgaagaaacaaatccgggagaagatagggcccattgctacaccagactacatccagaacgccccaggtttgccaaaaacaagaagtggaaaaatcatgagaagggtcctcagaaaaattgctcagaatgaccatgacctgggagacatgtctactgtggccgacccatccgtcatttctcacctcttttcccatcgttgcttaaccatacagtag

SEQ ID NO: 177938 - DNA, 114 bp, synthetic construct
  misc_feature 1..114: note = Description of Artificial Sequence: Synthetic coding sequence
  source 1..114: mol_type = other DNA
atgatggtgcggtgggccctgctgtgcggcgagtgccggatcctgggaaggcactgccagggtatactgctggaggattccatgccttggcccatcccctcggtacagctctag

SEQ ID NO: 177939 - DNA, 2061 bp, synthetic construct
  misc_feature 1..2061: note = Description of Artificial Sequence: Synthetic coding sequence
  source 1..2061: mol_type = other DNA
atgaagcccagctggctgcagtgccggaaggtgaccagcgccggcggactgggcgggccccttcccgggagcagccccgcccgaggtgctggcgcagccctacgcgccctggtggtgcctggcccccggggaggcctgggaggccgcggttgccgggctctgagtagcggatctggcagtgagtacaaaactcatttcgcagccagcgtcacggaccccgaaaggttctggggtaaggctgctgaacagatttcctggtacaaaccttggacaaagactctggaaaataagcactccccatccactaggtggtttgtagaagggatgttaaacatatgctataacgcagtggacaggcatatcgagaacggcaaaggtgataaaatcgcaattatctacgattcgcctgtgaccaacacaaaagccacgtttacttacaaggaggtgctggaacaggtgtcgaagctggccggagtccttgtcaagcatggaattaaaaagggggatacagtggtgatatatatgcctatgatcccgcaggcaatgtacacgatgcttgcctgcgcacgcataggcgctatccactccctgatattcgggggatttgcgtctaaggagttgagcagccgcattgatcacgtgaagccaaaggtggtggtgacggcatcattcggtatcgaacctgggcggcgcgtcgaatatgtgccccttgtcgaggaagccttaaaaattggccaacataagcctgataagatccttatctataaccggccaaatatggaagccgtcccattagctccgggtcgagaccttgactgggatgaagaaatggctaaagctcagtctcacgattgcgtccccgtgttgagcgaacaccccctttacatcctctacacttccgggacaaccgggctgcctaaaggcgtgatacggccaactgggggctacgccgtcatgctgcattggtctatgtctagcatctacgggctgcaacctggcgaggtttggtgggccgcatccgatttaggttgggtcgtcggccattcttatatctgctacggccccttgctgcatggtaacactaccgtgctctacgaaggcaagcctgtcgggacccccgacgctggggcgtactttcgggtccttgccgaacacggggtcgccgctctgtttaccgctccaaccgccattcgggccattcgacaacaagatcccggggccgccctgggcaagcagtatagcctaacccgcttcaagaccttattcgtagccggtgaacgctgcgacgtcgagacactcgagtggtccaaaaatgtgttcagggtaccggtgctggaccactggtggcaaacagaaacgggcagtccaatcaccgcctcctgcgtgggcttgggcaatagcaaaaccccccctccaggccaggccgggaagagtgttcccggttataatgtaatgattcttgacgataacatgcagaaactcaaggctcggtgcctcggcaacatcgtagtaaaactcccattacccccaggagcctttagtggtctttggaagaatcaggaagcttttaaacacctgtacttcgagaaattccccggatattacgacactatggacgctggctacatggacgaggaggggtacctgtatgtgatgtcacgcgtggatgatgtgatcaatgtagccggacaccggatctcagccggggccatcgaagagagcatcctgagtcacggtactgtggcggattgcgcagttgtcggcaaagaggacccacttaaaggtcatgtgcccctggcgctatgcgtcctcagaaaggacatcaatgcaactgaggagcaggtgctggaggaaattgtgaaacacgtgcgtcaaaatatcggccccgtcgccgctttccgcaatgcagtgtttgtaaagcagctgccaaaaaccagatccggaaagattcctagaagcgctctgtccgcgatcgtcaacggtaagccatacaaaattacatcaactattgaggatccttcaattttcgggcacgtggaagaaatgctcaagcaggcctag

SEQ ID NO: 177940 - DNA, 1107 bp, synthetic construct
  misc_feature 1..1107: note = Description of Artificial Sequence: Synthetic coding sequence
  source 1..1107: mol_type = other DNA
atgctgcactggagcatgagcagcatctacggcctgcagcccggcgaggtctggtgggccgcaagtgatctgggatgggtagtgggacacagttacatctgttacggcccgctgttacacggaaacaccacagtgctctacgagggcaagcccgtagggaccccggacgccggagcctatttccgagtgctggccgaacatggcgttgccgcgttgtttacagctcccactgcgatcagagccatccgacagcaagaccccggagccgccttaggcaagcagtactccctgacaaggttcaagaccctgtttgtcgctggcgagcgctgcgatgttgagacacttgagtggtctaaaaacgtttttcgagtgccagttctggaccattggtggcagacagaaactgggtcaccgattaccgctagctgcgtaggtctgggaaatagtaagacccccccccctggccaagccgggaagtccgtgccaggatataacgtgatgatactggacgataacatgcagaagcttaaggcccgatgcttaggaaacattgtggtgaagctgcccctcccacctggagcattcagcggactctggaagaatcaagaggccttcaaacacctttactttgagaagtttcccggatattatgacactatggacgccggatatatggacgaggagggctacttgtacgtgatgtcaagggtcgacgacgtcattaacgtggcaggccatagaataagtgctggggctattgaagagtccatcctatcccacgggactgtggcagactgcgctgtggtagggaaggaagatccactgaaggggcacgtcccccttgccctttgtgtattgagaaaagacattaatgccaccgaggagcaggtcctggaagaaatagttaagcacgtgagacagaacataggaccagtggcggcttttcgcaacgctgtgttcgtaaaacagctgccgaaaacccgctctggaaaaattccccggagcgctctgagcgccatcgtcaacggcaagccttacaaaatcacttcaaccattgaagatccatcaatctttggccacgtggaggaaatgctaaagcaggcatag

SEQ ID NO: 177941 - DNA, 1266 bp, synthetic construct
  misc_feature 1..1266: note = Description of Artificial Sequence: Synthetic coding sequence
  source 1..1266: mol_type = other DNA
atggccgccaccctgatcctggagcccgccggccggtgctgctgggatgagcccgtacgaatcgccgttcgcgggttggctccagagcagcctgtgactctgcgggcttctctgagagatgagaaaggcgccctgtttcaggcccatgcccgataccgagccgatactctcggtgagctggacttggagcgtgccccagctctggggggctcattcgctggactggagcccatggggttgctgtgggctttggagccagagaagcctcttgtgagattggttaagcgagatgtcagaaccccactggctgtcgagctggaagtccttgacgggcacgacccagaccctggacggctgctatgccgcgtcaggcatgagagatactttctcccacctggcgtgcgcagggagcctgtgagagccggccgtgtcagaggtaccttattcctcccccccgagcctggaccatttcccggaattgtagatatgttcggcacaggcgggggccttctcgagtatcgagcatcccttctcgcaggaaaaggatttgccgtgatggccttggcctattacaattatgaagatctccccaaaaccatggagacgttgcacctggagtacttcgaagaggctgtgaattacctcctgtcacaccctgaagtgaaaggacccggggtcggactgctggggattagtaaaggaggtgaactctgtttgtctatggcatcattcctcaaaggaattaccgcagcagtggtgatcaatggctcagttgccaatgtcggaggaacccttcgttacaagggggaaaccttgccccctgttggagtgaatcgtaacaggattaaggttactaaggacggatatgcagatattgtcgatgtccttaactccccactcgaaggaccagatcaaaaatcctttattcccgtggaaagagccgaatctacattcttgtttttggtgggccaggacgatcacaactggaaaagtgaattttacgccaacgaggcttgtaagaggttacaggcccatggtcgaagaaagcctcaaatcatttgctacccagagactggtcactacatagaaccaccttactttccattgtgccgcgcatcgttgcacgctcttgtgggatctcctatcatatgggggggggagccgagagcccacgctatggcacaggtggacgcgtggaagcagctccaaacgttcttccacaaacacctgggagggcacgaggggactattccctctaaggtttag

SEQ ID NO: 177942 - DNA, 1785 bp, synthetic construct
  misc_feature 1..1785: note = Description of Artificial Sequence: Synthetic coding sequence
  source 1..1785: mol_type = other DNA
atgatccagaacgtgggcaaccacctgcggcggggcctggccagcgtcttctctaaccgaactagtaggaaatcagctcttcgggctgggaacgacagcgccatggctgacggggagggatatcgtaaccctactgaggttcagatgtcacagctcgtgcttccatgccacacgaaccagaggggtgaactgtccgtgggacagctgctgaagtggatcgacaccacggcctgtcttagtgctgagcggcacgcaggctgcccttgcgtgactgcaagtatggatgacatttactttgagcacactatttccgtaggacaagtggtcaatatcaaggccaaggtaaatcgcgcctttaacagtagtatggaggtcgggatccaggtcgcttctgaggatctttgcagcgaaaaacagtggaacgtgtgcaaggctctggccactttcgtcgcaaggcgcgaaatcaccaaggtgaaattaaagcagattacccctcgaacagaggaagagaagatggaacacagtgttgctgcagaacggcgaagaatgaggttagtatatgctgataccattaaggaccttctcgccaattgtgcaatacagggtgacctcgagtcaagagattgcagccgtatggtgcctgcggagaaaacgagagtagaatccgtggaactcgtactccctccacacgccaaccatcagggcaataccttcggtggacagattatggcctggatggagaatgtagcaaccattgcagctagtcgtctgtgcagggcacatcccaccttgaaggcaatcgagatgttccatttccgtggaccctcccaagttggcgatcggctggtgctgaaggccatcgtgaataacgcatttaaacactccatggaggtaggggtctgcgtagaggcatatcggcaggaagcagagacacacaggcggcacatcaattcagcgtttatgacctttgtggtgctggatgctgacgaccaaccccagctacttccttggattagaccccagcctggcgatggcgaacggagatacagagaagcttcggccagaaagaagatccgcctggatcggaagtacatcgtctcctgtaagcagacagaagtcccactgtccgtgccatgggatccaagcaaccaagtttacctgtcttataacaacgtcagctctctgaagatgctcgtggccaaagacaattgggtgttgtcatcagaaatcagccaggtgagactttacacattagaagatgataaatttctgtccttccatatggaaatggtggtgcatgttgacgctgcccaggctttcctgttacttagcgatcttcggcagcgcccagagtgggacaaacactaccgctctgtggagctggtccagcaagtggacgaagacgatgcgatataccacgttacatcgccggcccttggtggccacaccaagccacaggatttcgtaatactcgcctcgcgcaggaaaccttgcgataatggagatccttatgtcatagcgctcagaagcgtgactttacctacccatcgggaaactcccgagtaccgacgtggggagactctctgcagcggtttctgtctgtggagggagggcgatcaactcactaaagtgtcttactacaaccaggctactccaggtgtgctgaactatgtaacaaccaatgtggccgggctatccagcgagttttacacgaccttcaaggcatgtgagcagtttttgcttgataatcgaaacgatctcgccccctcgctacaaaccctctag

SEQ ID NO: 177943 - DNA, 1824 bp, synthetic construct
  misc_feature 1..1824: note = Description of Artificial Sequence: Synthetic coding sequence
  source 1..1824: mol_type = other DNA
atgatccagaacgtgggcaaccacctgcggcggggcctggccagcgtttttagtaaccggacctctcgcaaaagtgccttgagggccggcaatgactcagccatggccgatggggagggttacaggaaccccaccgaagtgcagatgtcacagctagttctgccctgccatacgaatcagcgcggggagcttagcgtgggccagctgttgaaatggatcgacactacagcctgcctctcagcggaaaggcacgcaggttgcccatgcgttacggcatctatggatgatatttactttgagcacaccatcagtgtagggcaagtcgtgaatatcaaagcaaaggtcaaccgggctttcaattcctcaatggaagtcggtatccaggtggcctccgaagatctctgctcagagaagcagtggaatgtgtgtaaggccctggctacatttgttgcacgaagagagattaccaaagtgaagctgaagcagatcacccctaggacagaggaggagaagatggaacactctgtagccgcagaacgcagaaggatgcgcttagtttacgctgataccatcaaagatctccttgctaactgcgctatccaaggggatctggagtccagggactgttcccgtatggtgcctgcagagaagaccagggtggagtctgtagagttagtactcccaccgcacgcaaatcaccagggaaacactttcggggggcaaattatggcttggatggagaacgtggccaccatagccgcgtcacggctatgccgggcccaccctacactcaaagcgatagagatgtttcacttccgggggccaagccaggtgggagataggctcgtactcaaggccattgtaaataacgcttttaagcatagcatggaagtcggagtgtgcgtggaggcttacaggcaggaggccgaaacgcacaggcgacatatcaacagtgcatttatgacttttgtcgtactggatgccgacgaccaacctcagctgctgccgtggataagaccacagccaggggatggggaaagaagatatcgggaggcgtcagcaagaaaaaaaatacggctggatcgcaagtatattgtgtcatgtaagcagaccgaagtgccgctctctgtcccctgggatccaagtaatcaggtatacctgtcctacaataacgtcagtagcctaaagatgctggtggctaaggataattgggttttgagctcagaaatttcccaagtgcgcttatacacactggaggatgataagttcctctcttttcatatggaaatggtggttcatgtagatgccgcgcaggcgttcctgctcctgtcagaccttcgtcaacggcctgagtgggacaaacactacagatcagtcgaactcgtacagcaggtggacgaagacgatgcaatttatcatgtaacaagtccggctctgggcggtcacacaaagcctcaggattttgtgattctcgcatcccgccggaagccatgtgacaacggcgacccttacgtgattgctttaaggtcagtgactctgccaactcatagagaaacccctgaatatcggcgtggagagaccttgtgttccggcttttgcctctggagagagggagatcagctgactaagtgctgttgggtcagagtgtctctcacggaactggtgtctgcctcagggttctactcctggggtctggagtctcgctcaaaaggcagaagaagtgacgggtggaacgggaagctcgcaggcggtcacctatcaacacttaaagccatcccagtcgccaaaatcaattcccgctttgggtatctgcaagacacctag

SEQ ID NO: 177944 - DNA, 1668 bp, synthetic construct
  misc_feature 1..1668: note = Description of Artificial Sequence: Synthetic coding sequence
  source 1..1668: mol_type = other DNA
atggagcggcccgcccccggcgaggtggtgatgagccaggccatccagcccgctcatgctactgcacgcggcgaattgagcgccggacaactcctaaagtggattgatactaccgcctgcctggcagccgagaagcatgccggtgttagctgcgtgaccgcctcagtcgatgacatccagtttgaagagacagcaagggtggggcaggtgatcacaatcaaagctaaggtcaccagggccttctctacttctatggaaatcagcataaaagtgatggtgcaggatatgttaacaggtattgagaagctggtcagcgtcgccttttcgacttttgtggcaaagccagtggggaaggaaaagatccacctgaaacccgtgacccttctcaccgagcaagatcatgtggaacataatctggctgcagagagacggaaggtgcgcctgcaacacgaagacactttcaataacctgatgaaagagtcttctaaatttgacgacctgatcttcgacgaagaagagggggctgtgtccaccagaggcacttctgtgcagtctattgagttggtcctgcctccccatgcaaatcaccacggaaacactttcgggggacagatcatggcctggatggaaacagttgcaactatctccgctagcaggttgtgctgggcccacccattccttaagtcggtggatatgtttaagtttaggggcccatcaaccgtgggcgacaggttagtatttactgcgatcgtcaataacactttccagacttgtgtggaagtgggcgtgcgcgtggaagcatttgactgccaagaatgggcggagggaaggggtcgacacattaattctgcatttctcatttataacgcagctgacgacaaagaaaacttaatcacgttcccgcgcattcaacccatctctaaggatgacttcagacggtatcggggggccatagccaggaagcggattcggcttggccgaaagtatgtaatctctcacaaggaagaggtcccattatgtatccattgggatatttcaaagcaggcctcgttgtctgattctaatgtagaggccctgaaaaaactggccgcaaagcgaggctgggaagtgaccagcactgttgaaaagatcaagatatatacacttgaagagcatgacgtgctttctgtttgggtagagaagcacgtcggatcccctgctcacctcgcctaccgtctgctgtcggattttactaaaaggcccctctgggatccccattttgtcagttgcgaagtgatcgattgggtttcagaggacgatcagctttatcatatcacatgccccatattaaatgacgataagccaaaggacttagtagtgcttgtaagcaggaggaagcccctgaaggatggaaacacatacacagtggcggttaagtcagttatcctaccctccgtccctcctagtcctcaatacatccggagcgaaatcatttgcgccggcttcctaattcacgcgatcgatagcaatagctgtatagtgtcatattttaatcatatgagtgcttccatcctaccatactttgccggcaatctaggcgggtggtctaaatcaatagaggagaccgctgctagttgcattcagtttttagaaaatccccctgatgatggatttgtaagcactttttag

SEQ ID NO: 177945 - DNA, 1452 bp, synthetic construct
  misc_feature 1..1452: note = Description of Artificial Sequence: Synthetic coding sequence
  source 1..1452: mol_type = other DNA
atgagcaacaagctgctgagcccccacccccacagcgtggtgctgcggagcgaattcaagatggcctcttctcctgctgtgctccgagctagcagactttatcagtggtctctgaaatcatccgctcagtttttgggctctcctcagctccggcaggtgggacagatcatcagagttccagcacgaatggctgccaccttgattcttgagcctgctgggcggtgttgctgggacgaacctgtgcggatcgccgtccgcggcctggcccctgagcaaccagttacactgcgcgccagcctccgggatgagaaaggggctctgtttcaagcccacgccagatatcgtgccgacacactgggcgagctagatttagagcgggcaccagccctgggaggaagctttgccggacttgagccgatgggactgctgtgggcacttgaaccagagaaacctctggtgcggctcgttaagcgcgacgttcggactcctttagccgttgagttggaggtcctagatggtcacgacccggacccgggtcgactattatgccagactcgtcacgagcggtacttcttgccacccggagtaaggcgggaaccggtgagagtcggccgcgtccggggcaccttatttcttccacccgagccaggcccatttcctggcattgtagatatgtttggcactggaggtggtctactggaatacagagcatctctgctcgccggaaaaggcttcgcggtgatggcgcttgcctactacaactacgaagacctcccgaaaactatggagacgctgcatctggaatactttgaagaagcaatgaattatctgctgtctcacccggaggttaagggacctggagtgggtctactggggatatcaaagggaggcgagctgtgtttatccatggccagctttttaaagggtatcactgctgcagttgtgatcaacggatctgtggccaacgttggtggtacactgcattataaaggagagacgctgccaccagtaggagttaatcgaaaccggataaaagtgaccaaagacggatacgcggacatagttgatgtgttgaatagtcctctggaaggccctgaccaaaaaagttttattccagtggagagggcggaatcaacattcttgttccttgtgggtcaagacgatcacaactggaaatctgagttttatgccaatgaggcctgcaagagactgcaggcccatggaagaagaaagccccagatcatttgttaccctgagacaggacactacattgaacccccatacttccccctatgcagggcttctcttcatgctctagtggggtcacccataatctgggggggtgaacctcgtgcacatgccatggcgcaggtggacgcctggaagcagctgcagacattctttcataaacatctggggggtcacgaaggaactataccttccaaggtttag

SEQ ID NO: 177946 - DNA, 1266 bp, synthetic construct
  misc_feature 1..1266: note = Description of Artificial Sequence: Synthetic coding sequence
  source 1..1266: mol_type = other DNA
atgagcgccaccctgatcctggagccccccggccggtgctgctggaacgagcccgtgcggattgccgtgcgagggctagcaccagaacagagggtcacactcagagcctcattacgcgatgaaaagggtgcccttttccgcgcccatgccaggtattgcgcagacgcaagaggggagctggacctggagagagctccagcacttggcggcagttttgcagggctagaacctatggggttactgtgggcccttgagcccgagaaaccattttggcggtttctgaagcgggacgtgcagatcccctttgtcgtggaattggaggtgctggatggccacgacccagagccagggaggctgctgtgccaggctcaacacgaacggcatttcctgcccccaggcgtgcgcaggcagagcgttcgtgcaggcagagtgcgggccacactctttctgcctccaggacccggccccttcccgggcattatcgacatttttggtataggtggcggattgttagagtacagagctagcctgctcgccggacacggttttgcaacactggcactggcctactacaattttgaggatctgcccaataatatggacaatatcagcctggaatacttcgaggaagccgtgtgctacatgctccagcatcctcaggtcaaaggtccgggcatagggctgcttggcataagcttaggcgcggatatctgcttgagtatggcctcatttttgaaaaatgtttctgccacagtcagtatcaatggctccggcatatctgggaacaccgcgattaactataagcactcctcaatcccccccctgggctacgacctgcgtaggattaaagtggctttttcggggttggtggacatagtggacatcaggaatgcgctagtcgggggctataagaatccctcgatgattcctatcgaaaaagcccagggacccattcttttaatcgtcggccaagatgaccataactggaggtctgaactatatgcccagactgtgagcgaaagactgcaggctcacggcaaagagaaacctcagatcatttgttaccctgggaccggacactacattgagcccccctacttccccctatgcccagctagcctccatcggctcttgaacaagcatgtgatctggggcggcgagccaagggcgcactccaaagctcaagaggacgcctggaaacagatcttggcatttttttgtaaacacctgggtggaactcagaaaaccgcagtgcccaagctgtag

SEQ ID NO: 177947 - DNA, 624 bp, synthetic construct
  misc_feature 1..624: note = Description of Artificial Sequence: Synthetic coding sequence
  source 1..624: mol_type = other DNA
atgctgcagcaccccaaggtgaagggccccagcatcgccctgctgggattttctaagggcggcgacctttgcttgtcaatggcttccttcctcaaggggatcactgccacagtgctgatcaatgcctgtgtggcaaacacagttgccccacttcactacaaggacatgattatacccaaactggtggatgacctagggaaagtgaaaatcaccaaatcaggatttctgaccttcatggatacatggtcgaaccctctcgaggaacacaaccatcagtcactggtgccgttagaaaaagcccaagttccctttctgttcatcgtgggcatggatgaccagtcatggaagtctgaattttatgctcagatcgcaagcgaacgccttcaagcacatggcaaggaacgcccgcaaatcatttgttaccctgaaactgggcactgcattgaccctccctattttcccccctcaagagcctcagtccatgcagtccttggggaagcaattttttatgggggagaaccaaaagctcattcaaaggctcaggtagatgcatggcagcagatccagacattctttcacaagcacttaaatggaaagaagagtgtgaaacactcaaagatatag

SEQ ID NO: 177948 - DNA, 507 bp, synthetic construct
  misc_feature 1..507: note = Description of Artificial Sequence: Synthetic coding sequence
  source 1..507: mol_type = other DNA
atgctgcagcaccccaaggtgaagggccccagcatcgccctgctggggtttagcaagggcggggatctgtgcctgagcatggccagcttcctgaagggaatcacggccactgtgttaatcaacgcatgcgtagccaataccgtggcccccctccactacaaagatatgattattcctaagttagtggacgatctgggtaaagtgaagattacaaagagtggcttcctcacgttcatggacacatggagtaatcctttggaagagcacaaccatcagagccttgtacccctcgagaaggcgcaagtgccatttttgttcatagttgggatggatgaccagtcctggaagtctgagttttacgcccagatcgcttctgaacgcctgcaagcccacggtaaagagcgaccacagattatctgctatcccgaaaccggccactgtattgatccgccttactttccgcccagccgagcctctgtgcacgcagtactaggggaagctatctag

SEQ ID NO: 177949 - DNA, 1113 bp, synthetic construct
  misc_feature 1..1113: note = Description of Artificial Sequence: Synthetic coding sequence
  source 1..1113: mol_type = other DNA
atggcccggcccggcctgatccacagcgcccccggcctgcccgacacttgcgccctcctgcagccgccagccgcaagcgccgcagccgccccgtctatgagcggacctgacgtggagactccatccgccatccagatctgcaggatcatgagaccagatgatgctaacgttgccggtaatgtgcacggaggcactattctgaaaatgatcgaggaagccggtgcaatcatctcgacgaggcactgcaactctcagaatggcgagaggtgcgtggcagctctggccagagtggagcgcaccgactttctgtcccctatgtgcattggggaggtggctcacgtgagtgctgaaatcacctacacttccaagcacagcgttgaagttcaagtgaacgtgatgagcgagaacatactcaccggagctaaaaagctgactaacaaagccacgctttggtatgtcccgttgtctttgaaaaacgtggataaggtgctcgaagttccccctgtggtctactcacggcaggagcaagaggaagaagggaggaaacggtacgaagcccagaagcttgaaagaatggaaaccaagtggagaaacggtgacatcgtacagcctgtactgaaccctgaacccaatactgtgtcttactcacagtcctctctgattcatcttgtcggcccaagcgattgtaccctccatggctttgttcatgggggggtgaccatgaagctcatggacgaggtggcagggattgtggccgcacgccactgtaaaaccaacatcgttacagctagtgtagacgccattaatttccacgacaaaatcaggaaggggtgcgttattacgatctcaggccgcatgacatttaccagcaacaagagcatggagattgaggtcctggtggacgcagaccccgttgtagatagcagccagaagcgctaccgggccgcaagcgcattcttcacatacgttagtttaagtcaggaaggaagaagcctgcctgtaccccagctggtgccagagaccgaagacgaaaagaagcgatttgaggagggtaaggggcgctacctccagatgaaggctaaaaggcagggacatgccgagccacaaccatag

SEQ ID NO: 177950 - DNA, 990 bp, synthetic construct
  misc_feature 1..990: note = Description of Artificial Sequence: Synthetic coding sequence
  source 1..990: mol_type = other DNA
atggccttccagctgagccggatcatgcggcccgacgacgccaacgttgcaggaaacgtacacggtgggaccattctcaaaatgattgaagaggccggagcaataatttccacacgccattgcaatagccagaacggcgagcggtgcgtggccgcgctcgcccgtgtagagcgtactgacttcctgagccccatgtgcatcggtgaagtagcccatgtttctgccgaaatcacctacacatccaaacatagcgtcgaggtgcaggtcaacgtgatgtccgagaacatccttacaggcgcaaagaaattaactaacaaggccaccctttggtatgttccactctccctgaagaatgtagataaggttctggaagtgccccctgttgtctactccagacaggaacaggaggaggagggccggaagagatatgaagctcagaagcttgagcgcatggagaccaaatggcgcaatggggatatcgtacagcccgttctgaacccagaacccaatactgtgtcttattcacagtcgtccttaatccacctggtggggccttctgattgtacgcttcacggctttgtgcacggaggcgtgactatgaaattgatggatgaagtggccggcattgtagctgctagacactgtaaaaccaatatagttactgcctcagtcgacgctatcaatttccacgacaaaatcagaaaagggtgtgtaattacgatttccgggcggatgacgtttacaagtaataagtcgatggagatagaggtgttggttgatgccgatccagtggtggacagctcacagaaaaggtatcgggccgccagcgcattctttacctacgtgtctctaagccaagagggaagaagcttacccgtcccccaactggtccccgagactgaagacgagaagaaaaggttcgaggagggaaagggcagatacctccaaatgaaggcaaaacgccagggacacgccgagcctcagccgtag

SEQ ID NO: 177951 - DNA, 1053 bp, synthetic construct
  misc_feature 1..1053: note = Description of Artificial Sequence: Synthetic coding sequence
  source 1..1053: mol_type = other DNA
atgctgctgctgcggcggagcctgagcctgaacgtgctgcggaaggaggtcgatcgggcttgcttcggcgaaaaagccaagcagatcatgcgaccggacgatgctaacgtagctggtaatgtccacggcggcacgatactaaagatgattgaggaggccggtgcgatcattagcacgcgtcattgcaacagccagaatggggagcggtgcgtggcagctctggcacgcgtggaaaggaccgacttcctcagccctatgtgcatcggtgaggtcgcccacgtttcggcagagattacatacacttcgaagcatagtgtagaggtgcaggtgaacgtgatgtctgaaaatatcctgacgggcgccaagaaactcacaaacaaagccaccctgtggtacgtgcccctgtcactaaagaacgttgataaggtcctggaggtgccccctgttgtttatagtaggcaggagcaggaggaagagggcaggaagcgatacgaggcccagaagctggagcggatggagaccaagtggcgcaacggcgatattgtccagccggtcctgaatcccgagcccaacaccgtgagttattcacaaagctcacttatacatctggtgggtccaagcgattgcaccctgcatggatttgttcatgggggcgtcaccatgaagctgatggacgaggtcgctggcattgtcgcagccagacactgtaaaacaaatatcgttacggcatcagtcgacgcgattaactttcacgacaagatcagaaagggatgcgttatcaccatttccggtcgcatgacatttacatcaaacaagagtatggaaatagaggtgttagttgacgccgatccagtagtcgactcaagtcagaaacggtacagagcggcctcagctttctttacctacgtgagtctatctcaagaggggaggtctctcccggttccccagctggttccggagactgaggacgagaagaagcgctttgaggaggggaagggcaggtacctgcagatgaaagccaagagacagggccacgccgagccacagccctag

SEQ ID NO: 177952 - DNA, 1143 bp, synthetic construct
  misc_feature 1..1143: note = Description of Artificial Sequence: Synthetic coding sequence
  source 1..1143: mol_type = other DNA
atgaagctgctggcccgggccctgcggctgtgcgagttcggccggcaagcaagcagcagacgcttggtggcaggccaaggatgcgtggggccgagaagaggatgctgtgctcctgtccaggtcgttggccctcgcgcagatttgcctccctgcggggcttgtataactggcaggattatgcgaccagatgatgcaaacgtggctggaaacgtacacggcggcacaatcctgaaaatgattgaggaggccggggccattattagcaccaggcactgcaattcacagaacggcgaaaggtgcgtagccgctttggccagagtagagaggacagatttcctgtcccccatgtgtattggggaagtcgcccatgttagcgcagagattacatacacctctaaacatagcgtcgaagtgcaggtaaatgtgatgtcagagaacatcctgaccggagctaagaagctgaccaataaggctaccctgtggtatgtccccctgtccctgaagaacgtcgacaaggtccttgaggtcccaccggttgtgtacagtcgccaggaacaagaggaagaggggaggaagaggtatgaagcccaaaagttagagagaatggagacaaagtggaggaacggggacatcgtgcagccagtcctaaaccccgagccaaacactgtcagttattcacagagcagtctgatccatctggtaggaccttcagactgcacactgcacggctttgtgcacggaggggttaccatgaaacttatggacgaggtggccggtatcgtcgcagcaaggcattgcaaaacgaatattgtgacagcttctgttgacgccatcaattttcacgataagattagaaaggggtgtgtaattacaatatcaggacggatgacttttacatctaataaatctatggagatcgaagtgctggtggacgctgaccccgtggtggatagtagtcagaaacgatacagagccgctagtgcgttctttacttatgtgtctctttctcaggagggccgatcactccctgtgccgcagctggtgcccgaaacagaagacgaaaagaaacgctttgaagagggaaaaggacgatacctgcagatgaaagctaaacgtcaggggcacgcggaaccccagccatag

SEQ ID NO: 177953 - DNA, 672 bp, synthetic construct
  misc_feature 1..672: note = Description of Artificial Sequence: Synthetic coding sequence
  source 1..672: mol_type = other DNA
atgctgctgctgcggcggagcctgagcctgaacgtgctgcggaaggaagtcgaccgagcttgtttcggagaaaaagctaaacagataatgaggcccgacgatgcaaacgttgctggaaacgtgcatggaggaaccattctgaagatgattgaggaggcaggcgcaatcatatccacaagacattgtaactcacagaacggtgaacggtgcgtcgctgccctggcccgtgttgaacggactgatttcctgagtccgatgtgtataggcgaggtggcacacgttagtgctgagataacgtacacatccaagcacagcgtggaagttcaggtcaacgtgatgtccgagaacattcttacaggcgccaagaagctgactaataaagcgacgctgtggtacgtgcccttgtctcttaagaacgtggataaagtgttagaggttcctcccgtcgtctatagccgccaggagcaggaggaggagggaaggaaaaggtacgaagctcagaaacttgagcggatggagactaagtggcggaacggagacatcgttcaacccgttttgaatccggagccaaatacagtgtcctactcgcagtcatctttaatccatcttgtgggaccaagcgattgcaccttgcacggattcgtccacggcgggggagtggatttccactag

SEQ ID NO: 177954 - DNA, 798 bp, synthetic construct
  misc_feature 1..798: note = Description of Artificial Sequence: Synthetic coding sequence
  source 1..798: mol_type = other DNA
atgtgcatcggcgaggtggcccacgtgagcgccgagatcacctacacatccaaacacagcgtggaggtgcaggtgaacgtgatgtcagagaacatcctgaccggggccaaaaaattgactaataaagccaccttgtggtatgtgcctttaagcttaaaaaacgtggacaaagttctggaggttccccccgtcgtgtactccaggcaggagcaagaagaagaaggccgcaaacggtatgaggcgcagaaactcgagcgcatggagaccaaatggaggaatggtgacatcgtgcaacccgttctgaacccagaaccaaataccgtatcatactcacagtcatctctgatccacctggtgggtccctcggattgcaccctccacgggttcgtccatggcggggtgaccatgaagttgatggatgaagtggctggcattgtggcggcccgccactgcaaaacaaacatagttacagctagtgtggacgccatcaactttcatgataaaatcaggaaaggatgcgtcatcacaatcagcggccgaatgacattcacttcaaataagtctatggaaatcgaagttctagtcgacgccgatccggttgtagatagctcacaaaaacgatatagagccgccagtgctttcttcacctatgtgtcccttagtcaagaaggtcggtctttaccagtgccccagttagtgcctgagaccgaggacgagaaaaagaggttcgaggaaggaaaggggcgctatcttcaaatgaaggcgaaacgtcagggccacgcagaaccccagccctag

SEQ ID NO: 177955 - DNA, 1308 bp, synthetic construct
  misc_feature 1..1308: note = Description of Artificial Sequence: Synthetic coding sequence
  source 1..1308: mol_type = other DNA
atggccgcccccctggtgctggtgctggtggtggccgtgaccgtgcgggctgcactgtttcgctcttccctggccgaattcatctccgaaagagtggaagtggtttccccactgtcttcttggaaaagggtcgtagaaggcctcagtctgttagaccttggagtatcgccttacagtggcgccgtcttccatgaaacaccgctcataatctacctatttcacttcctgatcgactacgccgaactggtgtttatgatcaccgatgctctgacggccattgcgctttatttcgccatacaggacttcaataaagtggtttttaagaaacagaaactcctcctcgagctcgaccagtacgctcctgatgttgccgagctcattcgcacccctatggaaatgcggtatattcccttgaaggtcgcactgttctacctgttgaacccctacactattttatcctgcgtggcaaagtctacatgcgctataaataatacccttatcgcctttttcatcctgacaaccattaaaggtagcgccttcttatctgccattttccttgccctcgcaacctatcagagcttgtatcctctcactctgttcgtgccggggctgctctacttactgcagcgtcagtatataccagtgaagatgaagtctaaagcgttttggattttttcctgggagtatgcaatgatgtacgtcggatcgcttgtggtgattatctgcctttctttcttcctgctgagctcctgggattttatcccagcggtgtacggctttatcctgagcgtgcctgacctgactccgaacatcgggctgttttggtatttcttcgccgaaatgtttgagcacttctctctcttcttcgtgtgcgtgttccagattaacgtgttcttctacacaatcccactggccatcaagcttaaggagcatccgatattctttatgttcatccagatcgccgttattgccattttcaaaagttaccccacagtgggcgatgtggctctctacatggcctttttccctgtatggaatcatctataccgatttttgaggaacatcttcgtgttgacttgtatcattattgtttgctccctccttttccccgtgctgtggcacctgtggatctacgcagggtccgccaactcgaatttcttctacgccattacattaacttttaacgtgggacaaatcctgctgatttctgactatttctacgcgttcttgaggagagagtattacttgacacatgggctctacctgacggctaaagatggaacggaggctatgctggttctcaagtag

SEQ ID NO: 177956 - DNA, 342 bp, synthetic construct
  misc_feature 1..342: note = Description of Artificial Sequence: Synthetic coding sequence
  source 1..342: mol_type = other DNA
atgagcagcccccaggcccccgaggacggccagggctgcggcgacaggggagaccctccaggggacctcaggagcgtcctcgttaccacagtccttaatctggagccactggacgaggacctgttcaggggacgccattactgggtccctgcaaagagactgttcggcgggcagatcgtcggccaggcgttagtcgcggcagccaagtccgtgtctgaggatgtgcatgtgcacagcctacactgttatttcgtgcgggccgaacagatgccttcttgtgtgttgcgaagatctcccgcggagaaatctctctggactttcactgtgtgtgacctctactag

SEQ ID NO: 177957 - DNA, 1320 bp, synthetic construct
  misc_feature 1..1320: note = Description of Artificial Sequence: Synthetic coding sequence
  source 1..1320: mol_type = other DNA
atgcggcgggccgccctgcggctgtgcgccctgggcaagggccagctgacaccaggcagggggctgacccaggggccacagaacccaaagaaacagggcatttttcacatccacgaagtgcgcgataagctgagggaaatcgttggggccagcaccaattggcgggaccatgtgaaagctatggaggagaggaagctcttgcattcatttttagcaaaatcccaagacgggctccccccacgtagaatgaaagattcttatatcgaagtcctgctcccccttggttccgagccagaactgcgcgaaaagtacttaaccgtgcagaacacagttcggttcggcagaattctggaggacctggattctctgggggtcctgatatgttatatgcacaacaagatacattctgcgaagatgtctcccctaagcattgtaactgcactggttgataagattgatatgtgtaagaaatccttgtctcccgaacaagacatcaagttttccgggcacgtcagttgggtcggtaagacctccatggaggtgaagatgcagatgtttcagcttcatggcgacgaattctgccccgtgctggacgccaccttcgtcatggtcgctagggactcggaaaacaagggccccgcctttgtcaatcctctcatcccggagtccccagaggaggaggagttgttcaggcagggtgaattgaataagggcagacgcatcgcattctcctcaacatccctgctgaagatggcgccctcggcggaagagcggactactattcacgagatgttcctgagcacgttggacccaaaaacaatttccttcaggtccagagtactgccatcgaatgccgtttggatggaaaactcaaaactgaagtctctggaaatctgtcatccgcaggagcgaaacatctttaatcgcattttcggaggattcctaatgcgcaaggcttacgagctggcctgggccacagcctgctccttcgggggtagtagaccgtttgtggtggctgtggatgatatcatgttccagaagccagtggaagtgggcagcttgctcttccttagttctcaagtgtgctttacgcagaataactacatccaagtgcgggtgcacagcgaagtggcgtcgttgcaggagaaacaacacaccacaactaatgtgtttcacttcaccttcatgtccgagaaggaggtgcccctggtgttccccaagacatacggagaaagcatgctatacctggacgggcaacggcatttcaattcgatgtccggtccagcgaccttgaggaaagattatcttgttgagccatag

SEQ ID NO: 177958 - DNA, 1140 bp, synthetic construct
  misc_feature 1..1140: note = Description of Artificial Sequence: Synthetic coding sequence
  source 1..1140: mol_type = other DNA
atggaggagcggaagctgctgcacagcttcctggccaagagccaggatggtttgccccccaggcgaatgaaggacagctacattgaagtgctcctaccactgggaagtgagcccgaactgcgcgaaaagtacttgacggtacagaataccgttcgcttcggtcgcatacttgaagatctggacagcctgggtgtgctcatctgctacatgcataataagatccactcagcaaagatgtctcctctgtcaatagtgaccgcattggtcgataagatcgacatgtgcaagaaatctttgagccccgagcaggacatcaaattttcaggccacgtatcttgggtaggaaaaactagtatggaggttaagatgcagatgtttcagctccatggtgacgaattttgccctgtactggacgcgactttcgtgatggtggctcgagactcggagaataagggtccggcgtttgttaaccccttaataccggagagtcccgaagaggaggaactcttcagacaaggagagctgaacaagggcagacgcatcgccttctcatccacgagcctcctcaaaatggctccttccgccgaagaaagaacaacaatacatgagatgtttctaagcaccctggatcctaaaacaatctcctttcggtccagagtgctgccatctaacgccgtttggatggaaaatagcaaattgaagtcacttgagatctgtcaccctcaggagcggaatatctttaaccggattttcgggggttttctgatgcggaaggcatatgaacttgcgtgggccacagcatgtagtttcggggggagtaggcccttcgttgtcgctgtcgatgatattatgtttcaaaagcccgtggaagttggcagtcttctcttccttagttcacaggtttgttttacccagaataactacatccaagttcgagtgcattctgaggtcgcatccttacaggaaaaacagcacaccacaactaacgtattccattttacattcatgtccgaaaaagaagtgcccttggtgttcccaaagacttatggcgagagtatgctgtatctggatggccagcggcactttaatagcatgtccgggccagctaccctccgaaaggactacctagtggagccatag

SEQ ID NO: 177959 - DNA, 1347 bp, synthetic construct
  misc_feature 1..1347: note = Description of Artificial Sequence: Synthetic coding sequence
  source 1..1347: mol_type = other DNA
atgcggcgggccgccctgcggctgtgcgccctgggcaagggccagctcacacctgggagaggcctgacacaagggccacaaaatcccaagaaacagggtattttccatatacatgaagcatgtagttcaattcacgtgaaccatgtccgggacaagctccgggaaatcgttggtgcttccacaaactggcgtgaccacgtcaaggcgatggaagagcgcaagctgctgcactctttcctcgccaagtcacaggatggtctgccacctcggaggatgaaggacagctacatcgaggtcctgctccccttaggctctgagccggagctgagagagaagtacctgaccgtccaaaataccgtcagattcggtcggatcttagaagacttagactccctaggtgtgcttatctgctatatgcacaacaaaatccattccgccaagatgtctcccctgtccatcgtaacggcgttggttgacaaaatcgacatgtgcaagaagagtctgtctcccgaacaggacattaaattcagtggccacgtgagttgggttgggaagacatctatggaggtcaagatgcagatgttccaactgcacggagacgaattttgccctgtgctggacgccacgttcgtgatggtcgcccgcgactctgagaacaaaggcccagcttttgtaaacccactgatcccagaatcccccgaggaagaagaactctttcgccagggagagctgaataaaggcagacggattgctttttctagtacgagcttattgaagatggctccatccgctgaagaacgcacgacgatacatgagatgttcctgtccactctcgatcctaaaaccatctcctttcgcagtcgcgtgctgccgagtaacgctgtttggatggagaacagcaaattaaaaagcctggaaatctgtcatccacaggaacggaacatttttaatagaatatttgggggctttctcatgcggaaagcctacgagctggcctgggctaccgcctgtagcttcgggggaagtaggccatttgtcgtggccgtggatgacatcatgttccagaaaccagtcgaagttggatctttgctgtttctgtcatcccaggtgtgtttcactcaaaataactacattcaggtgagagtgcattctgaggtggcaagcctccaggaaaagcaacacacgactactaatgtctttcacttcaccttcatgtccgagaaagaggtaccactggtctttccgaaaacatacggggagagtatgttatacctggacgggcagaggcactttaattcaatgtccggacctgcaactctccggaaggattacctggtcgagccttag

SEQ ID NO: 177960 - DNA, 1269 bp, synthetic construct
  misc_feature 1..1269: note = Description of Artificial Sequence: Synthetic coding sequence
  source 1..1269: mol_type = other DNA
atgaccgtgttcttcaagaccctgcggaaccactggaagaagaccacagccggcctgtgcttgctgacctggggaggtcactggctatacggtaagcactgtgacaacctgctgaggcgagcggcctgccaagaagcccaggtcttcggcaaccagctgatcccaccgaacgctcaggtgaaaaaggccaccgtgtttctgaaccccgcagcctgtaagggaaaggcaagaaccctgttcgagaagaatgccgcaccaatactccacctgtcggggatggatgttacaattgtcaagacagattatgagggacaggccaagaagcttctggaactcatggagaatacggatgttataatagttgcgggcggcgatgggacattgcaagaagtagtcaccggcgtgctgaggcgaacggacgaggctacattttcaaagataccaatcgggtttatcccactcggagagacctcatcactgtctcacacattgtttgctgagagtggaaacaaggttcagcacattaccgacgcgactctggccatcgtcaaaggagaaacagttcctctggatgtcctgcagatcaagggagaaaaagaacagcctgtatttgccatgacagggctgcgatggggcagcttcagagatgcaggggtgaaggtgagtaagtactggtacctcggtcccctcaagataaaggctgcgcatttcttctccacccttaaggagtggccacagactcaccaagcctccatatcatacaccggtcccactgagagacccccgaacgagccagaggaaacccctgtgcaaaggccttccctctatagaaggattctgcgtaggcttgcaagctactgggcacagcctcaagatgccctctcacaagaagtgagtccggaggtgtggaaggatgtccagctaagcaccatcgagctgagtattaccaccagaaacaaccagctcgatcccacctccaaagaggacttcctgaatatctgtatcgagccggacaccatctcgaaaggagacttcataactattggcagtagaaaggtcagaaatcccaagctccacgtggaggggactgagtgcctgcaggcatctcagtgcaccctacttatccctgaaggggctgggggttccttcagtattgactcggaggagtacgaagccatgccagtggaggtcaagttacttccacggaagttgcagtttttctgtgaccctaggaaacgcgagcagatgttaacatctccgacgcagtag

SEQ ID NO: 177961 - DNA, 198 bp, synthetic construct
  misc_feature 1..198: note = Description of Artificial Sequence: Synthetic coding sequence
  source 1..198: mol_type = other DNA
atgaccgtgttcttcaagaccctgcggaaccactggaagaagaccaccgcgggcctgtgcctcctcacctggggtgggcattggctttatggcaaacactgtgataatctgcttagaagagctgcctgtcaggaagcacaacattaccaggatgaatctcggtgggagcccactttgagccgaactcccggatcctag

SEQ ID NO: 177962 - DNA, 198 bp, synthetic construct
  misc_feature 1..198: note = Description of Artificial Sequence: Synthetic coding sequence
  source 1..198: mol_type = other DNA
atgaccgtgttcttcaagaccctgcggaaccactggaagaagaccactgctgggctgtgcttattgacctggggagggcattggctgtatgggaaacactgtgataaccttctgaggcgggctgcttgtcaggaggcacagcactaccaggacgagagccgatgggaacccactctctcccggactccaggaagttag

SEQ ID NO: 177963 - DNA, 735 bp, synthetic construct
  misc_feature 1..735: note = Description of Artificial Sequence: Synthetic coding sequence
  source 1..735: mol_type = other DNA
atgaccgtgttcttcaagaccctgcggaaccactggaagaagaccacagccggtctctgcctgctaacctggggtggtcactggctgtacggtaaacattgcgataacctccttcgcagggctgcctgccaggaggcacaggttttcggcaaccaactgatccctcccaacgcccaggtaaaaaaggcaaccgtattcttgaatccagcagcctgtaaaggcacactgttcgaaaagaatgccgcccccatcttgcatttatcagggatggacgtgacaattgttaagaccgactatgagggtcaggccaagaagctgttggagctgatggagaatactgacgttatcatagtcgccggaggagatgggaccctgcaggaagtggtgacaggcgtccttaggagaaccgacgaggcaacgttcagtaagatacccatcggtttcatccccttaggcgaaactagtagcttgagccacacgctgtttgctgagtctggaaacaaagtacaacacataacggatgcaaccctggccatcgttaagggcgagacagtcccactggacgtgctgcagattaagggtgagaaagaacagcctgtttttgcaatgaccgggctgcgatggggcagttttcgagatgccggtgttaaggtttctaagtactggtatctgggcccactgaagatcaaagcggcccacttttttagtacactcaaacccttcccgaaacgctag

SEQ ID NO: 177964 - DNA, 1728 bp, synthetic construct
  misc_feature 1..1728: note = Description of Artificial Sequence: Synthetic coding sequence
  source 1..1728: mol_type = other DNA
atgcagagcccctggaagatcctgaccgtggcccccctgttcctgctgcttagcctgcagagctcagcgtccccagccaatgacgatcagagccgcccatccctgtccaatggccacacctgtgtgggttgtgtgctcgtggtgtccgtgattgagcagttagcccaggttcataattccaccgtccaagccagcatggaacgactgtgctcgtatctgcccgaaaagctgtttctcaaaacaacgtgctacttagtcattgacaagtttggttctgatatcataaagctcctctctgccgacatgaatgctgacgtcgtttgtcacacattggagttctgcaaacagaacaccggccagcctctctgccacttgtatccacttccaaaagagacctggaagttcactcttcagaaggcccgccaaattgtcaagaagagccccattctgaaatactcccgaagcggtagcgatatatgctcccttcctgtgctagcaaaaatctgccagaagattaaactggccatggagcagtctgtgccatttaaagacgtcgatagcgacaagtactcagtgttcccaacactgcgcggttaccactggcgagggagagattgtaatgacagcgacgaatcagtgtatcctggaagacgaccaaacaattgggacgtccaccaggattccaattgcaatggaatttggggcgttgaccccaaagacggggtgccctatgaaaagaagttctgtgaggggagccagcctcgtggcattatcttgcttggagatagcgcaggcgcacacttccatatctcccctgagtggataacagcatcacagatgagccttaattctttcatcaaccttcctaccgccttaactaatgagctggactggcctcagttatcaggggccaccggctttttggattcaaccgtggggatcaaggagaagagtatatacttaagactgtggaaacgtaaccactgcaatcatcgcgattaccaaaatatctcacgtaacggtgcttcttcccgcaacctaaagaagttcattgagtcactttcgcgcaataaagtcctggattatccggctatcgtgatttacgccatgataggaaacgatgtgtgttctggcaaaagcgacccagtgccagccatgactacgccagaaaagctttactcgaacgtcatgcagacgctcaagcaccttaactcccatctgcccaatggcagccatgtgatcttgtacggtctgccagacggaacgttcctatgggataatttacacaaccgttaccatcctctgggacagcttaataaggatatgacttacgcacaactgtacagcttcctgaattgtctacaggtaagtccctgtcacggttggatgtcgagcaataagacactgcgcaccttgacttcggaaagggcagaacagctatcaaacacactgaagaagatcgcagctagcgagaaatttactaattttaatctcttctatatggactttgcatttcacgaaatcatacaggagtggcaaaagagaggtggtcagccgtggcagctcatcgagcccgtggatggattccatccaaatgaagtggcacttctgttgctcgccgaccacttctggaagaaggtacagctgcagtggcctcagattttaggcaaggagaatccctttaaccctcaaatcaaacaggtgttcggagaccagggtggtcattag

SEQ ID NO: 177965 - DNA, 1632 bp, synthetic construct
  misc_feature 1..1632: note = Description of Artificial Sequence: Synthetic coding sequence
  source 1..1632: mol_type = other DNA
atgcagagcccctggaagatcctgaccgtggcccccctgttcctgctgctgtcactccaaagctctgcctcccctgctaacgatgaccagagtcgccctagtttatcaaatggacatacttgcgtggagaagctatttcttaagaccacctgctacctggtaatcgacaaatttggctctgatattataaagctcttgagtgccgatatgaatgccgacgtggtgtgccacaccctggaattctgcaagcagaataccggccagcccttgtgccacctgtatccactaccgaaggagacttggaaatttacgctccagaaagcccgccagatagttaagaaaagccctatcctgaagtatagtagatcaggctccgacatctgctctttgcctgtgttggcgaagatttgtcagaagattaagctggctatggagcaatctgtccccttcaaagatgtggattcggacaaatacagtgtgttccccactctccggggctaccattggcgcggaagagattgcaacgactcagacgagagtgtgtacccggggcgtagacccaacaactgggacgttcaccaggatagcaattgtaacggtatttggggagtcgaccccaaagatggcgtgccatatgaaaagaagttttgcgaggggtcccaaccgcgtggaattattttactgggggattccgcaggagcgcacttccatattagccctgaatggataaccgcaagccagatgagtcttaatagcttcatcaatctgcccacagcactcacaaatgagcttgactggcctcagctctcgggagccacaggatttcttgactctactgttggcattaaggagaaaagcatttacctgaggttgtggaagcgcaaccactgcaaccacagagattatcagaatatctcaagaaacggcgcctccagtaggaacctgaagaagtttattgaaagcctcagtagaaataaggtactggattatcccgccattgtaatatatgctatgattgggaacgatgtctgcagtgggaagagcgatccagtccccgccatgacgacacctgagaagctctactcaaacgtgatgcagactctcaagcacctgaacagccatcttcccaacgggtcccatgttatcctctatggcctgcccgatggtacgttcttgtgggataacttgcacaatcgctatcaccctttggggcaactgaacaaggatatgacatacgcccagctttacagtttcttgaattgcttgcaggtgagtccttgccatggctggatgtctagcaataaaacgctcagaaccctcacttcagaaagagctgaacagcttagtaatacactgaaaaaaatcgcggcctcagagaaattcacaaatttcaacctcttctatatggacttcgcattccatgagatcatccaggagtggcaaaagcggggtggacagccgtggcagctaattgagcctgtggatgggttccaccctaacgaggtggccctgttgcttctcgccgatcatttttggaagaaggttcagcttcagtggccacagatactgggcaaggagaatccattcaaccctcagattaaacaggtgttcggggatcaagggggacactag

SEQ ID NO: 177966 - DNA, 894 bp, synthetic construct
  misc_feature 1..894: note = Description of Artificial Sequence: Synthetic coding sequence
  source 1..894: mol_type = other DNA
atgaagctgaagaacagcttcatcaacctgcccaccgccctgaccaatgagcttgactggcctcagctctccggcgcgacaggtttccttgatagcaccgtcggcataaaagaaaagtctatttatttgcggctgtggaaacgtaatcactgcaaccatagggactatcagaacatcagccgcaacggtgcctccagtagaaacctaaaaaaatttatcgaaagtctttccagaaacaaggtacttgactacccagcgatcgtgatttacgcaatgatcggaaacgacgtatgctccggtaagagcgatcctgtaccagcgatgacaacgccagagaaattgtacagcaacgttatgcaaaccctgaaacatctcaactctcatctcccgaacggctcgcatgtgatcctgtatggattacccgatggtacatttctgtgggataatctccacaacaggtatcatcctctcggacaactgaataaagacatgacctacgcccagctgtacagttttctcaactgcctgcaggtttccccttgccacggttggatgagctccaataagactttgaggaccttgacctctgagcgtgctgagcagctgagtaatacactgaagaaaatcgctgccagcgagaaatttacaaatttcaatcttttctacatggacttcgcattccacgaaattatccaggaatggcaaaaacggggtgggcaaccgtggcagttgatcgaaccagttgatgggttccatccgaacgaagtggcattgttgctgcttgcggatcacttttggaaaaaagtccagctgcagtggccacagattctaggcaaagagaaccctttcaatccacaaatcaagcaggtgttcggcgatcagggcggtcactag

SEQ ID NO: 177967 - DNA, 2061 bp, synthetic construct
  misc_feature 1..2061: note = Description of Artificial Sequence: Synthetic coding sequence
  source 1..2061: mol_type = other DNA
atgcagagcccctggaagatcctgaccgtggcccccctgttcctgctgctgtctctgcaatccagtgcgtcccctgccaatgatgaccagtctaggccgtcacttagcaatggacatacctgtgtcggttgtgtgctcgtggtgtctgtcattgaacagctagctcaggtgcataactccacggtgcaggcctctatggagcggctatgcagctacctgcccgaaaagctgtttctgaaaaccacatgctatctcgtgatagataaatttggatccgatatcatcaaacttttgagcgctgatatgaatgcagatgttgtgtgccacaccttggaattctgtaagcaaaatacaggtcagcctctgtgtcacctgtatcccctgcccaaggaaacatggaaattcacactgcaaaaagcccggcagatcgtgaaaaaaagccctatccttaagtattctagatctggtagcgacatatgcagcttgcccgtgctcgctaagatctgccaaaagattaagctcgccatggaacaatcagtaccttttaaagatgtcgacagcgataagtactccgtatttcccactctcagaggatatcattggagggggagggattgcaacgactccgatgaatcggtctaccctggacggcgccccaataattgggacgtgcatcaggatagcaattgtaatggcatttggggggtggatccgaaggacggagtcccctatgaaaaaaagttttgcgaagggtctcagccgagaggaataatcttgctcggagactcagccggcgcccacttccacatttcaccagaatggattactgcttcacaaatgtcgctaaactctttcataaatttgcctactgccctcacaaatgagctggattggcctcagctgtctggggctactgggttccttgattctactgtcgggattaaggagaaatccatttacctcagactttggaaacgtaatcactgcaatcatagggattaccaaaatatctcaaggaacggcgccagctcccgcaacctgaagaagttcatagagtccctgagtaggaacaaagtgctcgattatcctgcaattgtgatttacgcaatgattggtaacgacgtgtgcagtgggaagtcagatcccgtgccagctatgaccacccccgagaagctttactctaatgtgatgcagacactgaaacacttaaattcacacctcccgaatgggagccacgttatcctgtacggcctgcccgacgggacattcttatgggacaatctccataatcgctaccatcccctaggccagctgaacaaagacatgacatatgcacagctgtactcattcctgaattgccttcaggtttcaccttgccatggatggatgtcctcaaataaaactctgcgaacgctgacatctgagcgggccgagcaactgagcaataccttaaagaaaatcgcagccagcgaaaagttcaccaatttcaacttgttctacatggattttgctttccatgagattatacaggaatggcaaaagaggggaggacagccatggcagctcatcgagccagttgatggctttcatccaaacgaacgtaagtctattcttctcaagggcatcctgatgaccagccagaccctggacaaccaggagtggactcagttaacctcatggatcaaggggaaccttacgtgtgactccaggactcgtgaatggttatgttgttgttggaggattattagtggtaaaagatgctcctcatcaggcccaaagagctgggaaaggagaatacggtcgactcctcgcctgaaccgctgcctagaaaccaaggccggaactgaacctctgaggagcatgcacccctggggggcccagggtgggcgtgggttaggcaaacttattccccaactgtggggtctaccgcgccaccgtcccaagggtctcttcttttctagtatatttaagtgcctgagccttaatgaagagcacatttggaccactgtccagtgttgcgtactgcccgggagtgtgacccttcccctctttttaaagtag

SEQ ID NO: 177968 - DNA, 1992 bp, synthetic construct
  misc_feature 1..1992: note = Description of Artificial Sequence: Synthetic coding sequence
  source 1..1992: mol_type = other DNA
atgcagagcccctggaagatcctgaccgtggcccccctgttcctgcttctgagtcttcagagtagtgcaagccctgccaatgatgaccagtcaaggcctagcctctccaacggacacacctgtgtcgggtgcgtgctggtagtatcggtgattgagcagctggctcaggtccacaactcgacagtgcaggcttctatggaacggctctgcagttatttacccgagaaactgtttctgaagaccacttgttacctggtcatcgacaagttcggtagtgatataataaagttattgtcagcggatatgaatgccgacgtagtgtgccatactcttgaattctgcaaacagaatactggccagcctttgtgccacctgtaccccctgccaaaggaaacgtggaagtttacactacaaaaggcgcggcagattgtgaaaaagtcaccgattctgaaatactcacgctctggctcagacatttgttcccttccggtgctggctaagatctgccaaaagataaagctcgccatggagcagtctgtacccttcaaggatgtagactctgacaaatactccgtgttccctacccttcgtggctaccattggcgggggagggactgtaacgatagcgatgagtctgtgtaccctgggcgccggcctaacaattgggacgtccaccaagattctaattgtaacggcatatggggagtggaccccaaagacggcgtgccctacgagaagaaattctgtgagggaagccaaccgcgggggatcatccttctcggggattcagctggcgcccactttcacatcagccctgaatggattacagcctcccagatgagtctaaatagcttcatcaatcttcctactgctttaacaaacgagcttgactggccacagctctctggagccacagggtttctcgactctaccgtgggcatcaaggagaagagcatctacctcaggctatggaaaagaaatcactgcaaccaccgtgattaccagaacatcagtaggaacggagcctccagccgcaatctgaaaaagttcatcgagagtctgtcaaggaacaaggttttagactacccagccatcgtcatctacgcaatgataggcaacgacgtgtgctcaggcaagtcagaccctgtgccggccatgaccactcccgagaagctttattcaaacgtgatgcaaaccctgaaacatttgaactctcacctgcctaacgggagccacgtgatactctatggcctccccgacggtactttcttgtgggataaccttcacaaccgctatcatccactgggtcaactgaataaggacatgacatacgcgcaactgtactcatttctgaattgcttgcaggtgtcaccatgccatgggtggatgagcagtaataaaactctgagaaccttaaccagtgaacgtgccgagcagcttagcaatactctcaaaaagattgccgcttccgagaagttcacaaactttaacttgttctatatggacttcgcttttcatgaaatcattcaggagtggcaaaagaggggcggacaaccctggcagctcatagagccagtggatggctttcatcctaacgagcgcaagagtatcctcttgaaaggcatactgatgacttcccagactctggataaccaggagtggacgcagctgacaagttggattaagggaaatcttacctgcgatagccgtacaagagaatggctttgctgttgctggcgtattatttccggaaagcggtgcagctcttccgggccaaagagttgggaaaggcgcatacggagcacaccaagactcaaccgttgcttagaaactaaggctgggacagagccactgaggtccatgcacccctggggcgcccaagggggtcggggcctggggaaattgatcccccagccctacggcggatgccatgtcacaggtcccaaagactccagcagcgctgcctcactgcagatgtctttcagtcaatag

SEQ ID NO: 177969 - DNA, 300 bp, synthetic construct
  misc_feature 1..300: note = Description of Artificial Sequence: Synthetic coding sequence
  source 1..300: mol_type = other DNA
atggccgagggcaacaccctgatcagcgtggactacgagatcttcggcaaagtccaaggagttttttttagaaagcatacacaagcagaaggaaaaaaactggggcttgtagggtgggtgcagaataccgatagaggaactgtccagggacagctccaggggcccatctcaaaagtccggcacatgcaggaatggctggagacaagaggttcacctaaaagccacattgacaaagccaactttaataatgagaaagtcattctgaagctcgattactccgatttccaaattgtcaagtag

SEQ ID NO: 177970 - DNA, 168 bp, synthetic construct
  misc_feature 1..168: note = Description of Artificial Sequence: Synthetic coding sequence
  source 1..168: mol_type = other DNA
atggccgagggcaacaccctgatcagcgtggactacgagatcttcgggaaagtgcaaggcgtattttttcgcaaacatacacaagaaatgacagtggagaatcgtatagccgaaacgcacagcaagagctgcgttcctgtcagcttcgcaacttcctacgcgggatag

SEQ ID NO: 177971 - DNA, 300 bp, synthetic construct
  misc_feature 1..300: note = Description of Artificial Sequence: Synthetic coding sequence
  source 1..300: mol_type = other DNA
atggccgagggcaacaccctgatcagcgtggactacgagatcttcggcaaagtccagggcgtgtttttcaggaagcacacacaggctgaagggaaaaagcttggactagtggggtgggtacagaataccgatcgggggaccgtgcagggccagctgcaaggcccgatctcaaaggtgagacacatgcaagagtggctcgagactaggggcagtccaaaatcccacatcgataaagcgaatttcaacaacgagaaagtgattttgaagctggactacagtgacttccagatcgtcaaatag

SEQ ID NO: 177972 - DNA, 300 bp, synthetic construct
  misc_feature 1..300: note = Description of Artificial Sequence: Synthetic coding sequence
  source 1..300: mol_type = other DNA
atgagcaccgcccagagcctgaagagcgtggactacgaggtgttcggacgggtccaaggggtgtgtttccggatgtatacagaagacgaggctcgaaaaattggcgtcgtgggatgggtgaagaacacctcaaagggaacagtaaccggtcaggtccagggtccggaggacaaagtcaatagtatgaagtcatggctgtctaaagttggttcccctagctccagaattgacaggacaaatttttccaacgagaagactatttccaaattggagtactcgaatttctcaattcggtattag

SEQ ID NO: 177973 - DNA, 294 bp, synthetic construct
  misc_feature 1..294: note = Description of Artificial Sequence: Synthetic coding sequence
  source 1..294: mol_type = other DNA
atgtgccccctgcccctggccgccgccgccgtggccgccccccgggcccccttgagacttctaaaccgcgggttagcagcagcaatgtccaccgctcagagtctaaaaagcgtcgattatgaggtttttggacgcgttcagggcgtctgtttcaggatgtacaccgaggacgaggctcgcaagattggggtcgtgggctgggttaagaatacgagcaaggggacagtcacagggcaggtgcagggccccgaggacaaggtgaacagcatgctcgagtgtagcggcctgatctag

SEQ ID NO: 177974 - DNA, 2247 bp, synthetic construct
  misc_feature 1..2247: note = Description of Artificial Sequence: Synthetic coding sequence
  source 1..2247: mol_type = other DNA
atggtgctgctgcgggtgctgatcctgctgctgagctgggccgccgggatgggcggccagtacgggaatccccttaataaatatatccggcattacgaaggcctatcctacaatgtggattctttgcaccagaagcaccagcgcgcgaagcgcgcggtctcacacgaggatcagtttctgagacttgactttcacgcccacggtcgccactttaatctgcgcatgaagcgcgacacctcacttttctccgacgaatttaaggtggagacaagcaataaagttcttgactatgacacctctcatatctacaccgggcatatctatggggaggagggatctttttcccatgggtctgtgattgatggaagatttgaggggttcattcaaactagaggaggcactttctatgtagaacctgctgagcgatatattaaggacagaacactgccattccacagcgtgatctaccacgaggacgatatcaactaccctcacaaatacggcccacagggagggtgcgcggatcattcagtattcgaaaggatgcgcaagtaccaaatgacgggagtcgaagaggtcactcagatccctcaggaagagcacgctgctaacggccccgagctcctgcgaaagaagagaactacctctgcggagaaaaacacctgccagctctacatacagactgaccacctatttttcaagtactacggtacccgggaggccgtgattgcacagatcagctcacacgtgaaagcaattgatacgatctaccaaacgaccgacttctccggcatcagaaatattagtttcatggttaaacggatccgaattaacactacagctgatgagaaggaccctacgaatcccttccgatttccaaatattggcgtggagaagttcttggaactgaattccgagcagaatcatgacgattactgtctagcttacgtgttcaccgacagagacttcgatgacggggtccttgggctggcgtgggtcggggccccaagcggttcttcgggagggatctgtgaaaaatccaaactgtattccgatggaaagaaaaaaagtctgaatacagggatcatcaccgtgcaaaattatgggagccatgtgcctcccaaggtcagtcacatcacctttgcacacgaggtgggtcacaattttggaagcccccacgacagcggcaccgaatgtactcccggcgagagcaaaaacttaggtcaaaaagagaacgggaattacattatgtacgctcgagctacatcaggggataaactgaacaacaataagtttagcctgtgctccatcaggaatattagccaggttctggaaaaaaagagaaacaattgtttcgttgaaagcggacagcccatatgtgggaatggtatggttgagcagggggaagaatgcgactgcggttattcggatcagtgtaaagatgaatgttgtttcgacgctaaccaacccgaggggcgtaagtgtaaacttaagcccgggaagcagtgttcaccgtcccaggggccctgctgcactgcacaatgtgcattcaagagtaaaagcgagaagtgtcgggatgactctgactgcgcaagggaggggatttgcaacggattcacagctctctgtcccgccagtgatccaaaaccaaacttcacggattgtaataggcatacgcaagtttgcatcaacgggcagtgtgccggaagcatctgcgagaagtatggactagaagagtgcacttgtgcttcatcggacgggaaggacgataaagagttgtgccatgtgtgctgtatgaaaaagatggaccccagcacatgtgcttccaccggttccgtccagtggagcagacacttttccgggcgaaccatcactctgcaacccggctcgccctgcaatgatttcaggggctactgcgacgtatttatgcgctgccggctcgtggatgccgatggcccactagcaagactcaagaaggctattttttcccctgagctgtacgagaatattgctgaatggattgtcgcacattggtgggccgttctattgatgggcatcgccctaatcatgctgatggctggatttattaagatatgttcagtccatacaccttcttcaaatcccaaactgcctccacctaaacccctgcctgggacacttaagcgccgccgtcctcctcagcccattcagcaaccccagcggcagagaccacgggagagctatcaaatgggacacatgagacggtag

SEQ ID NO: 177975 - DNA, 1344 bp, synthetic construct
  misc_feature 1..1344: note = Description of Artificial Sequence: Synthetic coding sequence
  source 1..1344: mol_type = other DNA
atggtgctgctgcgggtgctgatcctgctgctgagctgggccgccggcatgggagacagggattttgatgatggggtccttgggctggcctgggtcggcgctcctagcggctctagcggcgggatttgcgaaaagtctaaactatatagcgacggcaagaaaaagagtctcaatactggtatcataacagtgcagaattacggctcacatgtccccccaaaggtcagccatattacttttgcccacgaagtcggccataatttcgggagtccacacgacagtggcacagagtgtacaccaggagagtcgaagaatctgggccagaaagagaacggcaactacatcatgtatgcccgtgccacttcaggggataagctgaataacaataagttcagcctatgcagcatccgcaacatctcccaagttctggagaaaaagcgaaacaactgcttcgtcgaatcgggacagcctatatgtggaaacggcatggtggagcagggcgaggaatgtgattgtggatactccgatcaatgcaaggacgaatgctgttttgatgcaaaccagcccgaaggcaggaagtgtaagcttaaacctgggaagcaatgcagcccttcacaggggccctgctgcactgcccagtgtgcgttcaagtctaaatcagaaaagtgccgggacgatagtgactgcgcacgggaaggaatttgtaatggatttacagcgctgtgccccgcgtccgatcctaaaccaaattttacagactgtaataggcacactcaggtgtgtatcaacgggcagtgtgccggttccatctgcgagaaatacggcctggaagagtgtacatgtgcctctagcgacggcaaagacgacaaagagctctgtcatgtgtgctgtatgaagaaaatggatccatctacgtgtgcttccacggggagtgtgcaatggtcacgtcacttcagcggccgcacaatcactctacagcctggttccccgtgtaacgatttcaggggctactgtgatgtgttcatgcgttgccgtctggtcgatgccgacgggccactggcgcgattgaaaaaagccatttttagtccagagctgtatgagaacatagctgaatggatcgtggcccactggtgggctgttcttcttatgggcatcgctctgatcatgctgatggctggtttcattaaaatatgcagtgtgcatacccctagctccaatcccaagctccctccccctaaaccactgccgggaactctgaaacgtcgcagaccaccacagcctattcagcagccccagcgtcagagacctagggagagctatcagatgggtcatatgcgccgctag

SEQ ID NO: 177976 - DNA, 2310 bp, synthetic construct
  misc_feature 1..2310: note = Description of Artificial Sequence: Synthetic coding sequence
  source 1..2310: mol_type = other DNA
atgcggctgctgcggcggtgggccttcgccgccctgctgctgagccttctgcctacacccggattgggcacgcaaggtccagctggagcactgcgctggggaggcctgcctcagctcgggggcccaggtgctcccgaggtcacggagccatcacggctcgtgcgcgaaagtagcggcggagaggtgcggaaacagcagctcgatactagagtgcgccaggagcctcccggcgggcctcccgtccacttggctcaagtgtcctttgtcattcctgcattcaatagcaattttaccctggacctggaactgaaccaccacctccttagtagccagtatgtagaaagacatttctcaagggagggaactacccagcacagcactggggccggagatcattgttattaccagggaaaattgcggggcaatccacacagttttgccgccttaagcacgtgtcagggcttgcatggagtgttcagcgatggcaatcttacctacattgttgagccccaggaggtcgccggtccttggggtgccccacaagggcccctaccgcatttgatctatcgcacacctctgcttcccgaccccctggggtgtcgggaaccgggatgcttgtttgcggtcccagcccaatcagccccacccaatcggcccaggctgcggagaaaacgccaggtaagacgggggcaccctaccgttcattcagagactaagtacgtggagttgatcgtcatcaacgaccatcagctgtttgaacagatgaggcagtccgtcgttctgacaagcaactttgccaaaagcgtggtcaatctcgcagacgtgatctacaaagagcagctgaacaccaggatcgtgctagtagccatggagacgtgggccgacggtgacaaaattcaggttcaggacgacctgttagaaaccttagctaggcttatggtctacaggcgggaaggcctacctgaaccttccgatgccacccacctcttctctgggcggacattccagagcactagctccggggcagcctatgtgggcggtatctgcagcctctcccacgggggcggggttaacgagtacggtaacatgggggccatggctgttacattggcccaaacactaggacagaatctgggtatgatgtggaacaagcaccgctcttcggcgggcgattgcaagtgcccagatatatggctcggatgtatcatggaagataccggattctacttgccacggaaatttagcagatgctcgattgatgaatacaatcagtttctccaggaaggtggcggaagctgcctgtttaacaagcccctgaaactgctggacccccccgaatgtggtaatggcttcgtggaagccggagaggagtgtgattgcggcagcgtacaggaatgttcgcgtgcaggcggtaactgttgtaagaagtgtactctgacgcatgacgcaatgtgctcagacgggctctgctgccgtaggtgcaagtatgaacctaggggcgtctcatgtcgcgaggccgtgaatgaatgcgacatcgcagagacatgtaccggtgacagttctcagtgcccacccaatctgcacaagctcgatggctattactgcgatcacgagcaggggcggtgttacgggggtcggtgcaaaacacgggacaggcagtgccaggtcctgtggggtcacgctgccgcagacaggttctgttacgagaagttgaacgttgagggtactgaacgaggcagctgcggtcggaaggggagtggttgggtccagtgttccaagcaggacgtgctgtgtggtttcctgctctgcgttaacatctctggcgccccccggctgggggatctggtaggagatatatcttcagttactttttatcatcaggggaaggagcttgactgtagaggaggacatgtccagttggcagacggttctgatctgtcctacgtagaggatgggactgcttgcggtccaaatatgctttgtctggatcaccgctgcctgccagccagcgcattcaattttagcacctgtcctggatccggtgaacggagaatctgcagtcatcatggggtatgcagcaatgaaggcaaatgtatttgtcagccggactggaccggaaaagactgcagcatccataaccctctccctacatctcccccgaccggtgagacggagcgctacaagggtccctcggggactaatattattatcggctcaattgccggggccgtgcttgtcgcagcaatcgtgctagggggcactgggtgggggtttaaaaacattcggaggggcagaagcggcggcgcgtag

SEQ ID NO: 177977 - DNA, 1572 bp, synthetic construct
  misc_feature 1..1572: note = Description of Artificial Sequence: Synthetic coding sequence
  source 1..1572: mol_type = other DNA
tgctggggcagcggccacctgctgagcagccagtacgtggagcggcatttttctagagaaggaacaacgcagcacagtacaggggcaggagatcattgctactatcagggaaagctcaggggcaacccacactcttttgccgcactttccacctgtcagggtttacacggggtgttttccgatggcaacctgacatatatcgtcgaaccccaggaggtggccgggccatggggggcgccccaaggccccctcccacatttgatatacagaactcccctgctgcccgatccccttgggtgccgggagccaggttgcctgttcgctgttcctgcccagtcagcacctcccaaccgtcctagactgagaagaaaaagacaggtccggaggggccatccaaccgtccactctgagacgaagtacgtagagctgatcgtgattaatgaccaccaactgtttgagcagatgcgacaaagcgtggtcctcacatccaacttcgctaagtccgtggtaaacctggctgacgttatttataaagaacagttaaacacccgcattgttctggttgccatggagacgtgggccgatggcgacaaaatccaggtccaagacgatctcttagagaccctggcgaggttgatggtgtacaggagggagggactgccagaaccgtctgacgcaacccaccttttctccgggagaacgttccagtcgacttccagtggggcagcttatgtgggtggaatttgctccctgtctcacggaggcggtgtaaacgagtacgggaatatgggcgccatggcggtcacactcgcccaaacgctggggcagaaccttggtatgatgtggaacaagcatcgctcatccgctggcgactgtaagtgtcctgacatttggctgggctgcattatggaagataccggattctacctcccccgcaagttcagccgctgcagcattgacgagtataaccagtttcttcaggaaggtgggggatcatgtctcttcaacaaaccattaaaacttcttgatccccctgaatgcggaaatggctttgttgaggccggtgaggagtgtgactgtgggtcagtgcaggaatgctcacgagcgggagggaactgctgcaagaagtgcacactgacccatgacgccatgtgttccgatgggctttgctgccgtcggtgtaaatacgaaccccgcggagtgtcctgtcgggaagctgtaaacgagtgcgacatcgccgagacctgtactggagatagctcccaatgcccccccaatctccacaagctggacggttactactgcgatcatgaacagggtcgatgctatggtgggaggtgcaagacccgagaccggcagtgtcaagtactctggggacacgccgctgccgatcgattttgctatgagaagttgaacgtggagggcaccgagaggggatcctgtgggcggaaaggatctggctgggtccagtgctccaaacaaccccaacagggtcgggccgtgtggcttcccccgctgtgccagcatctatggagtagcagtgcacgagggccaggcggaaggcaccagtag

SEQ ID NO: 177978 - DNA, 1710 bp, synthetic construct
  misc_feature 1..1710: note = Description of Artificial Sequence: Synthetic coding sequence
  source 1..1710: mol_type = other DNA
atgcagggcacccggctgcccgtgtgctgcgcctgccccgtgggcagctccaaaccagcagaggccgagaaagaaaaggtccgacgtggccaccctactgtgcacagcgagacgaagtatgtcgaactcattgtaataaatgaccatcaacttttcgagcagatgagacagagcgtggtgttgacatccaactttgctaagtccgtcgtgaaccttgcagacgtcatctacaaagagcagctgaacacccgcatagtgctggtggctatggagacttgggccgacggcgacaaaatccaggtgcaggacgatcttcttgagacactcgcacgcctgatggtctatcgtcgggaaggattgcctgagcccagtgatgcaacgcacctatttagcggcaggactttccagagtacttcatcgggcgctgcctatgtgggagggatttgcagcctgtcccatggcggcggcgtcaacgagtatggcaacatgggcgcaatggctgttactcttgcccagacacttggacagaacctgggcatgatgtggaataagcatcgctcctcggccggcgactgcaaatgtcctgacatttggctgggatgcatcatggaagacacaggcttttatctcccccgcaagtttagtaggtgctctatcgatgaatacaatcagttcctccaagagggaggaggcagttgcctgtttaacaaaccactaaagttgctggaccctccagagtgtgggaatggatttgtggaggccggtgaagagtgcgactgcgggtcggttcaggagtgtagccgtgccggcggtaattgctgcaagaagtgtacactcacacacgacgccatgtgttccgacggcttgtgttgcaggcgctgtaaatacgagccccgcggggtatcatgtcgcgaagctgtcaacgagtgtgatatcgctgagacctgtactggcgacagcagccaatgccctcccaatctgcacaagttggacggctattactgtgatcatgagcagggacggtgttacggaggacgttgcaagacccgagatcgtcaatgccaggtgctctggggacatgccgcagccgaccggttctgttatgaaaaactgaacgtcgagggcaccgagcgcggaagctgtggcagaaaaggatctggatgggttcagtgttcgaagcaagatgtgctatgtggattcctcctctgcgtaaatattagtggcgctccgagacttggcgatcttgtgggagatatctcaagcgtgaccttctaccaccaggggaaagagctggattgccgtggtggtcacgtgcaactcgcagatggaagcgacctgagctatgtggaggacggcacagcctgtgggcccaacatgctctgcttggaccaccgctgtttacccgcttcagctttcaacttcagtacatgccccgggtctggggagcgtagaatctgttcccaccacggcgtgtgttcgaacgaagggaagtgcatttgccagcccgactggaccgggaaggactgttcaatccacaaccccctccctactagtcctcctactggagaaactgagaggtacaaggggccttccgggacaaatatcattatcggaagcattgcgggagccgtgctagtcgccgctatagtgctgggaggtaccgggtgggggttcaaaaacataaggagagggcggtccggcggtgcctag

SEQ ID NO: 177979 - DNA, 2217 bp, synthetic construct
  misc_feature 1..2217: note = Description of Artificial Sequence: Synthetic coding sequence
  source 1..2217: mol_type = other DNA
atggccgcccggcccctgcccgtgagccccgcccgggccctgctgctggccctcgccggggcccttctcgccccttgtgaggccaggggggtgagtctgtggaatcaagggagggctgacgaagtggtgagtgcctcagtgggtagtggtgatttgtggattcccgtgaaatccttcgattctaagaatcatcctgaggttctcaatatccggctgcaaagagagagtaaggagcttattattaacctggagcgtaatgagggtctgattgcgtcttccttcactgagacgcattacctgcaggatgggactgacgttagcttagcccgcaattacaccgtgatcctagggcactgttactaccacggccacgtgcggggttatagtgactctgcagtctccctctctacctgctctggacttcgtggcttaatcgtgtttgaaaatgaatcctacgtcctcgagccaatgaaatccgccaccaatcgttacaagctgtttcctgcgaaaaagttaaagtccgtgaggggctcctgtggcagccaccataacacacccaatctggcagccaaaaatgtgtttcctccaccctcccagacctgggcccgtcggcataagagagaaacgctcaaggctacaaaatacgttgaactcgtcatagttgcggacaaccgagagttccagcggcagggtaaggaccttgaaaaggttaaacagaggttgatcgaaatagctaaccacgtggacaagttctaccgacccctgaacatacgcatcgtactggttggggtggaggtctggaatgatatggacaagtgctcggtcagtcaggatcctttcacatctcttcacgaattcctggattggagaaaaatgaaactgctcccccggaagagccatgataatgcccagctggtttcaggggtatattttcagggcacaactatcggcatggcacctatcatgtcaatgtgcacggctgaccaatctggcggaatcgtcatggatcactcagataacccactgggggcagctgtcactctggcccatgagctcggccacaacttcggtatgaatcacgatacactagatcgggggtgttcttgtcagatggccgttgaaaaggggggttgtattatgaacgcctctactggatatccattccccatggtattctctagttgttcccggaaagacctggagacctccctggaaaaaggtatgggcgtctgcttattcaacttgcctgaggtccgagaatctttcgggggccagaaatgcggcaatcgttttgtggaggagggggaggaatgcgactgtggagaacccgaggaatgtatgaaccgttgttgtaacgccaccacctgtaccctgaagcccgacgccgtttgcgcacacggcctgtgttgcgaggactgtcaactgaagcccgccggaactgcttgtagagactccagtaattcctgtgaccttcctgagttctgtaccggtgcgagcccgcactgccctgcgaacgtctatctgcatgacggtcacagctgccaggacgtggatgggtactgctataatgggatctgccaaacacacgaacaacagtgcgtgacattgtggggtcccggagctaagcccgcccccgggatctgcttcgagcgagtcaattccgcaggggacccctacggcaattgtgggaaagtttcaaaatccagctttgcaaaatgcgagatgcgggacgccaagtgcggtaaaatccagtgtcaaggcggtgctagcaggcctgtgatcggaaccaacgccgtatccatcgagaccaacattcccctacaacagggaggccgcatcctgtgtcgcggcacacacgtatacctgggggacgatatgcctgatcccggtctcgtgttggcgggtacgaagtgtgctgatgggaagatctgtctcaaccggcagtgccagaacatctcggtcttcggcgtacatgagtgtgccatgcagtgtcacggacggggcgtgtgtaacaaccggaaaaactgccattgcgaagcacactgggcacctccgttctgcgataagttcggatttggggggagtactgattccggacctataaggcaggccgaagcccgccaggaagccgctgaaagtaacagggaaagaggacaggggcaggaacctgtcggcagccaggagcacgcgtctacagccagcctgacccttatctag

SEQ ID NO: 177980 - DNA, 2730 bp, synthetic construct
  misc_feature 1..2730: note = Description of Artificial Sequence: Synthetic coding sequence
  source 1..2730: mol_type = other DNA
atggccgcccggcccctgcccgtgagccccgcccgggccctgctgcttgcactggctggagccttgctggctccctgcgaagctcggggcgtgtcgctctggaatcagggacgggcggacgaggtcgtgagcgcttccgtgggaagtggagatctctggatcccagtgaagagttttgactcaaaaaaccatcccgaagtgctgaatattaggctgcaacgcgaatctaaggagctaatcattaatctggaaagaaatgagggtcttatcgcctcaagtttcacagagactcactacctgcaagatggcacggacgtgtctctggcacgaaattacaccgtcattctcggtcattgttattaccacggacacgtgcgggggtattctgattctgccgtgtctctgagtacctgctcaggcctgcgaggcctgattgtgttcgagaatgaaagctatgtgctggagccaatgaaatccgcgaccaaccgatacaaactgttccccgctaagaaactgaagagcgtgaggggcagctgcggctctcaccataatacaccaaacttagccgcaaaaaacgtgttcccccctcccagtcagacttgggctagacggcataaacgggagaccctcaaggctaccaagtacgtggagctagtgatagtcgccgacaaccgtgagtttcaacggcaaggtaaagacctggaaaaagttaagcagagactgattgaaattgccaatcacgttgataaattctacagaccactgaatattcgtattgtcttggtgggtgtcgaagtgtggaatgatatggacaagtgtagtgtgtctcaggatccctttacttccttgcatgagtttcttgactggcggaaaatgaagctgctgccgcgcaagtctcatgacaatgcccaacttgtgagcggcgtttacttccaaggcactactatcggcatggcaccaatcatgtctatgtgtactgccgatcagtctgggggtattgtaatggatcacagcgacaaccctttgggcgcagccgtgaccttggcgcacgaattggggcacaactttggtatgaatcacgatacccttgaccgcggctgctcttgtcagatggccgtagagaagggaggctgcattatgaatgcttccacagggtaccccttccccatggtgttctctagctgtagcagaaaagacctcgagacttccctcgaaaaggggatgggcgtctgcctgttcaatctccctgaagtgagagagtcattcggcggacagaaatgcgggaatagatttgtggaagagggcgaagagtgtgattgtggcgaacccgaggagtgcatgaatcgttgctgcaatgcaacgacctgtacattgaaacctgatgctgtgtgtgcccacggattatgctgcgaggactgccagctcaagccagcagggaccgcatgccgggatagctccaacagctgtgatctccctgagttttgcactggggcctcaccccactgccctgcaaatgtttatctccacgacggacattcctgccaggacgtggatggctactgttataacggtatttgccagacgcacgaacagcagtgtgtcacactctggggaccgggggccaaacccgcccccgggatttgctttgagagggtgaattccgcaggagatccttatgggaactgtggtaaagtatcaaagtcctctttcgccaagtgtgaaatgcgtgacgcaaagtgcggaaaaattcagtgccaaggcggtgctagcaggccggtgatcgggacaaacgcagtgagcatcgaaaccaatattccactgcaacaaggtggccgcatcctttgtcgggggacccacgtgtatctgggcgatgatatgcctgaccccggcttggttctggccgggactaaatgtgccgacgggaagatttgcctgaacagacagtgccagaacatttccgtgttcggcgtgcatgagtgcgctatgcagtgtcacgggaggggggtttgcaataataggaaaaattgccattgcgaggcccattgggctcctcctttctgtgataagttcggttttggaggatcgactgactccggtcctatccgacaggctgataatcaggggctgactattggtattctggttactattctgtgcctgttggctgcaggcttcgtggtgtatctcaagcgaaaaactctgattagactgctgttcactaacaagaaaactacaattgagaaattacgctgtgtgcgcccaagtaggcctcccaggggcttccagccctgccaggcccatttgggacacctcggtaaaggtcttatgcgaaagccacctgacagctatccccctaaggataacccacgcagattattgcagtgccaaaatgttgacatttccaggcctttgaacgggctaaatgtcccccagcctcaaagcacacagcgtgtcctgcccccattacaccgggcccccagagcacccagtgtgccggcccgacctttgcccgcaaaaccggcattacggcaggcccaaggtacctgcaagccaaatcccccacaaaaaccgttgccggcagaccctcttgcgcgcaccacccgattgacacatgccctggcccggacccccggacagtgggagactggtctgcggctagccccgctgcgacccgcaccacaatacccccaccaagttcctcgctccacccacacagcctatatcaagtag

SEQ ID NO: 177981 - DNA, 837 bp, synthetic construct
  misc_feature 1..837: note = Description of Artificial Sequence: Synthetic coding sequence
  source 1..837: mol_type = other DNA
atggccgcccggcccctgcccgtgagccccgcccgggccctgctgttggccttagcgggggccttgcttgccccctgtgaagcgaggggagtctccctgtggaaccagggtagagccgatgaagtggtgtctgcaagtgttgggtcaggagacctgtggataccagtcaaaagctttgactctaaaaaccatccggaagtgctgaacatccggttacagcgggaatcaaaggaactgatcatcaacctcgaacgcaatgagggtttaattgccagcagtttcactgaaacacactacctgcaggatggcacagatgtatcattggcacggaactatactgggcattgttactatcacgggcacgttagggggtactccgactcagctgtgagtctcagcacttgttctggcctgcgaggcctcatcgtctttgaaaacgagtcatatgttctggaacctatgaagtccgccacaaaccggtacaagctgttccctgccaagaaactgaagtccgtgcgcgggtcttgcgggagtcaccacaatacgccaaatctggccgctaaaaatgtctttcctccgcccagccaaacttgggcccgcagacacaaacgggaaaccctcaaggccactaagtatgtagagctcgtgatcgtcgccgataatcgggagtttcaaaggcagggaaaggatcttgagaaggtgaaacagagactgatagagatcgctaaccacgtggacaagttttaccgtccactgaatattaggattgtgttagtgggtgtagaggtgtggaacgacatggataaatgctctgtgtctcaggaccccttcacttag

SEQ ID NO: 177982 - DNA, 2445 bp, synthetic construct
  misc_feature 1..2445: note = Description of Artificial Sequence: Synthetic coding sequence
  source 1..2445: mol_type = other DNA
atgcggctggccctgctgtgggccctgggcctgctgggcgccggctcgccgctcccctcttggcctctcccaaacatcggcgggacagaggaacagcaggcggaatccgagaaggcccccagagagcccctcgagccccaggtgctgcaagatgatctccctatctctttaaaaaaggtcctgcagactagcctccctgaacccctgcgcatcaaacttgaattagatggtgatagccacattctcgagctgcttcagaaccgggaactcgttcctggtaggcctactttggtttggtatcaacccgatggcaccagggttgtgtctgaagggcatacactggagaactgctgctatcagggcagggtgcggggatatgccgggtcctgggtgagtatctgtacctgtagtggcctaagggggctcgtggtcctgactcctgagcgatcttataccctcgaacagggccctggggaccttcaaggacccccaattattagtagaatccaagatctgcacttaccgggacacacatgtgcactgtcatggagagagtccgtacacacacaaaagcctcccgagcatccactcgggcagcgccacatccgccgtcgccgcgacgtggttaccgagaccaaaaccgtggagttagtgatcgtcgcagaccacagcgaggcccaaaagtatagggacttccagcatctgctgaacaggaccctcgaggtcgctctgctgctggacacattcttcagacctctcaatgttcgagtagcattagtgggcctggaggcctggactcagcgggacttggttgagatttcacccaaccccgcagtgactctcgagaacttcctccattggcgcagagcccatttactgcccaggctgccgcacgatagcgctcagctggttacgggcaccagtttctcggggcctactgtgggcatggccattcagaactccatctgttctccagacttttctggaggagtcaacatggaccacagcacttcaatcctgggggtcgctagcagcatcgcccatgagctcggtcatagtctgggattagatcatgacctcccaggtaactcttgcccctgcccaggcccagcccccgccaagacctgtatcatggaggccagcacagacttccttccgggtcttaacttctcaaattgcagtagacgtgccctcgagaaagcccttctggacggcatgggatcctgcctttttgagcgcctgccgagcctgcccccaatggctgctttttgcggcaatatgttcgttgaaccaggcgagcagtgtgattgcggtttcctggacgattgtgttgatccatgctgcgactcactaacctgtcagctgaggccaggggcgcagtgtgccagcgatggcccctgctgccagaactgccagctgaggccctctgggtggcagtgtaggcctacgaggggtgattgcgacttgccagagttttgccctggcgacagttcccagtgcccccccgacgtgagcttgggcgatggagagccatgcgcaggagggcaggcagtttgcatgcatggccgctgtgcgtcttacgcacagcagtgccagagcctgtgggggccaggtgcccagccggccgctcctctctgtctacaaaccgcgaacacaagagggaatgcattcggttcctgtggcaggaatccctcagggtcttatgtgagctgcacgcccagagacgctatttgcggccagctgcagtgccagaccggccggacacagcccctgctgggaagcatccgcgacctactgtgggagacaattgatgtgaatggaacggagttgaattgcagttgggtgcacttggatctgggatcagatgtagcccaacccttgctcaccttgccgggcactgcctgtgggcccggactggtgtgcattgaccaccggtgtcagagagtcgacttgctgggcgcacaggagtgtcggagtaagtgtcacggtcatggagtctgcgattcaaatcgtcattgttactgtgaggaaggctgggcaccccctgactgcaccacgcaactgaaggcaacctcctctctcaccacgggcctgctgctgagtcttctcgtgctgttggtactggtcatgctcggagcctcatattggtaccgagccaggctacatcaacggctgtgtcagctaaaaggtcccacttgccagtaccgtgcggcgcagagtggccccagcgagcggcccggcccacctcagcgtgcgctgctcgccaggggaaccaaatcacagggacccgctaaaccccccccccctcgcaagcccttgcccgccgacccccaggggcggtgtccctcgggtgatttgcctggacctggggctgggataccaccccttgtagtgcctagtagaccagccccaccgccaccgacagtgtcttcattgtacctgtag

SEQ ID NO: 177983 - DNA, 2520 bp, synthetic construct
  misc_feature 1..2520: note = Description of Artificial Sequence: Synthetic coding sequence
  source 1..2520: mol_type = other DNA
atgcggctggccctgctgtgggccctgggcctgctgggcgccggctctcccctgccttcttggcccttgcccaatattggtgggaccgaagaacagcaggctgaatctgagaaggctcctcgtgaacctctagaaccccaggtgttgcaggatgatctccctatttccttgaagaaggtgctgcagacatcccttcctgagccactgcgcatcaaacttgaactggacggggacagccatattttggaattgcttcagaaccgagagttagttcccggacggcctaccctcgtctggtatcagcctgatggaacgcgtgttgtttccgaaggccacacgctagagaactgctgttatcaggggagggtcaggggctacgcagggtcttgggtgtcaatttgcacatgctcaggcctgagaggactggtagttttgacccccgaacgctcttataccctggagcaaggcccaggggacctgcaggggccccctataatctcccgtatccaggatcttcacttgcctggacacacctgtgcactaagctggcgcgagtccgttcatacccagaagccgcctgagcaccccctcggacagcgccacatcaggcggcgccgggacgttgtcaccgagacaaaaactgtggagctcgtgatcgttgcagaccattctgaggctcaaaaatatagagactttcaacaccttctgaatagaaccttggaggtcgcgctcctcttagacactttcttccgtccgctcaacgtgagggtggcgctggtaggattggaggcttggacacaacgcgacctcgtcgaaatttcgccaaatcccgcagtgacattggagaacttcctgcattggcgccgtgcccacctacttccccggcttcctcatgactccgcacaactagtcaccgggacatcattctccgggcccacggtgggaatggccatccagaatagcatctgctcacccgacttcagcgggggcgtgaatatggaccactcgacctccatcctgggcgtggcttcttctatcgcccacgaactaggtcactctttaggcctggaccacgatctgccagggaactcttgcccatgccccggaccggcccccgccaagacctgcatcatggaagcatctactgatttcctccctgggctgaactttagcaactgtagcagacgcgcactggagaaggcactgctggacggtatgggatcttgccttttcgaaaggctgcctagccttccccccatggctgcattctgcggtaatatgttcgtcgaacccggggagcagtgcgattgtggtttccttgatgattgcgttgacccctgttgtgactcacttacctgtcagctcagacccggggctcagtgcgcgagcgacggtccctgttgccaaaattgccagctccgacccagcggctggcagtgccggcctacgcggggtgactgcgatctgccagagttctgtccaggcgactcttctcagtgcccccccgacgtgagcctcggagacggggagccttgtgccggtggtcaggccgtgtgcatgcatggccgctgcgccagctacgcgcagcagtgtcagtcactctggggaccaggagcgcagcccgctgcccccttgtgtctgcagacggccaacaccaggggaaacgcttttggttcctgcgggaggaatcctagcggctcttacgtgtcctgcacacctcgagacgccatatgtggtcaactgcagtgccagactggcagaactcagcccctgctgggcagcatccgcgatctgctgtgggagacgatcgacgtgaacggaaccgaactcaactgcagctgggtgcacttggacctgggatccgacgtggcacagccattacttaccctgcctggaactgcctgtggccccggcctggtttgcattgaccaccgatgtcagcgagtggatttgcttggcgcacaggagtgtaggagtaaatgccatggacatggagtgtgcgatagtaatcgacactgctattgcgaggaagggtgggcacctccggattgcacaacgcagctaaaggctacatcgagtctgaccacagggctgcttctctcacttttggtgctgctggttcttgtgatgctcggcgctagttattggtaccgcgctagacttcaccaacggctatgtcaactgaaaggccccacatgtcagtatcgagccgcccagagcggcccttcagagagaccaggtcccccacaacgcgccctgctggccaggggtaccaagcaagccagcgcactgtctttccctgcacctcccagcagacccctgccgccggatccagtaagcaagcgtctgcagagccagggtcccgctaaacctccaccaccacggaagccgttaccagccgatccacagggacgctgcccttcaggcgacctgcccgggccaggggccggtattcctccattggtcgtaccatctagacccgctcctcctcctcccaccgtgagcagtttgtatctctag

SEQ ID NO: 177984 - DNA, 2592 bp, synthetic construct
  misc_feature 1..2592: note = Description of Artificial Sequence: Synthetic coding sequence
  source 1..2592: mol_type = other DNA
atgcggctggccctgctgtgggccctgggcctgctgggcgccggcagtccccttccgtcctggccattgccaaatattggcggcaccgaagaacagcaggcagaatctgaaaaggcccccagggaacctttagagccgcaagtgttacaggatgatctccctatctccctcaagaaagtgcttcaaacaagtctacctgagccactccggataaaactggagctcgatggagacagtcacattctcgaactattgcaaaaccgcgaactcgtgccgggtcggccaaccctcgtgtggtatcagcccgatggcacgagggtcgtgtccgagggtcataccctcgagaattgctgctatcaggggcgggttcgcggctatgctggtagctgggtgtccatctgcacttgtagcggcctcaggggtttagtcgtgctcactcctgaacgtagctacaccctggaacaagggcccggtgatttgcaaggccctccgatcatatcccggatccaggacctccacttacctggccacacttgcgccctgagctggcgagagtccgtgcacactcaaaaaccacctgaacatccactcgggcagcgtcatattaggcgccgaagagacgtcgtgactgagaccaagacggtggaactagtgatcgtcgccgaccatagtgaagctcaaaagtatcgggattttcaacatctgttgaatagaaccctggaggtggctctcctccttgacacatttttccgccctctcaatgtccgggtcgcactggtgggactcgaagcctggactcagcgggacctggtagagatctctcccaatccggctgtgacactcgaaaatttcctccattggaggcgggcacacctgctgcctagactccctcatgattctgcccagctggtaaccggaacttctttcagcggaccaactgtcggaatggctatccagaactctatctgttcacctgatttctctgggggtgtaaacatggatcactctacgtccatattgggagtcgcgtcctccattgctcatgagctcggtcatagcctcgggctcgaccacgaccttcctggaaacagctgtccttgtcctggaccggcacctgcaaagacttgcattatggaggcctccactgatttcctgcctggccttaattttagtaattgcagcagaagggcactcgaaaaggctctgctggacggtatggggagctgtttgtttgaaaggctacccagcttacctcctatggccgctttctgtggaaatatgttcgtcgagccgggcgaacagtgtgattgtggcttccttgacgattgcgtggacccttgctgtgactccctcacatgccaactgcgccccggggcccaatgtgcctcagatggaccgtgctgccaaaattgccagctcaggccttcagggtggcagtgtaggcccactcggggcgattgtgacctgccagagttctgcccaggcgactccagtcagtgccctcccgatgtgagcttgggagacggcgaaccctgcgccggaggccaggccgtctgcatgcacggacgttgcgcatcctatgctcagcagtgtcagtcgctttggggcccaggagcccagcctgctgctcccctgtgcctgcaaactgcaaatacccgcggtaacgcatttgggtcctgtggtaggaatccctcaggctcctatgtctcttgcacacctagggacgccatttgtggccaactgcagtgccagaccggccggacccagcccctgctcgggagcatacgcgacctgctctgggaaacaatcgatgtgaatggtactgaactgaattgtagttgggtgcacctggacctcggaagcgacgtggcccagcccttgctgacgctcccagggacggcttgcggcccaggactggtctgcatcgaccaccgctgccaaagagttgacttactgggagcgcaggagtgtaggagcaagtgtcacggccatggggtatgcgattcaaataggcattgttactgcgaagaggggtgggctcccccagattgcacgacccagttgaaggccacctcctcgctgaccacgggactgctactatctctcctagtgctgcttgtattggtcatgctgggggcaagctattggtatcgggcgaggctgcatcagcgcctgtgtcagctgaagggaccgacgtgccagtatcgggctgcccagtcggggccctccgagcgacctggccccccacagcgggccctcctggctcgagggactaagcaggccagcgccctgtcattcccagctccaccttcacgccctctgccccctgatccagtctcaaagcgattgcaggctgaactggctgaccgccccaacccccctacccgcccactgcctgctgatcctgttgtaagaagccctaagtctcaaggtccggccaagcctccgcctcccaggaaaccactgccggccgatcctcaaggaaggtgtccctcaggagatttgccagggcccggggcaggtatcccccccctcgtggtgccaagtcggcccgcacctcctcctcctaccgtgtcctctctatatttgtag

SEQ ID NO: 177985 - DNA, 2517 bp, synthetic construct
  misc_feature 1..2517: note = Description of Artificial Sequence: Synthetic coding sequence
  source 1..2517: mol_type = other DNA
atgcggctggccctgctgtgggccctgggcctgctgggcgccggctctcctctcccttcatggccactcccgaatattggtggaactgaagagcaacaggctgagtctgagaaggcgcctagagaacctctggagccacaagtgttgcaggatgaccttccaattagtctgaagaaggtattgcagacctctcttcctgaaccactccgcatcaaacttgagctggatggtgattctcacatccttgagcttcttcagaacagagagctggtgccagggagaccaacgcttgtatggtatcagcccgacggcacgagggtcgtaagcgagggccatactttggagaactgctgttatcaaggtcgtgtcagggggtacgcagggagctgggtcagtatatgtacttgcagcggactccgcggactggtcgtgctcacaccagagcggagttacaccctagagcaagggcccggggacctccaggggccacccatcatttcacgcatccaggatctccatcttccggggcatacctgtgctctttcctggcgggaatccgtccacacccaaaagcctcctgagcatcctttgggacagcgacacatcaggcgtaggagagacgttgtgaccgagactaaaaccgttgagttggtaattgtggccgatcactccgaagctcagaagtaccgcgacttccaacaccttcttaaccggacattagaggtggctctcctcctggatacctttttcaggcccctgaacgtgcgggtggccttagtaggcctggaagcgtggacccagagagacttagtagagattagccccaatcccgccgtgacactggagaacttcctgcattggaggagagctcacctactgccgcgcctcccacacgatagcgcacagttagtgaccggtacatctttctctggcccaacggtgggcatggccattcagaactccatctgctctcctgacttctcaggtggggtgaacatggaccattcgacctctatccttggcgtggcaagttccatcgcccatgagctgggtcactcgcttggccttgaccacgatctgcccggcaattcatgcccttgccctgggcccgcacccgcaaagacatgtatcatggaggcaagcaccgattttctaccagggctcaattttagcaactgctcacgaagggcattggagaaggctcttctagacgggatgggatcctgcctgtttgaaagactcccgtccttgcctcccatggccgccttttgtgggaacatgttcgtggagccaggcgagcagtgcgattgtgggttcctggatgactgtgtggatccatgctgcgatagtctgacctgtcaactaaggccaggcgcacaatgcgccagtgatggtccctgctgccagaactgtcagctgcgccctagtggttggcagtgtcgtcccaccagaggggactgcgatttgcctgaattttgtcccggtgattcatcccagtgcccccccgacgtgagccttggggacggcgaaccctgtgcagggggtcaggctgtgtgtatgcacggacggtgcgcctcctacgcccaacagtgccaatctctgtggggtcccggagcccagcctgccgcaccactgtgcctgcagacggccaacacgcggggcaatgctttcggaagttgcggcagaaatccttctggcagctatgtttcttgtacccccagagacgctatctgtggccagctccaatgtcagacaggtagaacccagcccctgctgggcagcatcagggatttactgtgggagaccatcgacgttaacggaacagagttaaactgtagctgggtacatctcgacctgggttctgacgttgcccagccactgcttaccctacctggaactgcctgcgggcctggattagtgtgtattgatcatcgctgccagcgtgtggacctgctcggcgctcaggaatgtcgtagtaagtgccatggacatggcgtctgtgattccaatcgacactgctactgcgaagaaggatgggcacccccggactgcacaacacaacttaaagctacttcatctttgaccaccggattgctgcttagtctgctggtgctattggtgcttgtgatgttgggtgccagttactggtaccgtgccagactccaccaacggctttgccagctcaagggcccaacttgtcagtaccgggcagcccagtccggaccgtctgaacggccaggtccaccccagcgcgcccttctcgctcggggcaccaaagccgagctggccgaccggccaaacccacctaccaggcctctgcctgctgaccccgtcgtacggtctccaaaatctcagggccccgcaaaaccacctccgccgaggaagcctcttcccgctgacccccaggggcggtgcccaagcggtgatctaccggggcctggcgccggcatccctccgctggtggttcccagccggcccgcacctcccccacccaccgtcagttctctgtacctgtag

SEQ ID NO: 177986 - DNA, 2319 bp, synthetic construct
  misc_feature 1..2319: note = Description of Artificial Sequence: Synthetic coding sequence
  source 1..2319: mol_type = other DNA
atgcggctggccctgctgtgggccctgggcctgctgggcgccggctccccactgcctagttggccccttcctaatatcgggggcacggaggagcagcaggccgagtcagagaaagcaccccgcgaacctctcgagccacaggtgctgcaggacgaccttcccatcagcctgaagaaagtcttgcagacgagcctccctgaaccactcagaattaagctggagctggacggcgactcccatattctcgagctgctgcagaaccgtgaactagtccctggacggccgaccctggtatggtatcagcctgacggcacaagagtcgtctccgaaggacacacccttgagaactgctgttaccaaggacgtgtgcggggatacgctggttcatgggtgagcatctgtacttgctccggtctgaggggcctggtagttctgacgccagaaagatcctacacactggaacagggtcccggcgacctgcaaggtccacccatcatctctcgtattcaggatctgcacctccccgggcacacctgcgccctgtcctggagagaatccgtgcatacccagaaacctccggaacaccctttgggccaacgccatatccgtcggcgtagggatgtcgtcaccgagactaagaccgtggagctggtgatcgtagccgatcatagtgaggcgcagaagtacagagacttccagcatctcctgaaccgaaccctggaggtcgcattactcttggatacattttttaggcccttaaacgttcgagtggctctggtcggtttggaagcctggacacagagggatttagtcgagatctcgccaaacccggccgtgaccctcgaaaatttcctgcattggaggagagcccacctcttacctagactgccccacgacagcgcccagctggtcactggcacgtctttctcaggacccacggtaggaatggccatccaaaatagtatctgtagtccagatttcagcggcggagtgaacatggaccactccactagcatcctaggcgtggcatcctccattgcgcatgagttaggtcattctctcggtttagaccatgatcttccagggaacagttgcccctgccccggtccggctccagcgaagacatgcatcatggaggctagcactgactttctcccaggactcaatttctctaattgctcccgacgtgcgctggagaaagcactcctggatggaatggggtcgtgcttgttcgaaagactgccgtccctgccccccatggcagctttctgtggcaatatgttcgtggagcccggagagcagtgcgattgcggcttccttgatgattgcgttgacccgtgctgtgacagtctcacttgccagctgcggcctggtgcccagtgcgcttcagacggcccctgttgtcaaaattgtcaactccggccatccggatggcaatgtagaccaactcgcggggattgcgacctgcccgagttttgtccgggcgactcatcacaatgccctcctgacgtgtccttaggagatggcgagccttgcgcgggcggacaggcagtgtgtatgcatggacgatgcgcctcctatgctcaacaatgccagtccctgtggggccctggcgcacagcctgcggctccattatgcctgcaaactgcgaacacgcgggggaatgcgttcggaagctgcgggaggaacccctcggggagttacgtgtcctgtacccctcgggatgccatttgcggccagctccagtgccagactggtagaacccaacctctcctaggctccatcagggatctactatgggaaaccatcgacgtgaacgggacagagctaaactgcagttgggtccatctggacctggggtctgacgtcgcccagccactgctgactttgcccggtaccgcttgcggacctggactggtgtgcattgaccaccgctgtcagcgagtggacttgctgggcgctcaagaatgtcggagcaagtgtcacggccacggtgtttgtgactccaacagacactgttattgtgaagagggctgggcaccacccgactgcacaacccagctcaaagccacgagctcattaaccaccggcctgctactgagcctcctagtcctgctggtccttgtcatgttgggtgccagctattggtaccgagccagactgcatcaaagactttgtcagctgaagggccccacgtgtcagtacagtctgcgtggacaaccctcaccacacccgcagggatctcattgcctgccaactcctagagctggtgcccatagggtgacctgcccagcgcagggtctcgaaagcagaccctag

SEQ ID NO: 177987 - DNA, 1563 bp, synthetic construct
  misc_feature 1..1563: note = Description of Artificial Sequence: Synthetic coding sequence
  source 1..1563: mol_type = other DNA
atgcggctggccctgctgtgggccctgggcctgctgggcgccggctcccctctcccttcttggcctttgcctaatattggtggaactgaggagcagcaggcggaatcagaaaaagcccccagagagccgctagaacctcaagtgcttcaggacgaccttcccatatcattaaaaaaggttctgcagacatcattaccggaaccacttcggatcaaactggagctggacggggacagccacattctggagctgctgcagaataggagtttcctgccaggtctgaatttctccaactgcagtcggagggcactcgagaaagccctgttggatggaatgggtagctgcctattcgaaagactcccatcactgccccctatggctgccttctgtggtaacatgttcgtagagccaggggagcagtgtgattgcggattcttggacgactgcgtcgacccatgttgtgactcactgacatgccagctcagacccggcgcccaatgtgcctcagacggcccatgttgccaaaattgtcagctgcggccatccggctggcaatgtcgaccgacgaggggcgattgcgatctgccagagttctgccctggagactcgagccagtgtccaccagatgtgtcgctgggcgacggcgagccatgcgccggcggccaagcagtgtgtatgcacgggagatgtgcctcttatgcacagcagtgtcagagcctgtggggacctggagcacagccagccgcccccttatgccttcagaccgcaaatacacgaggaaacgcatttgggtcctgtgggcggaatccttccggttcctatgtgagctgtacaccaagagatgccatatgtggacagctccagtgtcagacgggcagaacccaacccctcctgggttcaataagagacctcctgtgggaaaccatagatgtgaatggaaccgaattgaactgtagctgggtccacctggatcttggcagtgatgtcgcacaacccctgctcaccctaccaggcaccgcctgtggtcccggtttagtttgcatcgatcatcgctgtcagagagttgatcttctgggggctcaggaatgtcgttccaaatgtcatgggcacggagtatgcgactctaatcggcactgttactgtgaggaaggctgggcgccccctgattgcacaacacagctgaaggccacctctagccttacaaccggcctgctgttgagcttactggttctgttggttctggtaatgctcggagcctcgtactggtatcgcgcaaggctgcatcagagactgtgtcagttgaaaggccccacctgccaatacagagcagctcaaagcggcccctccgagcgacccgggcccccacagcgggcactgctagcacgcggcaccaagtcccaggggcctgcaaagccccccccgccaaggaaacctctacctgctgacccacagggacggtgcccgagtggcgatctgcccggtccaggagcgggcatccccccactggtggtgccatcacggccggcccctccccccccgaccgtgagttctttgtacttgtag

SEQ ID NO: 177988 - DNA, 2589 bp, synthetic construct
  misc_feature 1..2589: note = Description of Artificial Sequence: Synthetic coding sequence
  source 1..2589: mol_type = other DNA
atgcggctggccctgctgtgggccctgggcctgctgggcgccggcagccccttgcccagctggccgctcccaaacatcgggggcactgaggagcagcaagctgagagtgagaaagccccccgagagccactcgagcctcaggttctccaggacgatttaccaattagtttgaaaaaagtgctgcagacttccctgcccgagcctctacggattaaactggaattagacggcgatagtcatatcctggagctgctccagaaccgggaattagttcctggacgccccactttggtgtggtatcaaccagatggtaccagggtcgtgtctgaaggccacaccttagaaaactgctgttatcaaggacgagttcgagggtacgccggctcatgggtgtccatctgcacctgttccgggctccggggccttgtggtcctgaccccagaacggagctatacactcgaacaagggccaggcgatctccaggggccccccattattagcagaatacaggacttacacttgcctggccatacctgcgccctgagttggagagaatccgtgcatacccagaagcctcccgaacacccactgggccagcggcatatccgtcgtcgcagagatgtagtgactgaaaccaagaccgtcgagctcgttatcgttgccgatcatagtgaagctcagaaataccgagattttcaacacctactcaaccgtaccctggaggtcgctctgctgttagacactttcttccgtccactgaatgttagggttgccttagtaggtctggaagcctggactcagcgtgacctggttgaaatatccccaaacccagccgttaccctcgagaactttctccattggaggagagcccacctacttccgagactgccccacgatagcgctcagctagtcacaggcacaagttttagcgggccaacggtcggcatggctatacagaatagcatttgctcccctgactttagcggcggtgtgaacatggatcacagtacatctattctgggcgttgccagttctatagcccacgagctggggcactcgctggggctggaccacgacctgccagggaattcttgcccctgtccgggcccagcgccagccaaaacatgcatcatggaggcctcgactgactttctgccgggactgaatttttctaattgcagccggcgggccctggaaaaagccctgcttgacgggatgggatcttgcctctttgagaggctaccttcactgccaccgatggctgccttttgtggcaatatgtttgtggagcctggtgaacagtgtgattgcggattcctcgacgactgtgttgatccctgttgcgactccttgacttgtcagctcagacctggtgcccagtgcgcttctgacggcccttgttgtcagaactgtcagcttaggccaagtggatggcagtgtaggcctacccgcggagactgcgacctgcctgagttctgcccgggtgatagcagtcagtgtccaccggatgtgtccctaggtgacggcgaaccctgtgcaggaggtcaagctgtgtgtatgcacggtcggtgtgcctcatacgctcagcagtgccagagcctctggggaccgggcgcgcagcctgcagccccactctgccttcagacggcgaacacacgcgggaatgcctttggctcctgcggcaggaaccctagtggttcttatgtgagctgtacgcctcgagatgccatttgtggacagctgcaatgtcagacaggaagaactcagcccctgctgggctccatcagggacctgctgtgggagacaatagatgtgaacggtacggaactaaactgctcttgggtgcatctagacttaggcagtgatgtggcgcagccattactcacactccctggaaccgcctgtggcccaggactcgtgtgtatcgatcatcggtgtcagagggtggacctgctcggcgcccaagagtgccggtccaagtgtcacgggcacggggtatgcgattccaatcgccactgttattgcgaggagggatgggctcccccggattgcaccactcaactgaaggctacctcgtccttaacaaccggcctgctgctatccctcctggtcctgttagttctggtaatgctgggggcatcgtattggtatcgcgccagattgcaccagcgcctgtgtcagcttaagggaccaacatgccagtaccgagcagcgcagtccggaccaagcgagaggcctgggccaccccagcgagcactgttagccagaggaactaaagcctcggctctgagcttcccagcccccccctctcgccctctcccccctgatccggtgtccaagagactgcaggcagagttagccgaccgcccaaacccgcccacacggcccctgcccgccgatccggtcgtgagaagtccaaagtcgcagggtcccgcaaaacctcctccacctcgtaaaccactgcctgccgatcctcagggccgttgtccatccggcgatttacccggccctggggccggaatcccccccttggtggtgccctccagacccgcgccacctccaccgaccgtgtcaagtctgtacttatag

SEQ ID NO: 177989 - DNA, 2391 bp, synthetic construct
  misc_feature 1..2391: note = Description of Artificial Sequence: Synthetic coding sequence
  source 1..2391: mol_type = other DNA
atgcggctggccctgctgtgggccctgggcctgctgggcgccggcagcccattgccttcatggccactgcccaatatcggcggcactgaagagcagcaggctgaaagtgagaaagctcctcgggaacctctggagccccaggttctgcaagatgacctgcctatctctctgaaaaaggtcctgcagacctctctcccagaacctcttagaattaaattggagctcgatggggactcccatatcttggaacttcttcagaatagagaactggtgcccggtaggcccaccctggtgtggtaccaacctgacggcacccgggttgtcagtgaaggacatacactggaaaactgctgctatcagggcagagtgagaggttacgctggctcctgggtgagcatttgcacatgttccggcctgcgggggctggtagttttgacccccgagcgtagctatacactggagcagggccctggcgatctgcagggaccccccatcatctcaaggatccaagacctgcacctgcctggacatacttgcgcactgtcatggagggagtcagtgcatactcagaagcctcccgaacaccccttgggacagcgtcacattaggcgcagaagggacgtagtcacagagacaaaaacggtagagttggttattgttgctgatcatagcgaggcacagaaatatcgggactttcaacatctgctgaatagaactctagaagttgctttgcttttggacacattctttcgccccctcaacgttcgggttgccctcgttggcttagaagcatggacgcaacgagatctcgttgagattagcccaaatcctgccgtcacgcttgaaaacttccttcactggaggcgggcccacctcttgccacgattgcctcacgacagcgcgcagctcgtcaccggaacttccttcagcgggccaactgttggcatggcaatccagaattccatctgcagtcccgatttcagtggaggggtcaatatggaccatagcacaagtattctgggcgtagccagcagcattgcgcatgagctgggacactccctcgggctcgatcatgatctgccagggaactcctgcccctgccctggcccagcacctgccaagacttgtatcatggaagcttctactgatttccttccagggctgaacttcagtaactgcagcagaagggcactcgaaaaagccttgctggacgggatgggctcatgcttatttgagcgtctgcccagtcttcctcctatggctgcgttctgtgggaacatgttcgtggagcccggggaacagtgtgactgcggttttctagatgactgcgtggacccttgttgcgattctctgacttgtcaactgagaccaggagcccagtgtgccagcgacggaccttgctgccaaaactgccagctgagaccaagtggctggcagtgtaggccaacacgaggggattgcgacctgcccgagttctgtcctggcgactccagtcagtgtccacctgacgttagcttgggagatggcgagccttgtgcagggggacaggctgtttgcatgcatggacgctgtgcatcctatgcgcaacagtgtcagagcttgtgggggcccggagcgcagcctgcagcacccttgtgcctgcaaaccgctaacactcgaggaaatgcatttggctcatgtggccggaacccaagcggatcctatgtcagttgtacgccgagagacgcaatctgtggtcagctgcagtgccagacgggaagaacgcagcccctgctgggatctatccgcgatctgctttgggagacaatcgatgtcaatggaacagagctgaactgtagctgggtccatctcgatctgggcagcgatgtggcgcagcccctgttgacattgcccggcacggcctgtggacccggcttggtgtgcattgaccaccgctgtcagagggttgacctgctcggagctcaggagtgtcggagcaagtgccacggccacggcgtgtgcgattccaaccggcactgctactgtgaagaagggtgggcccctccggactgtacaacccaactgaaagctaccagctcgctcaccaccggccttctcctgagtttactggttctgctggttttagtgatgttgggggcgtcatactggtatagagctcggttacatcagagactgtgtcagcttaagggacctacttgccagtacaggctggtgctgtctgcctcacggccccccctgcctggccgatgcaggttaacactgtgtccaagggattcctccctccgaggtcagcctagtccccacccgcagggatcccattgcttgccaacacctagagccggggcccatagggtaacttgtcctgcccaaggcctggaatcccggccctag

SEQ ID NO: 177990 - DNA, 2475 bp, synthetic construct
  misc_feature 1..2475: note = Description of Artificial Sequence: Synthetic coding sequence
  source 1..2475: mol_type = other DNA
atgcggctggccctgctgtgggccctgggcctgctgggcgccggctcccctcttccttcctggccactgccaaatatcgtcctctcctggggggtgctcggacctgctggcgggactgaggaacagcaggcggaaagcgaaaaagccccgcgggagcctctcgagccccaggtgctgcaggacgacctgccaatctcactcaagaaggtgctgcaaaccagcctgccagagccccttagaataaaattagaattagacggtgatagtcatatcctggagttgctccagaaccgtgagcttgttccagggagaccaaccctcgtgtggtaccagccggacgggacgcgcgtcgtgtctgaaggtcacactcttgaaaactgctgctaccaggggagggttcgcggatacgcgggaagctgggtgtcgatctgcacttgtagtgggctgcgggggttagtggtcctgacaccagaacgttcctatacgctcgaacagggaccaggtgatttgcaaggaccaccaattatctctcgaattcaagatttgcacttaccgggccacacctgcgcattgagctggcgtgagtccgtgcacacgcaaaaacctcctgagcaccctctgggccagcgtcacattcgccgtcgaagggatgtcgttactgagactaaaactgtggaactggtgattgtcgccgaccactccgaggcacagaaatatcgggacttccaacatctgctgaatagaacccttgaagtggctctgctcctggacaccttttttcggcctctcaacgtgcgtgtcgcgcttgtcggccttgaagcatggacacaacgagacctggtggagatctcacctaaccctgccgttaccttagaaaactttctccattggcgcagagcccacctcctgccccggttgcctcacgatagcgcccagctggtgactggaacttcattttccggccctacagtcggaatggctatccaaaacagtatttgcagtcccgatttttcaggcggggtgaatatggaccattccaccagcatcctgggagtcgcctcaagcatcgcccatgaactagggcacagcctgggcttggaccatgacttgcctgggaacagctgtccatgtcctgggccagcgcccgctaaaacttgcatcatggaggccagcactgatttcctgcccgggttgaactttagcaactgttcaagaagggccttagagaaagccctgctcgacggtatgggctcttgtctgtttgagcgcctgcccagtcttccacctatggccgccttttgcggcaacatgttcgtggaacctggggaacaatgcgattgcggattccttgacgactgcgtggatccatgttgcgattcccttacgtgtcagctccggcccggcgcacagtgtgccagcgacgggccatgctgtcagaattgtcagctccgcccttctggctggcagtgtcgacctacgaggggggactgcgatcttcctgaattctgccccggcgactcctctcaatgccctcccgacgtgagcctgggcgacggagagccttgtgccggtggccaggctgtgtgcatgcatgggcgatgtgcctcttatgcccagcaatgccagtctttgtggggccccggggcccagcctgccgcccccctgtgccttcagacagcgaacaccagaggcaatgccttcgggtcttgtggaagaaaccctagtggttcatacgtcagctgcacgcctcgcgatgctatctgcgggcagttacaatgccagacggggcgaacccagccattgttaggctccatcagggacttactgtgggaaactatcgacgtgaacgggaccgagctgaactgttcctgggtgcatctggatttagggtccgacgttgcccagcctctcctcaccctgccaggcaccgcttgtggccccggtctggtctgcatcgatcatcgttgccaaagggtggacttactaggagctcaagagtgccggtccaagtgccatggtcacggggtttgtgatagcaatcgtcattgttattgtgaggaaggctgggctcctcctgactgtacaactcagctcaaggccacctcctctcttaccacaggtcttctactctctctgctggtactactggttctggtgatgttgggggcctcttactggtatcgtgccagactacaccaacggctttgccagctgaaaggcccaacgtgccaatatagggcagcccagtcaggacctagcgaaagacccggaccgccccagagggctctgctagctcggggcaccaagtcccaggggcctgcaaaacccccccccccacgcaaacccttgcccgccgatccccagggaaggtgtccatctggtgacttacccgggcccggagcggggatcccaccactggtcgtcccaagccggcccgcacccccccctccaacagttagtagtctttacttatag

SEQ ID NO: 177991 - DNA, 2757 bp, synthetic construct
  misc_feature 1..2757: note = Description of Artificial Sequence: Synthetic coding sequence
  source 1..2757: mol_type = other DNA
atgcccggcggcgccggcgccgcccggctgtgcctgctggccttcgcactgcaaccactgcgccctagggccgcccgggagcccggatggacgaggggtagcgaggagggatctcctaagttgcagcatgagctcatcattccccagtggaagacttcagagtcacctgtgcgggaaaagcatccactgaaggcggagctccgggtcatggcagagggtcgtgagctgattctggaccttgagaagaacgaacagctgttcgcaccaagctataccgaaacgcattacacttcttcaggcaatcctcagacaacgacccgcaaactggaggaccattgcttctaccatggaaccgtgcgcgagacagagctctcatcggtgaccctcagcacatgtagaggtataagggggctcatcactgtgtcatcaaacctgtcatacgtgatcgagcccttgccagatagtaaaggccagcacctgatataccggtcagaacacttaaaaccaccaccggggaattgcggcttcgagcattccaagcctactactcgcgattgggctctgcagttcacacagcaaacaaagaaacggccaagacgaatgaaacgggaggaccttaacagcatgaaatacgtggagctgtatcttgtggcagactatttggaatttcaaaagaaccgacgggatcaggatgctaccaaacacaaacttattgaaattgccaattatgtggataaattctaccgctcactgaacattcggatagcgctcgtggggctggaagtatggacacatggaaacatgtgcgaggtgtccgaaaacccatactccaccctctggagctttctttcctggaggcgaaaactgctcgcgcagaagtaccacgacaacgcccaactcattaccggcatgagctttcacggaaccaccatcggcctggcccctctgatggccatgtgttctgtctatcagtcgggcggggtgaacatggatcactcagagaatgctatcggagttgccgctaccatggcacatgagatgggccataatttcggtatgactcacgattcggcagattgttgctccgcttccgcagccgacggcggttgcatcatggcggccgcaaccgggcaccctttccctaaggtattcaacggctgtaatcgtagggagctagatcgctacttacagtctggcggcggaatgtgcctgagcaacatgcctgacacgcgtatgctgtatggcggccgacgatgcggaaacggatacctggaggatggggaggaatgtgattgcggagaggaggaggagtgtaacaatccatgttgcaatgcatcaaattgcacattacgccccggggcagaatgcgctcacggctcatgctgtcatcagtgcaaacttttggcccccgggacgctgtgtagggagcaggctaggcaatgcgacctgcccgagttctgcacaggcaagtctcctcattgtccaacaaacttctatcagatggacggaacaccctgcgaaggaggccaggcatattgttataacggtatgtgtctaacttaccaggagcagtgccaacagctgtgggggccaggtgctcgcccagctcccgatctctgctttgagaaggtgaacgttgctggtgatacttttggaaactgtggcaaggatatgaacggcgaacatagaaagtgcaacatgcgggatgccaaatgcggcaagattcaatgtcagagctcggaagccagaccactggagtcaaacgccgtaccgattgacacaacaatcatcatgaacggcaggcagatccagtgccgtggcacccatgtgtacagggggcccgaggaggagggggatatgctagaccccggactggtgatgaccgggacaaaatgcggatataaccacatttgcttcgagggtcagtgcagaaataccagcttctttgaaaccgagggttgtggaaagaagtgcaacgggcacggagtgtgtaataataatcagaactgccactgcttgccaggctgggctcccccgttctgtaacacacctggtcatggagggtccatagacagtgggccaatgccccccgagtctgtaggcccagtcgttgccggcgtcctggtcgccatcttagtcttagctgtgctcatgttaatgtattattgctgtagacagaataacaagctgggacaactgaagccctcagccctcccatcaaaactgagacagcagttcagttgtccatttcgggtgtcccaaaactctggcacggggcacgctaacccaacattcaagctgcaaaccccgcagggcaagagaaaggttatcaacacccccgagatccttcggaagcctagtcagcctccacctcgccctcctccggattatctgaggggaggatcccccccagcgcccctgccagcccatctgtctcgagcagcaaggaatagccctgggccagggtcccaaatcgaaaggaccgagtcttcgagaaggccccccccttccagacctattccacccgcccctaattgcattgtaagccaagacttctcccgtccccggccaccacagaaagcccttccagcgaaccccgtgccaggacggagatcgctgccccgcccagggggggcttcccctctgagacctccgggggctggaccacagcagtctaggcccctggccgccctagccccaaaatttcctgagtatagatcccagagagccggtgggatgatcagtagcaagatatag

SEQ ID NO: 177992 - DNA, 2763 bp, synthetic construct
  misc_feature 1..2763: note = Description of Artificial Sequence: Synthetic coding sequence
  source 1..2763: mol_type = other DNA
atgcccggcggcgccggcgccgcccggctgtgcctgctggccttcgccctccagcctctgaggccacgggcggcccgagaaccggggtggacaattagcaggggttccgaggagggcagccccaaacttcagcacgagctcattatcccacagtggaagacaagcgagagtccggtgcgggaaaaacatcccttgaaggccgagctgcgggttatggcagaaggacgagagcttatcctagacctagagaaaaacgagcagttgttcgcaccttcatataccgagactcactacacatcatctgggaatcctcagacgacaactaggaaactcgaagatcattgcttctaccacggaacagtccgcgagacagaactgagcagcgttacgctgtcgacctgccgcgggatacgaggtctgatcacagtgtcttccaacctctcctatgtgatcgagccattgccggacagcaagggccaacacctgatctacaggtctgagcacttaaagccaccccctggcaattgcggcttcgaacactcaaagccaacaacacgtgattgggctctccagttcacccagcagaccaagaagcggccgcgacgaatgaagcgagaggacctcaattcaatgaaatacgttgaactttatctcgtagctgactacctagagtttcaaaaaaacagacgtgatcaggatgctaccaaacacaagctcatagagatcgcaaactatgtcgataaattctataggtctctgaatatccgaatcgctctagtaggactcgaggtatggacacatggcaatatgtgcgaggtgagtgaaaacccttatagcacattatggagctttctgagctggagacggaagctgctggcgcaaaaatatcacgacaatgcacagctcatcaccgggatgagttttcatggcacgaccatcggactggctcccctcatggcgatgtgttcggtctaccagtctggcggggtaaatatggatcattccgagaatgccattggagtagctgcaacgatggctcacgagatgggtcacaactttggcatgacacacgactccgctgattgttgcagtgcatctgccgccgacggcggatgcataatggctgcggctaccgggcatcccttcccaaaagtattcaatggctgcaaccggcgggagctcgatcgctaccttcagtccggtggcgggatgtgtctctcgaatatgccagatacacggatgttatatggcgggaggagatgtggtaatggctacctggaggatggcgaggaatgcgactgtggtgaggaggaggagtgcaataacccatgttgcaacgccagcaactgtactttacgacccggtgctgaatgcgcccatggctcctgctgccaccaatgcaagttgctggcacctggaaccctatgccgtgagcaagcccgccagtgtgatttgccagaattctgtacgggtaaatcaccccactgtcctacaaacttctaccagatggatggtaccccctgcgagggcggtcaggcctattgctacaatggaatgtgcctgacataccaggagcaatgccagcagctttggggccccggggccaggcccgctcctgacctgtgttttgagaaagtgaacgtggccggagacacatttggaaactgcggcaaggatatgaacggggaacatcgaaaatgtaatatgagagacgccaaatgtggaaagattcaatgtcagtcctctgaagcccggcccctcgagtcaaatgccgtaccaatcgatacaacaattatcatgaacgggcgccagatacaatgtcgtggcacccacgtatacaggggacctgaggaggaaggagatatgctggatcctggactcgttatgacaggaacaaagtgtggatataatcacatttgttttgaaggacagtgtaggaacacaagcttctttgaaaccgagggatgcggtaagaagtgtaacggccatggggtgtgcaataataaccagaattgtcactgtctgccaggctgggccccccccttctgcaatacgcctgggcacggcggttccattgactctggacctatgccaccagagtccgtgggccccgtggtggccggagtcctagtcgccatacttgtcctggccgtcctgatgctgatgtattattgttgccggcagaacaacaagctgggccagctaaaacccagcgcactaccctcaaagcttagacaacagttctcatgccctttccgcgtatctcaaaattccgggaccgggcacgctaacccaacttttaaattgcagactcctcagggcaagcgaaaagtcatcaatacaccagaaatactgcgaaagccaagtcaaccccctccacggcctccccccgattacctgaggggcggctccccgccagctccgctgcctgctcatctcagccgggcggcacgcaacagcccagggccagggagtcagattgagcgcactgagagctcacgcagacccccaccgtctcgacccattccaccagcaccaaattgcattgtgagccaggatttcagccgtccaaggcccccccagaaagcactgccagccaatcccgtaccagggcggcgcagtctgccacgtcctgggggagctagcccactgaggccccctggcgctggacctcaacagtctcgccctctagccgccctcgccccgaagttccccgagtaccgtagtcagagggcaggagggatgattagctctaaaatctag

SEQ ID NO: 177993 - DNA, 1917 bp, synthetic construct
  misc_feature 1..1917: note = Description of Artificial Sequence: Synthetic coding sequence
  source 1..1917: mol_type = other DNA
atgtgcgaggtgagcgagaacccctacagcaccctgtggagcttcctctcatggaggagaaagctgctggctcagaaataccatgataacgcccagttgatcacaggtatgtctttccatggtacaacaattgggttggctccactcatggccatgtgctccgtgtaccagtctgggggggtgaacatggatcattccgagaatgcaatcggggtggctgcgaccatggctcacgaaatgggccataatttcggtatgacacatgacagtgccgactgctgttcagcttcagccgcggatggagggtgtatcatggccgcagccacaggacacccgttccccaaggttttcaacggatgtaatcgcagggaattggataggtatctgcagtctggaggcggtatgtgtcttagtaatatgcccgacacgcgaatgctgtatgggggccggcggtgcggtaacggctacttggaagatggcgaagagtgcgactgtggtgaagaggaggagtgtaataacccctgctgcaatgccagcaattgcaccctcagacccggcgccgagtgtgcacatggtagctgttgccatcagtgcaaactgttggcgcctggcacactgtgtcgtgagcaggcacgacaatgtgatctgcctgagttctgcactggaaagagcccccattgtcccactaatttttaccagatggacggaacgccatgtgaggggggacaagcctattgttataatgggatgtgcctgacttaccaggaacagtgccagcagctgtggggacccggcgcccgcccggctcccgacctatgcttcgagaaggtcaatgtcgccggcgacacgtttggaaattgcgggaaggacatgaacggggaacaccgtaaatgtaacatgcgcgatgcgaagtgtggaaagatccagtgccagagctcagaagcgcgaccactcgagtcaaacgcggtgccaattgatacaacaataatcatgaacggtagacagatccagtgcagaggcacccatgtctaccgcggccctgaggaggagggagatatgctggacccgggcctggtgatgaccggaaccaagtgcggatataaccatatctgctttgaggggcaatgtcgcaatactagtttcttcgaaactgagggatgcggtaaaaaatgtaatggccatggtgtctgcaacaataaccagaactgccactgcctgcctggttgggctcccccattctgtaatactcccgggcacgggggaagcatcgattcagggcccatgcctcccgaatctgtgggtccagtggtcgccggggttttagtagccattctcgtgcttgccgtgctgatgctaatgtattattgctgtcgccagaacaataagttgggacagcttaaaccaagcgccttgccctccaaattacggcaacagttctcttgtcccttccgggtcagccagaattccggcactggccatgctaatccgactttcaaacttcaaacaccgcagggtaagcgaaaagtcataaacactcccgagattctgcgaaagccttcacagccacctccaaggcctccgccagattatctacggggcggtagtccgcctgcgcctctgccagcccacctttcccgggcagcccgtaactccccagggcctggttcccagatagaacgaacagagtcatctcgacgcccacctccctccaggcccatccccccagcgcccaattgcatcgtttctcagaaatgtctacttccgcctgccatgatcctccgggctccccaacctagcggcactgtggtctgccttgtaataagcttcaacatggccttttataggtcgatgaggatccggatagagcccggtattaaaaccaaacttctggtgctcctcgtgtggaaacagttttag

SEQ ID NO: 177994 - DNA, 2868 bp, synthetic construct
  misc_feature 1..2868: note = Description of Artificial Sequence: Synthetic coding sequence
  source 1..2868: mol_type = other DNA
atgcccggcggcgccggcgccgcccggctgtgcctgctggccttcgcacttcagcctttgcgacctagagcggcgcgcgaacccggctggactagaggttccgaggaggggtctccgaagctgcaacacgagttgataatcccacagtggaaaactagcgagtctcccgtccgcgagaagcaccccttgaaggccgagctccgcgtgatggcagagggtcgggagttgattctcgaccttgaaaagaacgaacagctgtttgcgccctcttacaccgagacacattacaccagtagcggtaatcctcaaactaccacacggaagctggaggatcactgcttttaccacggcacggttcgggagactgaacttagctccgtgaccctgtccacttgccgcggaattcgcgggctgatcacagtctcgtcgaatctgtcctacgtgatcgaaccactccctgactccaagggtcagcacctgatataccggtccgagcacctcaagcccccacctgggaattgcgggtttgagcactccaaacccacaaccagagactgggcacttcagttcactcagcagacaaagaaacggccacgtcgcatgaaaagagaagatctcaactctatgaagtacgtggaactgtatctggtcgccgattatctcgaattccagaaaaaccgtagagaccaggacgctacaaagcacaaactgatagaaatcgcaaattacgtcgataaattttatcgctcactaaatattagaattgccctagtgggcctggaagtatggacgcatgggaatatgtgcgaggtgtctgagaacccctactctacactttggtcgtttttatcctggaggcgaaagttgctggctcagaaataccacgataatgctcaacttatcacaggtatgagttttcacggaacgactataggcctggctcctcttatggccatgtgttcagtttaccagtcagggggagtgaatatggaccattccgagaatgcaatcggggttgccgccacaatggcccacgagatgggacacaatttcggcatgacccacgatagcgctgactgctgttctgccagcgctgcagacggtgggtgcattatggctgcagccacaggccatccatttcccaaagtttttaacggatgtaacaggcgtgaactggaccgatacttgcagtctggtgggggtatgtgtcttagtaacatgcccgacactcgcatgttgtatggtggccgcagatgtggcaatggctatctggaggatggcgaggaatgcgattgcggcgaagaggaagaatgcaataacccttgttgtaatgcctcaaactgcacactccgcccaggggcagagtgtgcccacggctcatgctgccaccagtgcaagcttctcgcaccgggaactctctgtagggagcaggcccgccaatgtgatctgccggaattctgcaccggcaagagcccccattgtcctactaacttttatcagatggacgggacaccatgcgaagggggccaggcgtattgttacaatggcatgtgtttaacctaccaggagcagtgtcaacagctgtggggaccaggcgcgcgtccggccccagatctttgtttcgagaaggttaatgtggcaggcgataccttcggaaattgcgggaaagacatgaatggcgaacaccggaagtgtaatatgcgcgatgccaagtgtggaaagatccagtgccaatcatctgaggctaggcctctggagtcgaacgccgtccctatcgataccaccattatcatgaacggtagacaaatccagtgccgcggtacccacgtctataggggccctgaagaggagggtgacatgctcgaccctggcttagtgatgacaggcaccaaatgcggatacaatcacatctgcttcgagggccagtgcagaaacacttctttcttcgagacagaggggtgcggaaagaagtgcaatggacacggagtctgcaacaataaccaaaactgccactgtcttcccgggtgggcccccccattctgtaacacccctggccacggcggatctatcgatagtgggcccatgcccccagagtctgtgggccccgtagtcgccggcgtacttgtggccattctagtgctggctgtcctaatgctgatgtactactgttgtcgccagaataacaaactgggccagctcaaaccaagcgcccttccctccaagctgaggcagcaattttcatgcccattccgcgtgtctcagaattcaggaacaggccatgctaaccctaccttcaagctgcaaaccccacagggtaagaggaaggtcattaatacacccgagattcttagaaagcctagccagccaccccctcgacccccaccagattaccttcgagggggatcccctcccgcccctcttcccgcccatttgagcagggcagcccggaacagcccgggccccggatctcagatagaaagaacggagagttccagaagacccccaccaagtagacctatccctccagcccctaactgtattgttagccaggacttttctcggccacgcccacctcagaaggctctgcctgctaatccggtacccggccggagatccctgccccggcccgggggagcctcccctctccgcccgcctggcgcaggaccacagcagtcccggcctttggctgctcttgccccaaaggtgtccccccgcgaggccctgaaggtgaaggctggaacaagagggctccaaggcgggcgttgtcgggtagagaaaaccaagcaattcatgctgctggtggtgtggacagaactaccggagcagaaaccccgagccaagcactcttgctttctggtacccgcgtag

SEQ ID NO: 177995 - DNA, 2208 bp, synthetic construct
  misc_feature 1..2208: note = Description of Artificial Sequence: Synthetic coding sequence
  source 1..2208: mol_type = other DNA
atgtggcgggtgctgttcctgctgagcggcctgggcggcctgcggatggactcaaattttgattccctacccgtgcagatcaccgtaccggagaagatccggagtattattaaagaggggattgagtcccaggccagctacaagatcgtaattgaaggtaagccatacaccgtgaatctgatgcagaagaactttcttccacataatttccgcgtatattcctactctggaaccgggataatgaagccactcgaccaggactttcagaacttctgtcactaccaggggtatatcgaaggctacccaaaaagcgttgtgatggtgagtacctgcacaggactccggggagtgctccagtttgaaaacgtgtcctatggaatagaacccttggaatcttccgtaggattcgagcacgtgatttaccaagtgaaacacaaaaaagccgatgtgtcgctttacaacgagaaagatatagagagcagagatctgtccttcaagctccagtctgttgaaccccagcaagactttgcgaagtacatcgagatgcacgttatagtcgagaagcagctatacaatcatatggggtcggacaccaccgttgtggcacagaaagtgttccaactcattggcctcaccaacgccatttttgtctcctttaatattacaataatcctgagctctctggagctatggatagacgaaaataaaattgctactacaggtgaggcaaatgagctcctccataccttcctgaggtggaaaactagctatcttgttttgcggccacatgatgtcgccttcctcctagtataccgggagaaaagtaattacgtcggagccacttttcagggcaagatgtgcgatgccaactatgccggtggagtggtcctccatccacggaccatctctcttgagtctctagctgttatcctggctcagctcctgagcctgagtatgggcataacttacgatgacataaataagtgtcagtgttcaggcgccgtctgtatcatgaatcccgaggccattcattttagcggcgtgaagattttctcaaattgtagttttgaagactttgcgcacttcatttctaagcagaaaagccagtgtctgcacaaccaaccaaggctagacccgttcttcaagcaacaggctgtgtgcgggaacgccaagctagaggctggggaagaatgcgattgcggaactgagcaggactgtgcacttattggcgagacctgctgcgacattgccacctgccggttcaaggccggttctaactgcgccgaagggccctgctgtgagaattgcctgttcatgtccaaggagagaatgtgcagaccatcttttgaggagtgtgatttaccagagtactgcaatggcagttccgctagttgtcccgagaaccattacgtgcagaccggacatccgtgcggccttaatcagtggatatgcatcgatggggtgtgtatgagcggggacaagcaatgtactgacacctttgggaaagaagtggagtttggcccatccgagtgctatagtcacctgaactcaaagaccgatgtctccgggaactgcggaatctccgattccggctacactcagtgtgaggctgacaatctccaatgcggcaagttgatctgcaagtatgtcggcaagttcttactacaaatacccagagctacaatcatttacgctaatatctccggccacctgtgtattgctgttgagttcgcatcagaccatgccgattcccaaaagatgtggattaaagatggcacatcctgcggatctaataaggtgtgtcgcaaccagcggtgcgttagtagttcctacctcggctacgattgtacaacagacaagtgtaatgacaggggagtgtgtaacaataaaaagcactgccactgttccgccagctacttgccaccagattgtagcgtgcaaagcgacctgtggcccggcggctctatcgattcggggaacttcccccctgtggcaatccctgcccggctgccggagcggagatatatcgaaaacatataccatagcaagcccatgcgttggccctttttcctattcattccgttttttatcattttctgcgtgctgatcgctataatggtaaaggtgaactttcagaggaaaaaatggcgcacggaggattacagcagcgacgaacagccagaatctgaaagcgaaccaaagggatag

SEQ ID NO: 177996 - DNA, 2151 bp, synthetic construct
  misc_feature 1..2151: note = Description of Artificial Sequence: Synthetic coding sequence
  source 1..2151: mol_type = other DNA
atgtggcgggtgctgttcctgctgagcggcctgggcggcctgcggatggacagcaatttcgatagtctgccggtgcagattactgtgcctgaaaagatccgatctatcataaaggaaggcatcgagagccaagcatcatataaaatcgtgatagaaggaaagccctatacagtgaatctaatgcagaagaatttcctgccacacaactttcgggtctacagctattccggcaccggaatcatgaagcccctggaccaagactttcagaatttctgccactaccagggttacatcgaaggatatcccaagtccgtggtgatggtctcaacttgcactggtctgcgtggcgtactgcagttcgagaatgtttcttacgggatagaaccactggagtcctccgtgggatttgaacacgtgatctaccaggtgaaacataaaaaagctgatgtgtctctgtacaacgagaaggacattgagtccagggatctcagcttcaagctgcagtccgtcgagtacaatcatatgggcagcgataccacagtggttgctcaaaaagtgtttcagctgatagggcttacgaatgctatctttgtttcctttaacataacaatcatcttgagtagcttagagctgtggatcgacgaaaacaagatcgccacaactggggaagctaacgaactgttgcatacgttcttgcgctggaagacgtcctacctcgtcctccgtccacatgacgtggcttttttgctggtgtaccgcgaaaagagcaactatgtcggcgcaactttccagggaaagatgtgcgacgccaactatgctgggggtgtggtcttgcaccctcgcacaatctccctggaaagtcttgctgttattctggcccagttactgtccctgagcatgggaataacctatgacgatataaacaagtgtcagtgcagtggtgccgtttgtattatgaacccagaagccatccacttttcaggcgtgaagatcttttccaattgctcctttgaagacttcgctcacttcatctctaaacagaagtcgcagtgtctgcataaccagcctagacttgaccccttcttcaagcagcaagcagtatgcggcaatgccaaattagaggctggagaggaatgcgattgtggcacagagcaagactgcgccttgattggcgagacatgctgcgatatagctacctgtagattcaaggctgggtctaactgcgccgagggaccttgctgtgaaaactgcctgttcatgtctaaggagcgcatgtgccggcccagttttgaggaatgcgacctccccgagtactgtaacggctccagtgcttcctgtcctgagaaccattatgtgcagacaggacatccttgcggcttgaaccaatggatttgtatcgacggagtgtgtatgagtggggataagcagtgcaccgacacctttggcaaggaagtggagtttggtcccagtgagtgctactcacatctgaatagtaaaacggatgtctccggtaattgcgggatctccgatagtgggtacacccaatgtgaagcagataatcttcagtgtggcaagctgatctgtaaatatgtggggaagttcttgctgcagattccgcgcgccactataatctacgccaatatctccgggcatttgtgcatcgccgtggagtttgcttcagaccacgctgacagtcagaagatgtggattaaagatggcactagctgtggaagcaataaggtgtgtagaaatcaacggtgcgtgtcttccagctacctggggtatgactgcaccacagataagtgtaatgataggggggtctgcaataacaagaagcactgtcattgcagtgcctcctatctccctccagactgttccgttcagtccgacctttggccaggaggatcgattgactctggtaattttccaccagtcgccatcccagcaagactgccagagcggcggtatatcgagaacatctaccattctaagcccatgaggtggcctttcttcctcttcatcccattttttattatattctgcgtcttgattgctattatggttaaggtgaatttccagagaaagaaatggagaacggaagactattcctccgatgagcagccggaatccgaaagcgagcccaagggctag

SEQ ID NO: 177997 - DNA, 2331 bp, synthetic construct
  misc_feature 1..2331: note = Description of Artificial Sequence: Synthetic coding sequence
  source 1..2331: mol_type = other DNA
atggtgcagctgcaccaggacaccgacccccagatccccaagggccagccatgtaccttaaatagttcagaaggaggggccaggcccgccgtccctcacaccctcttctcaagtgccttagaccgctggctgcataatgacagcttcattatggccgttggagagcccctggtgcacatcagagtaactttactgttattgtggttcgggatgtttctgtctataagtggacactcccaggctagacccagccagtactttacaagtcccgaggtggtgatccctctgaaagtcatcagtcgcggacgcggagccaaggcacccggatggttaagttatagcctcagatttggggggcagagatacatcgtccacatgcgagtgaataagcttctgtttgctgcacatcttcccgtctttacttacaccgagcaacacgctctcttacaggaccagccattcatccaagatgattgctactaccatgggtacgtagaaggcgtgcccgaaagcctggtggcattatcaacatgttcgggtgggttcctgggcatgctccagattaacgatctggtatatgagataaaacctataagcgttagcgcaaccttcgagcacctggtgtacaagatcgactccgacgatactcaattcccgcccatgaggtgcggccttaccgaagaaaagatcgcccatcagatggagttgcagctatcctataatttcaccttgaagcagtcatcctttgtgggttggtggacacatcagcggtttgtggagcttgtcgtcgtagttgataacatcaggtacctgttcagccagtcaaacgccaccacagttcagcacgaggttttcaacgtggtcaatattgttgattcattttatcatcccctcgaagtggacgtgatcttgactggaattgacatctggaccgcatctaatccccttccaacatccggcgatcttgacaacgtgctggaggatttcagtatctggaaaaattacaacctcaataacagactgcagcacgatgtggctcacctattcattaaggatactcaaggaatgaaactgggcgttgcctatgttaagggcatttgccagaatcctttcaacactggcgtggatgtgtttgaggataatcgtctcgtagtgtttgctataacactcgggcacgaattgggccataatttaggtatgcagcacgatacacagtggtgcgtttgtgagctgcagtggtgtatcatgcatgcatatagaaaggtgacaacaaaattcagtaactgctcttatgcccagtattgggattccacgatatcaagtggtttatgtatacaaccacccccctatcccggaaacatattccggcttaaatactgtggcaacctggtcgtcgaagagggcgaagaatgcgactgcggcactattaggcaatgtgcaaaagacccctgttgtctcctcaattgtaccctgcatcccggagctgcgtgcgcctttggcatttgttgtaaggattgcaagttcctgccgtccgggactctctgtcgacagcaagtcggcgagtgcgaccttccagagtggtgtaatggcacctctcaccagtgtcccgatgacgtttacgttcaggatggtatctcatgtaatgtgaacgccttttgctatgaaaaaacatgtaataatcacgacattcagtgtaaggagatatttggtcaggatgccagaagcgcctcccagagctgttatcaggagatcaacactcaaggcaatcgcttcggccattgcggcatcgtcggcacaacatatgtgaaatgctggactccagacattatgtgcggcagagtgcaatgtgagaatgtgggcgtgatccctaacctgattgagcattccacagtgcagcagtttcatttaaacgacaccacctgttggggtaccgattatcatctgggcatggctattccggatatcggcgaggtaaaagacggaaccgtttgcggcccagaaaaaatctgcatcaggaagaaatgcgccagcatggtccatctgtctcaggcatgtcaacccaaaacatgcaacatgcgagggatatgcaacaataaacagcactgccattgcaatcacgagtgggctcctccttactgtaaagacaaaggctacggaggttctgccgacagcggtccaccccccaagaacaatatggagggacttaacgtgatggggaagctccgctatctatccctactgtgcctgctgccactcgttgcatttcttttgttctgcctgcacgtgttgttcaagaagcgcacgaagtcaaaagaggacgaagaagggtag

SEQ ID NO: 177998 - DNA, 2169 bp, synthetic construct
  misc_feature 1..2169: note = Description of Artificial Sequence: Synthetic coding sequence
  source 1..2169: mol_type = other DNA
atggccgtggacggcaccctggtgtacatccgggtgaccctgctgctgctctggcttggcgtgttccttagcatttccggttactgccaggcgggtccaagccagcattttacttctcctgaagtcgtgattccgctgaaagttatctctcgtgggagaagcgccaaggctcccggctggctctcttactcactgcgatttggagggcagaaacacgtggtgcatatgagggtgaaaaaactgttggtctcaagacatctgcctgtttttacttacaccgacgatcgagcgcttctggaagatcagctgttcataccagacgattgctattaccacgggtacgtggaggcagcccccgagtcgctggtggtgttttcggcatgctttggaggctttcggggggtgctgaagatctccggattgacttacgagatcgaaccaatccggcatagcgcaacttttgagcaccttgtgtacaaaatcaattctaatgagacacagtttcccgctatgcgctgcggcctaaccgagaaggaggttgcgcggcagcaactggaatttgaggaagcggaaaattccgctttggagcccaaaagtgcaggggactggtggactcatgcgtggttcctagagctggtggtcgtggtgaaccacgactttttcatctactcgcagagcaacattagcaaggttcaggaggatgtttttctggtggtgaatattgttgattcaatgtacaaacagctgggaacgtatatcattttaataggcattgaaatctggaaccagggcaacgtctttccgatgacatccattgagcaagttctgaatgatttctctcagtggaagcagataagcctatcacaactgcagcacgacgcagctcatatgtttattaaaaattcccttatctcaatccttggcctagcatacgttgctggaatttgtaggcccccaattgactgcggcgtggataatttccagggcgatacgtggtcactttttgcaaatacagttgctcatgaactcggacacacgctggggatgcagcacgacgaagagttctgcttttgtggagaacgtggctgtattatgaatacattccgcgtccccgcagagaagttcacgaactgttcatacgctgatttcatgaagactacgttgaatcaaggttcttgccttcacaatccgccacggttgggcgagatatttatgctgaaaagatgtggaaatggcgttgtggagcgtgaagagcaatgcgattgtggatctgtgcagcagtgtgaacaagatgcttgctgcttacttaactgcactctcagacctggcgccgcatgtgcatttggtctgtgctgcaaggattgtaaatttatgccgtcaggcgagctgtgtcgacaagaagtcaacgagtgcgacttaccggagtggtgtaatggcacgtctcaccagtgccccgaggacagatatgtgcaagatgggattccttgcagcgacagtgcttactgctaccagaaacgttgcaacaaccacgatcagcactgtcgggaaatttttggcaaggacgctaagagcgctagccagaactgttacaaggagattaattcccaaggaaaccgttttggacattgcggtataaacgggactacatacctgaagtgtcatatctctgacgtgttttgtgggcgagtccagtgcgagaatgtgcgcgatattcctctgctgcaagaccacttcacgcttcaacatacccatataaacggcgtcacttgttggggcatcgactaccacctgcgcatgaacatttcagacattggggaggtcaaagacggaacagtgtgtggccctggtaagatctgcatacacaagaaatgcgtgtccctgtccgttttgtcccacgtatgtctgcccgagacctgtaatatgaagggaatttgcaacaataaacatcattgtcactgtgggtatggctggtctcccccttactgccagcaccgcggatatggtggatccatcgatagtggccctgcgtccgctaagcgcggcgttttcttgcccctcattgtgataccaagcttaagcgtcctcactttcttattcaccgttggcctgctgatgtaccttcggcaatgcagcggacctaaggagacgaaagctcattcctctggctag

SEQ ID NO: 177999 - DNA, 2721 bp, synthetic construct
  misc_feature 1..2721: note = Description of Artificial Sequence: Synthetic coding sequence
  source 1..2721: mol_type = other DNA
atgcaggccgccgtggccgtgagcgtgcccttcctgctgctgtgcgtgctggggacttgcccacccgcacggtgtgggcaagccggggacgcttccctgatggagctggaaaaacggaaagagaaccgattcgtggagaggcaaagcatcgtccccctgaggttgatctaccgaagtggcggagaagacgagtcgcgccatgacgccctcgacacaagagtaagaggcgacctgggcggtccccagctgacacacgtcgaccaagcatcatttcaagttgacgccttcgggacatcttttatcctggatgtggtccttaatcatgatctgctcagttcagagtacatcgaacggcacattgagcacggcgggaagacggtggaggtgaaagggggagaacattgctactaccagggccacattcgcgggaatccagattctttcgttgctctgtcgacgtgccacggcttacatggtatgttttatgacggcaaccacacttacttaattgaacctgaagagaatgacacgacacaggaagacttccactttcactctgtctacaaatccagactcttcgagttctctcttgatgacttaccctctgaattccaacaggtgaacattaccccctcaaagttcatcttgaagcccaggccaaaacgcagcaaacgacagttgcgaaggtatccacggaacgtggaggaagaaaccaagtacattgagcttatgatcgtgaatgatcacctcatgttcaagaagcatcgcctgtccgtcgtacatactaatacttacgccaagtcagttgtgaacatggcagacttgatatataaagaccagcttaagactcgtatagtactggttgccatggagacatgggccacagacaacaaattcgcaatcagtgagaacccactcatcacccttagagaattcatgaagtaccggagggatttcatcaaggagaagtccgatgccgtccatttgtttagtggctcgcaatttgagtcatcgagatctggcgccgcatacatcggcggcatatgctcgctgctgaaggggggcggagttaatgagttcggtaaaacagacctgatggccgtcacacttgcccagagtctggcccataatattggtattatctccgataagcggaagcttgcgtctggcgagtgcaagtgtgaagatacgtggtcaggatgtatcatgggtgacaccggatactatctgcccaaaaaattcactcaatgcaacatcgaggagtatcacgacttcctgaacagcggcggtggcgcctgcctgtttaataaaccctcgaagttacttgacccaccagagtgtggtaatggatttatcgagaccggcgaagagtgcgattgcggcaccccggcagaatgcgtgttagagggagccgagtgctgtaaaaaatgcaccctcactcaggacagccaatgctccgatggactgtgttgcaaaaaatgtaagttccagccaatgggcacggtctgtcgtgaagccgttaatgactgcgatatccgggagacctgttctggcaacagcagccagtgcgctccaaacatccacaagatggatggctacagttgcgatggtgtacaggggatctgctttgggggtaggtgtaaaacacgtgatagacagtgcaaatacatttgggggcagaaggtgacagcttcggacaagtactgctacgaaaaacttaatatcgaaggcacagaaaagggcaactgcggaaaagacaaggacacgtggatccagtgcaataaacgggacgtgttatgtggctacttactttgcacaaatatcggaaatattccccgactgggtgagctggacggggaaatcacgagtaccctggtcgtccagcagggacgtacgctcaactgctccggtggccacgttaaactggaggaagatgtggacttaggatacgtcgaggacggcacgccatgtgggccgcagatgatgtgccttgagcaccgatgcctcccggttgcaagcttcaatttcagcacctgcctgagtagcaaagagggaacaatctgtagtgggaacggcgtatgttccaacgaactgaaatgtgtctgcaataggcattggatcggttcggattgcaatacctacttccctcacaacgacgatgccaagaccggaattaccctttccggaaacggtgtggccgggaccaatattatcatcggcatcatcgccggtactatcctcgtgctggctctgatccttggcataaccgcctggggatacaaaaattaccgcgagcagcggcagctgcctcagggagattatgttaaaaaacctggagacggcgactctttttactcagacataccaccaggtgtatctacaaatagtgcaagctccagtaaaaagcgttcaaatggcttaagccatagctggagcgagcgcatccccgatacaaaacatatcagtgacatctgcgaaaacggacggcccagatccaattcctggcagggcaacttgggaggtaataagaagaaaatacggggcaagcgattcagaccgcgaagcaactcaacagaaacccttagtcccgccaaatcaccctcctctagtacaggctccatcgccagcagccgtaaatacccttatcccatgccccctctgccagacgaagacaaaaaagtgaataggcagtctgctcggctgtgggagaccagtatttag

SEQ ID NO: 178000 - DNA, 2700 bp, synthetic construct
  misc_feature 1..2700: note = Description of Artificial Sequence: Synthetic coding sequence
  source 1..2700: mol_type = other DNA
atgcaggccgccgtggccgtgagcgtgcccttcctgctgctgtgcgtcctgggaacctgtccccccgccaggtgcgggcaagccggtgacgccagcctgatggaattggaaaaacgcaaggagaatcgattcgtcgaaagacagtccatcgtccccctgcgtctcatctaccggagcgggggagaagacgaatcgcggcacgatgccctcgatacacgagtacgaggcgatctgggggggccacaattgacacatgtcgatcaggcaagtttccaggtggatgcttttggaacctcattcatcctggacgtagtgctgaatcacgaccttctcagctccgaatacattgagcgtcatatagaacacgggggcaagactgttgaggtgaagggaggagagcattgttactaccagggacatattaggggcaaccccgacagctttgtggctcttagcacttgccacggattgcacggaatgttctacgatggtaatcatacgtacctgattgagccagaagaaaatgatacaacacaggaggacttccacttccattccgtgtacaagtctagattgtttgagttttccttggacgacctccctagcgagtttcagcaggttaacatcactccttctaaatttatcctgaagccacgacccaagaggtcgaaaagacaactgagaaggtacccacggaacgttgaggaagagaccaagtatatcgaactgatgatcgtaaatgaccatctcatgttcaaaaagcaccgcctgagcgttgttcacacaaatacctacgctaagtccgtcgtgaacatggccgacttaatctataaggaccaactgaagacccgtatagtgctagttgccatggaaacttgggccactgacaacaaatttgccattagtgagaatcctctgatcacgttgcgcgagtttatgaagtaccggcgtgatttcatcaaagaaaaaagcgatgcagtacatttattctctggcagccagttcgagtctagccgctctggcgccgcctatatcggtgggatctgctctctgctcaaaggagggggcgtcaacgaatttggcaagactgatctgatggcagttaccctggcgcaatccctggcccacaacattgggatcataagtgacaaacgaaagctagcctcaggagagtgtaaatgcgaggatacttggagtggttgcataatgggggatacaggatactatctcccgaaaaagttcacccagtgcaacattgaggaatatcacgactttcttaacagcgggggcggtgcctgcctgttcaacaaaccctctaaactgttggatcctccagagtgcggaaatggtttcatcgagacaggcgaggaatgcgactgcgggacccccgcagagtgtgtccttgagggcgctgagtgttgcaaaaagtgtaccctgacccaggactcccagtgctcagatggcctgtgctgcaaaaagtgtaagtttcaacccatgggcactgtgtgccgggaggccgttaatgattgcgacatcagggaaacatgctcaggcaattcgagccagtgcgcgccgaacatccataagatggacggatactcctgcgacggagtgcagggaatctgctttggcggccgttgcaaaacccgtgacaggcagtgtaagtacatttggggacagaaggtgactgccagcgacaaatactgttatgaaaagctgaatatcgaggggaccgagaaaggaaattgtgggaaggataaagatacctggattcaatgtaacaagcgagatgtcctttgcggctatttgctgtgtactaatattggaaatatccccagactgggcgagttagacggcgagatcacctctactcttgtcgtgcaacaggggcgtaccttgaattgcagtgggggccacgtgaaactggaggaggatgtggatctagggtatgtagaagatgggactccgtgtggcccccagatgatgtgcctggagcataggtgccttcccgtggcttcttttaacttttctacgtgcttgtcaagcaaggaaggcactatatgctctggaaatggagtttgcagtaacgaactgaagtgcgtatgtaacagacactggatcggcagtgattgcaatacatacttcccccacaacgatgatgccaaaacaggcatcaccctgtcaggcaatggagtagctggcacaaatattatcattgggataatcgctggcacaattctggttttagctctgatcctagggattactgcttgggggtacaacaatatcttcaattttagaagtaatggtctttcccatagctggtccgagagaattccagatacaaagcacattagtgacatttgtgagaatgggcgtccccgcagtaattcttggcagggcaacctgggcggtaacaaaaagaagatccgggggaaacgatttcggccaaggtcaaattccaccgaatacctgaatccgtggttcaaaagagattataatgtagctaaatgggtggaggatgtgaacaagaatactgaaggcccctattttagaaccttatcgcccgcaaagagtccgtcctccagcaccggcagtatcgcaagttcaaggaagtatccctaccctatgccaccactgcccgacgaagataaaaaggtcaatcgccagtcagccagactctgggagacatctatatag

SEQ ID NO: 178001 - DNA, 2580 bp, synthetic construct
  misc_feature 1..2580: note = Description of Artificial Sequence: Synthetic coding sequence
  source 1..2580: mol_type = other DNA
atgcaggccgccgtggccgtgagcgtgcccttcctgctgctgtgcgtactcggaacatgcccaccggcgcgatgcggccaagccggtgacgcatctttgatggaactggagaagcgcaaagaaaaccgatttgtggagcgacagagcatcgtgcctctccggcttatatatcgcagcggcggagaggacgaatctaggcacgacgctctggacacccgggtgagaggagatctgggaggtccacagctgacccacgtcgaccaggcctcttttcaagtggatgcgtttggaacctccttcattctggacgtggtgctcaaccacgatctgctcagcagcgaatacatagagcgacatatagaacatggcggaaaaacagtggaagtcaaaggcggcgaacactgctactatcaggggcatatccgaggcaaccctgatagcttcgtggcactgagcacttgccatgggttacacggcatgttttatgatggtaatcacacttatctgatagagcctgaggagaacgacactacgcaggaagacttccattttcattcagtttacaagagtcgcctattcgagtttagtttagatgacctgccgagtgagtttcagcaagtgaatatcacaccttccaaatttatacttaaaccacggcccaagagatccaaacgtcagctgcggcgatatccccggaacgtagaggaggagacaaaatatatcgagctcatgatcgtcaatgaccatttgatgttcaagaagcaccgcctgagtgtcgttcacacgaatacttatgcaaaaagtgtcgtcaacatggctgatctgatatacaaggaccagctgaaaacccggattgttctggtggccatggaaacatgggccacagataataagttcgctatcagcgagaatcctctgatcaccctgagagaatttatgaaataccgccgtgacttcatcaaagagaaatctgatgcagttcacctattctcagggagccagttcgaatcatcaagaagcggagcagcctatatagggggcatctgtagtctgctcaaaggaggaggggtcaatgagttcggcaaaacggacttgatggccgtaacgctggctcagagtctggcccataacattgggattattagcgataaacgaaagctcgcctccggcgagtgcaaatgtgaggatacgtggtctggttgcatcatgggtgatacgggttattacctgcccaagaagtttacacaatgtaatatcgaggagtatcacgacttcctgaattcaggaggaggcgcttgcctattcaataagccgagtaaattgcttgaccccccagagtgtggcaatggttttatagaaacaggagaagagtgcgattgcggaactcctgctgaatgtgtcctggagggagcagagtgttgcaaaaagtgcaccctgacgcaggattcacagtgttctgacggcctgtgttgcaagaagtgcaaattccagcctatgggtaccgtgtgtagagaagccgtgaacgactgcgatattcgggagacttgcagcggtaattcatcgcagtgcgcccccaacattcacaaaatggacggttactcatgcgatggagtccagggtatctgcttcggtggcaggtgcaaaactcgcgaccgacaatgcaagtacatctggggacagaaagtgaccgcttcagataagtactgctatgaaaagctcaacattgaaggcactgagaagggcaattgtggaaaagacaaagatacctggattcagtgcaacaaaagggatgtgttatgtgggtacctgctctgtacgaatatcgggaatattcctcggctcggagagctggatggcgagatcactagcactttagtggtgcagcagggccgaaccctcaactgcagcggcgggcatgtaaaattggaagaagacgtcgatctgggttacgtcgaggatggtacgccctgcggaccacaaatgatgtgcctcgaacaccggtgcttgcccgtagcctccttcaacttcagtacatgcctctccagcaaggagggcacaatttgttctggcaacggcgtgtgtagtaacgaattaaagtgtgtctgcaatcggcattggattgggagtgactgtaacacatacttcccacacaatgatgacgctaaaacaggcatcacgctgagtggaaatggcgtcgccggcactaacattatcataggtatcatcgctggcacgatcctcgtgctcgcccttattctgggaattactgcatggggctacaagaactatagagaacagaggcagcttccgcagggggactacgtgaagaagccaggggacggcgattccttttattccgacatccctccaggcgtctctaccaactctgcatcctctagcaaaaaacgctccaacggcctgtctcactcttggtcagagcggattcccgatactaagcatatcagcgatatttgcgagaatggaaggccacggtccaatagctggcagggtaatctcggtgggaacaagaaaaagatccgtggtaagcgcttccggcccaggtccaattccaccgagtag

SEQ ID NO: 178002 - DNA, 2613 bp, synthetic construct
  misc_feature 1..2613: note = Description of Artificial Sequence: Synthetic coding sequence
  source 1..2613: mol_type = other DNA
atgcaggccgccgtggccgtgagcgtgcccttcctgctgctgtgcgtgctgggcacgtgccctccagctaggtgtgggcaggcaggggatgccagcctcatggaactggagaagcgcaaagagaatcgatttgtggaacggcagagcatcgtgcctctgcggctgatatacagatcagggggggaggacgagtcccgccacgacgccctagacacgcgggtgcggggggacctgggtggcccccagctcacacacgtagatcaggctagctttcaggtggacgcatttggaactagctttattctcgacgtggtgctgaaccatgatttgttaagcagcgaatacatcgagagacatatcgagcatggggggaaaacagttgaagtgaagggtggcgagcactgttactaccagggtcatatccggggaaatccagattcctttgtggctctgagtacatgtcatggacttcacgggatgttctatgatggaaatcatacatatctgatcgaaccagaggagaacgacacaacccaggaagatttccacttccattctgtgtacaagtctagactgttcgagttttcactggatgacctccctagtgaatttcagcaggtaaatattacaccttcaaagttcattctgaagccacgaccaaagcggagtaagagacagttaaggcggtacccgaggaacgtagaggaggaaacgaagtatatcgaattaatgattgtgaacgaccatctcatgttcaagaaacacaggttgtcagtggtgcacacaaacacgtacgctaagagtgtggtgaacatggccgatcttatctacaaagatcagctgaaaactcgaattgtcttagtggcaatggagacatgggccaccgataacaagtttgctatatcagaaaaccctcttattaccctgcgcgagtttatgaaataccggagggatttcataaaggagaagtccgatgcggtccacctgttcagcgggagccagttcgaaagctcccggagcggggctgcttacatcggcgggatttgttccttgctgaagggaggaggagtgaatgaatttggtaagaccgatctgatggccgttaccctggctcagagcctagctcataacatcggcatcattagcgataagaggaagctggccagtggcgagtgtaagtgcgaagacacttggtctggatgcattatgggtgatactgggtattatctgcctaagaagtttacccaatgtaatatcgaggagtatcacgactttttgaatagcggagggggcgcttgcttgtttaacaagccatccaagttgctggatcccccagaatgcggtaacggatttatcgagactggcgaagaatgcgattgcggcacgcctgcggaatgcgtgctggaaggcgcagagtgttgcaaaaagtgcactctaactcaggactcacagtgttcagatggactgtgttgcaaaaagtgtaagtttcagcctatggggactgtgtgtagagaagcagtaaatgactgtgatattcgtgaaacctgtagtggaaactcatcgcagtgcgccccaaacatccacaaaatggatggttactcgtgtgacggagtacagggtatttgctttggagggcggtgcaaaactcgtgatcgccagtgcaagtacatctgggggcaaaaggtgacagcgtctgataagtactgttacgagaaactgaacattgagggtaccgaaaaaggcaattgcgggaaggataaggacacctggattcagtgcaacaagagggatgtgctatgcgggtatctcttgtgcactaatattggaaacatcccccgcctcggcgagctcgatggggaaatcacaagtactttagtggtccagcagggccgcacccttaactgttccggcgggcacgttaaacttgaggaagacgttgacctgggatatgttgaggatggaacaccatgcggccctcagatgatgtgcctcgaacatcgttgtctgcccgtggcctcattcaatttctctacctgtctctcctctaaggaagggaccatatgctccggtaacggcgtttgcagtaatgaactgaaatgcgtctgcaacaggcactggattggctctgattgcaatacctatttcccccataatgacgatgccaagacaggtatcaccctctcaggaaacggagtggctggcaccaacatcatcatcggcattattgctgggaccatcttggtgctcgccctgatcctcgggatcactgcttggggctacaaaaactacagggaacaaaggtcaaacggactctcacattcttggtcagagcgaatcccagacaccaagcacattagtgacatttgcgaaaacgggaggccacgatccaacagttggcagggaaatctcggcggaaacaagaaaaagatcaggggaaaaagatttagaccccggtccaactcaacagaaacactctcacccgcaaaaagtccgtcttccagtaccgggtctatcgctagcagcaggaagtacccttaccccatgccccccctacccgatgaggacaagaaggtgaataggcagtctgccagactatgggaaacgtctatttag

SEQ ID NO: 178003 - DNA, 2700 bp, synthetic construct
  misc_feature 1..2700: note = Description of Artificial Sequence: Synthetic coding sequence
  source 1..2700: mol_type = other DNA
atgcaggccgccgtggccgtgagcgtgcccttcctgctgctgtgcgtcctaggaacctgcccccccgccagatgtgggcaggcaggtgacgcgagcctcatggagctggagaagcgtaaggaaaaccgctttgttgaacgccagagcatagttcctctccgcctgatctacaggtcagggggggaggatgaatcaaggcacgacgcattagacacgagagttcgaggggacctgggtggaccacagctgacgcacgtggaccaggctagctttcaggtggatgcatttgggacgtcttttatcttggacgttgtgctgaatcatgacctactctcctccgagtacatcgagcgccacatagagcacggtggcaaaactgtcgaggtcaaaggaggagaacactgctattatcagggtcacatcagggggaacccagatagtttcgttgccctgtctacatgtcacgggctgcacggtatgttttacgacgggaaccacacctacctgatagagcctgaagagaatgatactacacaggaggactttcactttcactccgtgtataagtctaggttattcgaattttctttagacgatctgcccagtgaatttcaacaggtgaacataactccatccaagtttattctgaaacctaggcccaagagaagcaagcgtcagttgcgcagataccctaggaacgttgaggaagagaccaagtacattgagctcatgatcgtgaacgaccatcttatgtttaagaaacatcggctttctgtggtgcacacaaacacttacgccaaatcagtggttaatatggcagacctcatttacaaagaccagctcaagacccgcatcgtgctcgtggccatggagacatgggcgaccgataacaaatttgctatttccgaaaaccctctcatcactctccgtgaattcatgaagtaccgcagggattttatcaaggaaaagtccgatgctgtccacttattctctgggtcacagttcgaaagcagccgctctggagcagcctacattgggggaatctgtagtcttctcaagggcggtggcgtcaacgaattcggaaagaccgatcttatggccgtcacgctcgctcaatctctggcccacaatattgggattatttccgataagaggaaactcgcttccggggagtgcaaatgtgaggacacctggagtggatgcataatgggtgacactggctactacttgccaaaaaagtttacccagtgtaacatcgaggaataccatgattttctgaacagtggcgggggtgcgtgcctgttcaataagccttctaaactgcttgaccccccagagtgcggcaatggattcatagagacaggagaggaatgtgactgcggtaccccagcggaatgtgttttagaaggggcggaatgctgcaaaaaatgtacactgacacaagattcccaatgctccgacggactgtgttgcaagaagtgtaagtttcaacccatgggcacagtctgcagagaggccgtaaacgactgcgatattcgcgaaacttgctcaggaaattcgtcacagtgcgcccctaacatccacaagatggacggttattcctgcgacggggttcaaggtatctgcttcggtggtaggtgtaaaacaagggatagacagtgtaaatacatctggggccaaaaagtcaccgccagcgataaatactgctacgaaaagctcaacattgaggggactgaaaagggcaattgtgggaaggacaaggacacctggatacaatgcaacaagcgcgacgtgctctgtggctatctgttatgtacaaatataggtaatatcccgcgtctaggggagctggatggcgagattacatccaccctggtggtacagcaaggccgcacactcaactgctctgggggacacgttaagctcgaagaggatgtggacctcggatatgtcgaggatggtaccccttgcggaccccagatgatgtgcctcgaacatagatgtctccccgtagctagcttcaatttttccacctgtctgagctctaaggaagggacaatttgcagtggcaatggcgtttgttcaaacgagctcaagtgcgtgtgcaacagacactggataggttcagactgcaatacttattttccgcacaatgacgatgccaaaaccgggattaccttgtctgggaacggcgtggccgggacaaacatcatcattggaatcatcgccggcactattctggttttggccctcattctggggatcacagcttggggttacaagaactatcgggaacaaagaagtaacgggctgtcccattcctggtcggagcgcattcccgataccaagcatattagcgacatatgtgaaaacggtagaccacgcagcaactcttggcagggcaacctcggtgggaataaaaaaaagattaggggaaaacgatttagacctcgttcaaactctacagaatacctaaacccatggtttaagcgagattataatgtggcaaagtgggtggaggacgtgaataagaataccgagggaccgtatttcagaaccctcagcccggccaagtctccatcatccagcactggcagtatcgcttcatccagaaagtatccttaccctatgccccccctgcccgacgaggataaaaaggtcaacagacagtctgccaggctctgggagacctctatctag

SEQ ID NO: 178004 - DNA, 2328 bp, synthetic construct
  misc_feature 1..2328: note = Description of Artificial Sequence: Synthetic coding sequence
  source 1..2328: mol_type = other DNA
atgctgcagggcctgctgcccgtgagcctgctgctgagcgtggccgtcagtgccattaaggagctgcctggggtcaaaaaatatgaagtcgtgtatccaatccggctgcaccctctgcacaagagagaagccaaagaaccagagcagcaggaacaattcgaaactgagctgaagtacaagatgacgatcaacgggaaaattgccgtcctttaccttaagaaaaataaaaatctcctggctcctggatatacggagacttattacaattctacagggaaagagattaccacgagcccccaaattatggatgactgttattaccagggccacattttgaacgaaaaggtgtcagatgcttcaatcagcacatgccggggactgcgcggctactttagccagggcgaccagaggtactttattgaacctttgagccccatacaccgcgacggacaggagcacgccctgtttaaatataacccggacgagaaaaactacgacagcacctgtggtatggatggcgtcttatgggcgcacgatctgcagcagaatatagcccttccggccacgaaactggtgaagttgaaggacagaaaggtacaagagcatgaaaagtacattgaatactacttggttctcgataacggggagtttaagcggtataacgaaaatcaggacgaaatccggaagagagtgtttgaaatggccaattatgtaaacatgttgtacaagaagctaaatacccacgtggccttggtggggatggagatatggactgataaggataaaataaagatcactcctaatgcatccttcaccctcgaaaacttctcgaagtggcgggggtctgtgctgagcaggcgaaagcgacatgacattgcccagctcataaccgccacagagttagcaggcacgaccgtgggcctcgccttcatgtctacaatgtgtagcccctatagtgtcggagtcgtccaggaccacagcgacaacttactacgcgtggctgggacaatggcccacgaaatgggccacaacttcggcatgtttcacgatgattactcttgcaagtgccctagcacaatctgcgtcatggacaaggctctcagtttttatatccccaccgacttctcttcctgctcccgcttgtcctatgataaatttttcgaagataaactttctaactgcttatttaacgcccccttgcccactgatatcatttccactcctatttgcgggaaccagctggttgagatgggcgaagattgcgactgcgggacaagtgaagaatgtacaaacatttgttgcgatgccaagacttgtaagatcaaagcaacctttcaatgcgcgcttggagagtgttgtgagaagtgtcagtttaaaaaggctggcatggtctgtcgtcccgcgaaagacgagtgcgacctgcccgaaatgtgcaatggtaagtctggaaattgcccggacgatcgcttccaggtcaatggcttcccctgtcatcatggcaaaggacactgcctgatgggcacgtgcccaaccctacaagagcaatgcaccgagctttggggcccggggactgaagtcgcggacaagagctgttacaatcgcaacgagggcggcagtaagtatgggtattgccgcagagtggatgacacgctgatcccctgcaaggctaatgatactatgtgtggaaagctgttttgccaaggcggcagtgacaacttaccctggaagggacgcatcgtgacattccttacatgtaaaacctttgatccggaggatactagccaagagatcggcatggtcgcaaatgggacgaagtgcggcgacaataaagtttgcattaatgccgagtgcgtggatatagagaaggcttacaaatccacaaactgctcttccaagtgtaaggggcacgccgtctgcgaccacgagttacagtgtcagtgcgaggagggctggatccccccggactgtgacgatagttcagttgtttttcactttagcattgtggtgggggtgctgtttcctatggccgtgatattcgtcgtcgtggccatggtaattagacatcagagcagtcgtgagaaacagaagaaggatcaacgtcccctttccacaacaggcacaagacctcacaaacagaagaggaagccccaaatggtcaaggcagtgcagccgcaggaaatgagccagatgaagcctcacgtatacgatctacctgtcgaaggtaacgaacctccagcaagctttcataaagacacaaacgccttacctcctaccgtgtttaaggacaatcccgtatctactcctaaggattccaaccccaaagcgtag

SEQ ID NO: 178005 - DNA, 1452 bp, synthetic construct
  misc_feature 1..1452: note = Description of Artificial Sequence: Synthetic coding sequence
  source 1..1452: mol_type = other DNA
atggagatctggaccgacaaggacaagatcaagatcacccccaacgcatcttttacccttgaaaacttttccaagtggcgcgggagcgtcctctcacggaggaaaaggcatgacatcgctcaattgatcaccgcaaccgagctcgccggcaccaccgtggggcttgctttcatgagtacaatgtgtagcccatattcggtgggcgtcgttcaggatcattccgacaatctcctgcgtgttgcaggaaccatggcccatgaaatgggtcacaacttcggaatgtttcatgacgactactcatgtaagtgtccgagcaccatctgtgtgatggacaaggcactgagtttttacatacccacagatttcagttcatgttctagactttcatatgacaagttctttgaggacaaactcagtaattgtctcttcaatgcgcctctgcctaccgacatcatatcgacacccatttgtggcaatcagctggtagagatgggggaggactgtgactgcggaacctcagaggagtgtaccaatatttgttgcgacgccaaaacctgcaagataaaggcgaccttccagtgcgcacttggtgaatgttgcgaaaagtgccaattcaaaaaggccggtatggtgtgccgccccgctaaggatgagtgtgatctcccggagatgtgcaacgggaagtccggcaattgcccggatgaccgattccaggtcaatggattcccgtgtcaccacggcaaaggtcactgtctcatgggtacatgtcctacactccaggagcagtgcactgaattgtgggggccgggtacagaggtggccgacaaatcttgttataatagaaacgaggggggaagcaaatacggatactgtaggcgagtggatgatacattgattccttgtaaagcaaatgatactatgtgtggcaaactgttttgccagggcggctcggataatctgccctggaaggggcgcatcgtaactttcctcacatgcaagaccttcgaccctgaggatacctcacaggagattggcatggtagctaatggcaccaagtgcggcgataacaaggtgtgtataaatgcagagtgtgtcgatatcgagaaagcatacaaatctacaaactgtagctctaagtgtaagggccacgctgtgtgcgatcacgaactgcagtgccagtgtgaggaaggttggattcctccggactgtgacgactcgagcgtggttttccggcgactgcttcactgtggttggggagccgtgccaaacggtgggcatttctgtgggggctgttatgggaatcctgcccccgaactgcagagaaaggccgaggaaaggagcgaagctactatctaccactggcatcaagctacccagaccgaagaggagacccccgacggcaaaggttgctcaactccaagagacgagagtgatgaggcgccatgtgtatag

SEQ ID NO: 178006 - DNA, 1623 bp, synthetic construct
  misc_feature 1..1623: note = Description of Artificial Sequence: Synthetic coding sequence
  source 1..1623: mol_type = other DNA
atgctgcagggcctgctgcccgtgagcctgctgctgagcgtggccgtgtcagctataaaggagctccccggtgtcaagaagtacgaggtcgtttatcccatcagactccaccctctgcacaaacgcgaggccaaagaacccgaacaacaggagcagtttgagaccgaactgaaatacaagatgaccatcaacggaaaaatcgctgtgttgtacttgaagaagaataagaacttgcttgcacctgggtacacagagacctactacaattccacggggaaagaaattaccacaagcccgcagattatggatgactgctactatcagggacatatcctgaacgaaaaagtctcggacgcctctattagcacttgccgcggcctgagagggtacttcagccagggtgatcagcgctatttcatcgagcctctgtcccctatccatcgagacgggcaggaacacgctctcttcaagtacaatccagacgaaaagaactacgacagcacatgcgggatggatggagtgctctgggcacacgacctacaacagaatattgctctcccggcgaccaaacttgtgaagttgaaggataggaaggtccaagagcatgagaaatacattgaatattacttagtacttgacaacggggaattcaaacgctataacgagaaccaagatgaaatccggaagcgggtgtttgaaatggctaattacgttaacatgctgtataagaagctgaacacacacgtggccctggtcggaatggagatctggaccgacaaggacaaaattaagataactcctaacgcctcctttaccctggaaaacttcagcaagtggagaggaagcgtgctttcgagacgcaaaagacacgacatagcacagctgattacggccacagagcttgctggcaccaccgtgggactagcgtttatgagcaccatgtgttctccttattccgtgggggtggtgcaggaccatagcgataatctgctgcgggtcgccggcacaatggctcacgagatgggtcataatttcggtatgttccacgacgattattcctgcaaatgcccatcaacaatctgtgtgatggacaaggccctgtcattctatatccctacggatttctcctcttgttcccgattaagttacgacaaattttttgaagacaagttgtccaattgtctgtttaatgcccccctaccgaccgacatcatctccacacctatttgtgggaatcagttggtggagatgggggaagactgtgactgcggaacaagcgaagagtgcacaaacatctgttgtgacgctaaaacgtgtaagatcaaggctacatttcagtgcgccctgggagaatgctgtgagaagtgtcagtttaaaaaggccggaatggtttgtcgcccagctaaagacgaatgcgatctgcccgaaatgtgtaacggtaagagcggcaattgtccagatgatcgctttcaggtgaatgggttcccctgccaccatggcaaggggcactgcctgatggggacatgtccaaccctgcaggaacaatgcacagagctctggggtcccgggcgacgcacgaatcctttcccctgcgcttgtgctaaggagaaccactttaggtag

SEQ ID NO: 178007 - DNA, 924 bp, synthetic construct
  misc_feature 1..924: note = Description of Artificial Sequence: Synthetic coding sequence
  source 1..924: mol_type = other DNA
atggccaactacgtgaacatgctgtacaagaagctgaacacccacgtggcccttgtcggtatggagatttggacagataaagataagatcaaaattacccccaatgcgagtttcaccctggaaaattttagtaagtggcggggatctgtactgtcccggcgcaagagacacgatatcgctcagctgatcaccgccacagagctggcagggaccaccgtcggcctggcatttatgagtactatgtgctcaccatactcggtgggcgtggtccaggaccatagcgacaacctcctgagagtcgctgggacaatggctcacgagatgggacacaactttggaatgttccatgatgactattcgtgtaaatgtccatcaactatatgcgtgatggacaaggctctgtcattctacattccaaccgactttagcagttgttcaaggctctcttatgataagttcttcgaggacaagctgtcaaactgtttgttcaacgcgcccttgccaacggatataatatccaccccaatctgcggaaaccaattagtggaaatgggggaggattgtgattgtgggacgtctgaggaatgcacaaatatctgttgtgacgccaaaacttgcaagatcaaggcgacattccaatgcgcgttgggggaatgctgcgagaaatgtcagtttaagaaagcaggaatggtctgccggcccgccaaggacgagtgcgatctgcctgagatgtgcaatgggaagagcggaaattgtccagacgaccgattccaggtcaatggatttccatgccatcacggaaagggccactgtctgatggggacgtgcccgacactccaagagcaatgcaccgagctctggggacctgggaggaggacaaatcctttcccatgtgcctgcgcgaaagagaatcactttcggtag

SEQ ID NO: 178008 - DNA, 2463 bp, synthetic construct
  misc_feature 1..2463: note = Description of Artificial Sequence: Synthetic coding sequence
  source 1..2463: mol_type = other DNA
atgaagatgctgctgctgctgcactgcctgggcgtgttcctgagctgcagtggccacatccaggatgaacacccccagtatcacagtccaccagatgtggtcatcccagtgagaataactggcactactcgtggcatgacgccaccaggctggttatcttatatcctgccttttggtggtcagaagcacatcatccatataaaggtgaaaaagcttctcttcagtaagcatcttcccgtttttacctacacagatcaaggagctatccttgaggatcaaccattcgttcagaacaattgttactaccacggctacgtcgagggagaccctgaatctctggtgagtttgagcacgtgtttcgggggattccaaggcattttacagataaacgatttcgcctacgagatcaaaccgcttgctttctctacaacattcgagcacttagtgtataaaatggatagcgaggagaaacagttttcaacaatgagaagtgggtttatgcagaatgagataacctgccgcatggaatttgaggaaattgacaattcaacccagaagcagtccagctacgtgggctggtggattcacttccgaatcgtcgaaattgtagtagtgatagacaactacttatatataaggtatgaaaggaatgattctaagcttttggaagacctgtacgtgatcgtgaacattgttgattcaatactcgatgttatcggtgtgaaggtccttctcttcggacttgagatctggaccaataaaaatcttattgtcgtggacgatgttcgcaaatccgtgcacttatactgtaagtggaagtctgaaaatattactccgcgaatgcagcatgacaccagccacttgtttaccacactcggactccgtggactgagcggaattggggctttcagggggatgtgcaccccacatcggtcttgcgccatcgtgacatttatgaacaagaccttaggaacctttagcatcgcagtggcacaccacctgggtcacaatcttggaatgaaccatgatgaggatacttgccggtgctcacagccgcgttgtattatgcatgaaggtaatcctcctatcactaagttttctaactgctcatacggggacttctgggagtacaccgtggagcggaccaaatgtctgctagagactgtgcacaccaaagacattttcaatgtgaaaaggtgcggtaatggagtggtcgaggagggagaagagtgcgactgcggccctcttaagcattgtgccaaagacccatgttgtctctctaattgcactctcaccgacggctctacctgtgcattcggtctttgctgcaaggattgcaaatttctacctagcggcaaagtgtgccgaaaagaggttaatgagtgtgacctgccagagtggtgtaatgggacttcccacaaatgtcccgacgatttttatgttgaggatggtattccttgcaaagaaagaggctattgttacgaaaagtcttgccatgacagaaacgaacagtgtcgaagaattttcggagccggtgccaatactgcgtccgagacgtgctacaaagaattgaataccctgggcgatagggttggccattgcggcatcaagaacgccacatatatcaagtgtaacatcagtgacgtgcagtgcggtcgcatccagtgtgaaaatgtgacagagatccccaacatgagcgaccacacgacagtccattgggcccgattcaatgacatcatgtgttggtcgaccgactaccatctgggcatgaaggggcctgacattggcgaggttaaggatgggactgaatgcggcattgaccatatctgtatccaccgacactgtgtccacataaccatcctgaatagtaattgctcccctgctttttgtaacaaacgggggatctgtaataataaacaccactgccactgcaactacctgtgggacccacctaactgtctgatcaaggggtacggtggtagtgtggattcaggaccgcctcctaaaaggaagaagaaaaaaaagttttgctatctgtgcattctgcttctgatcgtcctcttcatattgctgtgctgtctctaccgtctctgtaagaagtccaaacccatcaagaagcagcaggatgtgcagactccctccgccaaagaggaggagaagattcagcggcggccacacgaattgccaccccagtcacagccctgggtcatgccatcccagtcacaacctcctgtcactccatctcagagccatccgcaggtcatgcccagccagagccagccccctgttacaccctctcagtctcagcccagagtgatgcccagccagtctcaaccaccagtgatgccttctcagagccacccacagctaacaccatcacagtctcagccccctgtgacaccgagccagcggcaaccccaacttatgccatcgcagtctcagccaccagtaaccccttcttag

SEQ ID NO: 178009 - DNA, 2463 bp, synthetic construct
  misc_feature 1..2463: note = Description of Artificial Sequence: Synthetic coding sequence
  source 1..2463: mol_type = other DNA
atgaagatgctgctgctgctgcactgcctgggcgtgttcctgagctgctctggccatattcaggatgagcatccacagtaccactcaccgcccgacgtcgtcattcccgtacggattaccggcacgaccagaggtatgacacctccagggtggctgtcatatatactgccttttggggggcagaagcacatcattcatatcaaagttaaaaagctcctatttagtaaacacctgcccgtgttcacatacaccgatcagggtgcgattttagaggatcaaccattcgtgcagaataactgttactatcatgggtacgtagagggggatcccgagagcctcgtttcattgagcacgtgttttggaggcttccaggggatccttcaaattaatgacttcgcctacgaaattaaacctctggccttctcaacaacatttgaacatctcgtctataaaatggatagtgaggagaagcagttctctacgatgagatctggctttatgcagaacgagataacctgcaggatggaatttgaagaaatcgataattctacccagaaacagtcatcctacgtaggatggtggatacacttccgcatcgtggagatcgtggtggttattgataactacttgtacatacggtacgaacggaatgactcaaaacttcttgaagacctgtacgttatcgttaatatcgtcgatagtatccttgacgtcataggggtgaaggtgctcctgttcggtctcgagatctggactaataaaaatctcatcgttgtggatgacgtgaggaagtcggtgcacctgtactgtaaatggaagagcgaaaacatcacccccaggatgcaacatgacacctctcacttgtttactacccttggtctcagagggttgtccggaatcggagcctttcgtggcatgtgcactcctcaccggtcttgcgcgattgttacgttcatgaataaaacccttggtacattttctatcgctgtggcgcatcatttaggacataatctggggatgaaccacgacgaagacacctgcaggtgcagccagccgcgctgtatcatgcatgaagggaacccgccgataactaagttctccaattgctcctacggcgatttttgggagtatacagtcgagcgcactaagtgcttgcttgagacggttcatacgaaggatattttcaacgtgaagcgatgcggaaacggagttgtcgaggagggagaagaatgcgattgtggaccattgaaacactgtgctaaggatccctgctgcctctccaactgcactctcactgacgggagcacctgcgctttcggtctgtgttgcaaagactgtaagtttctcccctctggtaaagtgtgcagaaaagaggtgaacgagtgcgacctgccagaatggtgcaacggtacctcccacaagtgtccagatgatttttacgtggaggacgggataccctgtaaagagcgcgggtattgctatgaaaagtcatgtcacgacagaaacgagcaatgcaggcgaatcttcggcgcaggtgccaacaccgcaagcgaaacctgctataaagaactaaacacattgggggaccgggtggggcactgcggaattaaaaatgccacatatataaaatgtaacatatctgatgttcagtgtggacggatccagtgcgaaaatgtcaccgagatacctaatatgagcgatcatactactgtgcattgggcaagattcaacgacattatgtgctggagtacggattaccatcttggtatgaaggggccagacattggggaggtaaaagatggaactgaatgcggaatagatcatatctgcatccatcgccactgtgtgcatattactattcttaactcaaattgcagtcccgctttttgcaacaagagggggatttgcaataacaagcatcactgtcactgcaattatctgtgggaccccccgaactgtttaatcaagggatacgggggatctgtggacagtggaccacctcccaaacggaagaagaaaaaaaagttctgttatctgtgtattcttttgctcatcgtgctatttatccttttgtgttgtctgtatcgtctatgtaagaaatccaaacccattaagaaacagcaagatgtccaaacaccatccgccaaggaggaggagaaaatccagcgtcgcccacacgagctgcccccccagagccagccctgggtcatgccttcacagagccagccccctgtcacacctagccagagccatccacaggtgatgcctagccagtcccagcctcccgtgactccatcacaaagtcaacctcgcgtaatgccctcccaaagtcaacccccggtgatgcctagccagagtcatcctcagttgactccatcacagagccagccacccgtcacgccctctcaaaggcaacctcagctcatgcctagccagtcacagccacctgttactccctcctag

SEQ ID NO: 178010 - DNA, 2463 bp, synthetic construct
  misc_feature 1..2463: note = Description of Artificial Sequence: Synthetic coding sequence
  source 1..2463: mol_type = other DNA
atgaagatgctgctgctgctgcactgcctgggcgtgttcctgagctgctcgggccacatccaagacgaacacccacagtaccattctccacctgacgttgtgattccagtgcggattacaggaacaacccggggcatgacccccccaggctggctgtcatatattctcccctttggtgggcaaaaacatatcattcacatcaaagtcaaaaaattgctcttcagtaagcacctgcccgtgttcacgtatactgaccaaggggccattctcgaggatcagccctttgtgcagaacaactgctactaccatggctatgtggaaggagacccagagagtctcgtttccctatccacctgctttggcggattccagggcattcttcagatcaatgattttgcatatgaaatcaagcctttagcattttctactactttcgagcacttagtgtataaaatggactctgaggagaaacaattctctacaatgcgtagcggctttatgcaaaatgaaatcacttgtaggatggagtttgaggagatagataacagcacacagaagcagagcagttatgttggatggtggatccattttagaatagtcgagatcgttgtggtcattgataactacctctacattagatacgagcgtaatgacagtaagcttctggaagacctgtacgtgatcgtgaacatcgtggactcaattctcgatgtgatcggggtcaaggtgcttctgttcgggctggaaatctggacaaacaagaatctgatagtcgtggacgacgtgcggaagagtgtacacctatattgcaaatggaagagcgagaacattacacctcgcatgcaacacgatacgagccacctgttcaccacgctgggtttaagaggattgagcggcatcggcgcattccgaggcatgtgtacaccccatagatcttgtgctatcgtgacgttcatgaataagacactcggaaccttttcaattgccgtggcacatcacctcggtcataatttaggtatgaatcacgatgaggatacatgtcgctgttcccagccccggtgcatcatgcacgagggcaacccccccattactaagttttccaactgttcctacggtgacttttgggagtatacagtggagaggacgaaatgtctcctcgagacggtccacaccaaagatatattcaatgtaaaaaggtgcgggaatggggtggtggaggaaggcgaagagtgtgactgtggcccactgaagcattgtgccaaggatccctgctgcttatccaactgcacgctaactgacggtagcacctgcgcattcggcttgtgttgcaaagactgcaagttcctaccaagtggcaaagtgtgtcgcaaggaggttaacgagtgcgacctgccagagtggtgtaatgggacctcccacaaatgtcctgatgacttttatgtggaggacgggattccctgcaaagagcgggggtactgctacgagaagagctgtcacgaccggaacgagcagtgtcggagaatattcggtgctggcgctaataccgctagtgagacctgctacaaggagctaaatacattgggggacagagtaggccattgtggtattaagaatgcgacttatatcaaatgtaatatcagcgatgtccaatgcggacgaattcagtgcgagaacgtcactgagattccgaacatgagcgaccatacaaccgtccactgggcgagattcaacgacatcatgtgttggtctactgattaccatctaggaatgaagggtccagacatcggcgaagttaaagacgggaccgaatgtgggatcgatcacatctgtatccacaggcactgtgtccatataactatcctcaacagtaactgcagccctgcattctgcaacaagcgtggaatatgtaacaataagcaccactgccactgtaactacctttgggatcctcctaactgcctcattaaagggtacgggggatcagttgattcaggtccacctccaaagcgtaaaaagaaaaaaaaattttgttacctctgcatcctcctgctgattgtattattcattctcctgtgttgtctttatcgactgtgcaaaaaaagtaaaccgattaagaagcagcaggatgtacagacaccgtccgccaaggaggaagaaaagattcaaaggcggccccatgagctacccccacagtcccagccctgggtgatgccaagccagtcccagccgcctgtgacccccagccaatctcatccacaggtgatgccctctcagagccagccacccgttacaccttctcagagccagcctagagttatgcccagtcagtcacaaccccccgtcatgccatctcagtcccatccccagttgacaccctcccagagtcagccaccagtaacccctagccagcggcagcctcaactgatgccatcccaaagtcagcctccagtaaccccctcatag

SEQ ID NO: 178011 - DNA, 135 bp, synthetic construct
  misc_feature 1..135: note = Description of Artificial Sequence: Synthetic coding sequence
  source 1..135: mol_type = other DNA
atgaagatgctgctgctgctgcactgcctgggcgtgttcctgagctgttccggacatatccaggatgaacatccgcaatatcactctccccccgatgtggtgatcccagtaagaatcacagggaccacaaggtag

SEQ ID NO: 178012 - DNA, 273 bp, synthetic construct
  misc_feature 1..273: note = Description of Artificial Sequence: Synthetic coding sequence
  source 1..273: mol_type = other DNA
atgaagatgctgctgctgctgcactgcctgggcgtgttcctgagctgttcgggccacatccaggacgagcacccgcagtaccactctccacctgacgtcgtcatacctgtcagaatcaccggtaccacgcgaggtatgacacccccaggatggttgtcatatattttacccttcggtggccagaagcatatcatacacataaaggtgaaaaaattgttgtttagcaagcacctgcccgtttttacctacacagatcagggtgcgattctttag

SEQ ID NO: 178013 - DNA, 45 bp, synthetic construct; identical to SEQ ID NO: 71819
  misc_feature 1..45: note = Description of Artificial Sequence: Synthetic coding sequence
  source 1..45: mol_type = other DNA

SEQ ID NO: 178014 - DNA, 2463 bp, synthetic construct
  misc_feature 1..2463: note = Description of Artificial Sequence: Synthetic coding sequence
  source 1..2463: mol_type = other DNA
atgaagatgctgctgctgctgcactgcctgggcgtgttcctgagctgctccggacacatccaggatgaacacccacagtatcacagccctcccgatgtagtcattccagtgaggattacaggtacgacgaggggcatgaccccacctgggtggcttagctacattctgcccttcggggggcagaagcatattatacacattaaagtgaagaaattactgttctctaaacatttgccagtgtttacctacaccgaccagggagccatccttgaggaccagccgttcgttcagaataactgttattatcatggctacgtggaaggggaccctgagagtttggtttcattatccacctgcttcggagggttccagggaattctgcaaataaacgattttgcttatgaaatcaaaccactcgctttctctaccaccttcgagcatctggtgtacaagatggactcggaagagaagcagttctctaccatgagatccggttttatgcaaaatgaaataacgtgcaggatggaatttgaagaaattgataacagtacccagaagcagagctcctatgtcggttggtggatccatttccgcatcgtggagatcgtcgtcgtgatcgacaactatctctacattaggtacgaacgcaacgattccaaactgctcgaagatctgtatgttatagtcaatatagttgattcaatcctggatgtgataggcgtcaaggtgctcctgtttggactggagatttggacgaataaaaacttaattgtcgtcgatgatgtccgcaagtcggttcacctgtattgtaagtggaagtcggagaacatcacacccaggatgcagcacgacacatcgcacctgtttacgacactgggcctgcggggtctgagcggtatcggcgccttccgggggatgtgcacccctcataggtcttgtgctatcgtgaccttcatgaataaaacactggggacattttccattgccgtggctcatcaccttgggcataacctggggatgaaccacgacgaagatacctgccgctgcagtcagcccagatgtatcatgcatgaagggaacccgcctattaccaagttctccaactgcagctacggggatttctgggagtatactgtggagagaacaaagtgcctgttggaaaccgtgcacaccaaagacatctttaacgtgaagcgatgcggaaacggagttgtcgaagaaggggaggagtgtgattgtggcccactgaagcactgtgccaaggatccctgttgtctttccaactgtacactcaccgatggctcgacttgtgcgttcggtctgtgctgcaaagattgtaaatttctgccttccgggaaggtatgccgaaaggaggttaatgagtgtgacctgcccgaatggtgcaacgggacatcccataagtgtcccgacgacttctatgtggaagacggcatcccctgcaaggagcggggttactgctatgagaagtcgtgtcacgaccgtaacgagcagtgtagaagaattttcggagccggagcaaatacagccagcgaaacctgctacaaagagctgaatactctcggcgatcgggttggtcactgtggcatcaagaatgccacatatattaagtgtaacatatctgatgtccagtgcggccgaatccagtgcgagaatgtgaccgagattcccaatatgtcagatcataccaccgttcactgggctcgatttaacgacatcatgtgctggtcaaccgactatcatcttgggatgaaggggcccgacattggcgaagtgaaagatggaacagagtgcgggatcgatcacatttgcatacaccgccactgcgtgcacattacaattctgaacagtaattgtagccctgccttttgcaacaagcggggaatttgcaataacaaacaccattgccactgcaattatctgtgggatcccccaaattgcctcattaagggatacggcgggtctgtcgattctggcccccctccaaaacgaaagaaaaaaaagaaattttgctatttgtgtatcctactgttgatagttctctttattctgctgtgctgcctatacaggttgtgcaaaaaaagtaagcctattaagaagcagcaggatgtccagacaccttcagccaaagaggaggagaaaatccaacggagaccccacgaattgccacctcagtcacaaccttgggtgatgccttctcagtcccagccaccagtcaccccatcgcaaagccatcctcaggtgatgccctcccaaagtcagccccccgtgacacctagccagtcacaacctcgggtcatgccaagtcagtcacaacccccggtcatgccgtcccagtcccacccgcagcttaccccatctcaaagtcagccacccgtgaccccatctcagcggcagcctcagttgatgccaagccagtctcagcctcccgtgactccctcttag

SEQ ID NO: 178015 - DNA, 2373 bp, synthetic construct
  misc_feature 1..2373: note = Description of Artificial Sequence: Synthetic coding sequence
  source 1..2373: mol_type = other DNA
atgcggagcgtgcagatcttcctgagccagtgccggctgctgctgctgctggtccctacaatgctgctgaaatcactgggggaggatgttatattccaccctgaaggtgagtttgactcctacgaagtgaccatccccgagaagctttcattcagaggggaagtccagggagttgtcagtccggttagctatcttctgcagcttaagggaaagaaacatgtgctgcacctctggcctaagcgcctcttgctgcccaggcatctccgggtgttctccttcacggaacacggagagctgttagaggaccacccctacatccctaaggattgcaactatatgggtagcgtgaaggagagtcttgattccaaggccaccatctccacctgtatggggggcctgcgcggagtctttaacatagatgcaaaacattatcagattgaaccccttaaagcctcaccatcattcgagcacgtcgtttacctcctgaaaaaggagcaatttgggaaccaggtgtgtggtttgagtgatgacgaaatagagtggcagatggccccctacgaaaacaaagcccggttaagggatttccccggcagctataagcaccccaagtatctggaactcatcctgctgtttgaccagtctcgatatcgcttcgtgaacaacaacctgtcccaggtgatccacgatgccatcttactgactgggatcatggatacttatttccaggacgttaggatgaggatccatcttaaagcgctcgaggtctggacagacttcaataagatccgcgttggctatccagagctggccgaagtgctgggcaggttcgtgatttataaaaagtccgtgttgaatgcccggctgtctagcgattgggcacatctctacctgcagaggaaatacaatgacgcgctcgcctggtcattcggcaaggtatgttccttagagtatgccggttctgtgtcaaccctcctggacactaacattctagctccagccacatggtcagcccacgagctcggtcacgctgtgggcatgagtcatgatgaacagtattgccagtgtagagggaggctgaactgtatcatgggatccggaagaaccggattcagcaattgttcctacattagtttctttaaacatattagcagtggagcaacatgcttaaataatatacccggcttgggttacgttctgaagaggtgcggaaacaaaatcgtggaggacaatgaagaatgcgactgtggcagcacagaagagtgtcagaaggatcgatgctgtcagtctaattgtaaactgcagcctggggccaactgcagcatcggcctgtgttgccatgactgtcgatttcgtccatcggggtacgtgtgtcgtcaggagggtaacgagtgtgacctggccgagtactgtgacgggaactcttcaagctgcccaaatgacgtgtataaacaggacggcacaccctgcaagtacgaggggcggtgctttagaaaggggtgcaggtcgagatacatgcaatgtcaatcaatcttcggtcctgatgcaatggaagccccaagtgagtgctatgatgcagtgaacttgatcggcgaccagttcggaaattgtgagattacaggaattcggaattttaaaaagtgcgagtcggcaaattcgatctgtggaaggctccagtgcattaacgtcgaaacgatccccgaccttccggagcacaccacaattatctccactcatttacaggccgagaatttaatgtgttggggaacaggttatcacttgtctatgaagcctatgggaatccccgacctgggtatgatcaacgatggtacctcctgcggcgaagggcgagtgtgcttcaaaaagaattgtgtcaattcttcagtcctgcagtttgattgtctgcctgagaagtgcaacaccaggggagtttgcaacaacaggaagaactgccactgtatgtacggatgggccccccctttctgcgaggaagtggggtacggcggctccattgactctggtcctcccggcctgctacgcggcgccattccttcaagtatatgggtcgtctccatcattatgttcaggctaatactactcattctctcagtggtgtttgtgttttttaggcaggtgatcgggaaccatctgaaaccgaagcaagagaagatgcctttgtcaaaggcaaaaacagagcaggaagaaagcaagacgaagactgtccaagaggagagtaaaaccaaaaccgggcaggaagagagcgaagccaaaacaggacaagaggagtctaaggccaagaccggacaagaggaatccaaggccaacattgaatctaagaggcccaaagctaagtcagtcaagaaacagaaaaaatag

SEQ ID NO: 178016 - DNA, 2346 bp, synthetic construct
  misc_feature 1..2346: note = Description of Artificial Sequence: Synthetic coding sequence
  source 1..2346: mol_type = other DNA
atgcggagcgtgcagatcttcctgagccagtgccggctgctgctgttactggttcctactatgctgctgaaatcattgggagaggatgtgatattccaccccgagggcgaatttgattcttacgaggtgactatccccgagaagctgagctttcgaggagaggtgcagggggtggtgtctcccgtttcatatctcttgcagcttaaagggaaaaagcatgttctgcatctatggccgaagagactgttactgccccgtcacctacgcgtattctcctttaccgaacatggcgagctgctggaggaccatccttacatccctaaagactgcaattatatgggttccgtgaaggaaagtcttgattctaaagcgacgatctctacatgtatgggtggattgcgcggcgtgttcaacatagacgcaaaacattatcagatagaaccacttaaggcgtccccatctttcgaacacgtcgtgtacttactcaaaaaggaacagttcggcaaccaggtctgcggactttccgacgatgaaattgagtggcagatggctccgtatgaaaacaaagcgagacttagagacttcccaggtagctataagcaccccaagtacctggagctcattctactgtttgatcagtcacggtacaggttcgttaataacaaccttagccaggtcattcatgatgcaattctgttaacaggaatcatggacacttatttccaggacgtgaggatgcgaattcatctgaaggctctcgaagtgtggactgacttcaacaaaatcagggttggctatccggagctggctgaggtgctaggcagattcgtgatctataagaaatcggtcctgaatgcacgcctctcatccgattgggctcatttatacctacagcgcaaatacaacgatgccctggcttggagcttcggcaaagtttgttcactcgagtatgccggctctgtctcaacacttctggataccaatatccttgctccagccacctggtcagctcacgagctgggacacgctgtaggaatgagccacgacgagcagtattgccagtgtcggggacgactgaactgcattatgggttctgggagaactggtttttcaaattgctcctatataagtttcttcaaacacatctctagtggtgccacctgccttaataatatccctgggttgggatatgttctcaaacggtgtgggaacaagatagtggaggataacgaggagtgtgactgtggtagtaccgaagagtgtcagaaggacaggtgttgtcaatctaactgcaagctccaacccggcgcgaattgcagtattggcctgtgctgtcacgactgtcgctttcgaccctcgggttatgtgtgccggcaagaaggaaatgaatgcgacctcgccgagtattgtgacggtaactccagcagttgtccaaatgatgtttataaacaggatgggaccccctgcaagtacgaaggacggtgctttaggaagggatgtcgcagcagatatatgcagtgtcagagtatatttggtccggacgccatggaggccccttccgagtgttatgatgcagtgaacctgatcggtgaccagtttggaaactgcgaaatcaccgggattcgaaactttaagaaatgtgagagcgccaatagtatctgtggcagactgcaatgcatcaacgtcgaaaccatccccgatttgcctgaacataccacgatcatttccacacacttgcaggccgaaaatcttatgtgctgggggactgggtaccacctctccatgaaacccatgggtatacctgacctgggcatgatcaatgatggaacatcttgcggggagggaagagtatgttttaagaaaaactgcgtcaattcgagtgtgctccagttcgattgcctccccgaaaagtgcaatacccgcggagtgtgtaataatcgcaaaaactgccattgcatgtatggctgggccccacccttttgcgaagaggttggctacggtggatccatcgacagtggccccccaggtctgctacgcggggccattccaagctcaatctgggtcgtttctatcattatgtttcggctgattttgttgatcctttctgtggtcttcgtgttttttcggcaggtcattggaaatcacctaaagcccaagcaagaaaagatgcctctatctaaggctaagaccgaacaggaggaaagcaagaccaagactgtgcaggaagagtccaagaccaagacagggcaggaagagtcggaggcaaaaaccggtcaggaggagtcaaaagctaacatcgagtctaaaagacctaaggctaagagtgttaagaaacaaaaaaaatag

SEQ ID NO: 178017 - DNA, 540 bp, synthetic construct
  misc_feature 1..540: note = Description of Artificial Sequence: Synthetic coding sequence
  source 1..540: mol_type = other DNA
atgggctggcggccccggcgggcccggggcacccccctgctgctgctcctcttgctcttgttgctgtggcccgttccaggcgccggggtcctccagggacacatacccggacagcccgtgacaccccactgggtgctcgacggccagccttggcggacagtcagtctggaggaaccagtcagcaagcctgacatgggcctggtcgctttagaggctgagggccaggagctgctgttggaactcgagaaaaaccagctgctggcaccgggctatattgagacccactacgggcctgacggacagcctgtggtgctcgcccccaaccataccgttcgctgctttcacggtctgtgggatgcacctcccgagggcagacgtgaggcccgtcgcactcgtaagtatctggagctctacattgtagcagatcatacactatttctcacaaggcatcggaatctgaaccacaccaagcagagattattggaagtagcaaactacgtcgaccaggtggtgaactctgctggggacgcccacggttag

SEQ ID NO: 178018 - DNA, 336 bp, synthetic construct
  misc_feature 1..336: note = Description of Artificial Sequence: Synthetic coding sequence
  source 1..336: mol_type = other DNA
atgggctggcggccccggcgggcccggggcacccccctgctgctgctgctgctgttactgttgttgtggcccgtgcctggagccggcgtgcttcagggacatatacccggccaacctgtgacacctcactgggttctggatggtcagccttggagaacagttagtttggaggaaccggtctcaaagcccgacatgggactcgtggcactagaagcggagggccaggaactgctgctggaactcgaaaagaaccagctgcttgctccagggtacatagaaacccattacggccccgcacaggagtgccgcgatctctgctgttttgcccataactag

SEQ ID NO: 178019 - DNA, 2364 bp, synthetic construct
  misc_feature 1..2364: note = Description of Artificial Sequence: Synthetic coding sequence
  source 1..2364: mol_type = other DNA
atgggctggcggccccggcgggcccggggcacccccctgctgctgctgctgctccttcttcttttatggcctgtgccgggggccggggtgctccagggtcacattcctggtcaacccgtgactccccactgggtactggatgggcagccgtggcgcacagtttcactagaagagcctgtatccaagccggatatgggcctggtggcgctagaggccgaaggacaggaactcttacttgagttggagaagaaccatagacttcttgcccccggatatatcgagacacactacggccccgacggccaacccgtcgtgctggcccccaatcacacggatcactgtcactatcaaggaagagtccgcggcttcccagactcttgggtagtgctctgtacctgttccggcatgtctggcctcattacgctttcgagaaatgcatcatattatctcagaccctggccccctagaggaagcaaggactttagtactcacgagattttccgcatggagcaactgctgacttggaagggaacctgcgggcaccgggacccggggaataaggcaggcatgaccagcctgccaggcggtccacaatccaggggaaggcgggaggctcgccgcacaagaaaatacctggagctttacattgttgctgatcacacgctgtttttaacccggcacagaaacctcaaccatacaaagcaacgccttctcgaggtcgctaattacgttgatcagctactaaggacactggatatacaggtcgcactgactggactcgaggtctggacagagcgggatcgcagcagagttacccaagatgctaatgcaacgttgtgggcattcttgcagtggagaaggggactgtgggcacaacgtccgcatgattctgcccaactgcttaccggccgggcatttcagggggccactgtgggattggcgccagttgagggcatgtgtagggcggaatcatctggcggcgtgagtacggatcattctgagcttccaattggagctgcagctacaatggcacacgaaattggacattcgttgggtttatctcacgatcctgatggctgctgtgtcgaagctgctgcagagagcggcggttgcgtcatggccgccgccacaggacatccatttcctagggttttctcagcctgctcacgccgccaactgcgggccttttttaggaaagggggtggagcctgtttgagcaacgcacctgatcccggcctgcccgtgcctcctgctttgtgtggcaacggtttcgtagaggccggtgaggagtgtgattgcggcccggggcaggagtgtcgtgatctttgctgtttcgcacacaactgttcgctgcggccaggcgcacagtgcgctcacggagattgctgtgtgcggtgcctgttaaaacccgccggggcactttgcagacaggctatgggggactgcgatttgcccgaattctgtacagggaccagttcgcactgtcctccggacgtttatctactggacggctcaccatgcgcccgcggaagcgggtattgctgggatggggcatgcccaaccctggagcagcaatgtcagcagctgtgggggccaggcagccatcccgcaccagaagcgtgtttccaggtggtcaacagtgctggagacgcacatggcaattgcggacaggattcagagggacatttcctaccatgcgctggtagagatgctctctgcgggaaacttcagtgccagggcggtaagccaagtctgctggcgccccacatggtgcccgttgatagtacggtgcatcttgacggccaggaggttacttgccggggtgcattagccctgcccagtgcacaactggacttacttggacttggtctcgtggagccggggactcagtgtggacctaggatggtttgcaattcaaaccataattgtcactgtgcacctggctgggcccctccattttgtgacaaacccggtttcggagggtctatggattctgggccggtgcaggctgaaaaccacgacaccttcctccttgctatgctgttgtccgttcttctgcccctcctgcctggcgcagggcttgcttggtgctgctaccgactccccggagcccacttacagcgttgttcctggggctgccgtcgagaccccgcgtgctcgggccccaaggacgggccccatcgggaccaccccctgggcggcgtgcaccccatggaactgggcccaacagcgacgggacagccctggcctttggaccctgaaaatagtcacgaaccttcttcccaccccgagaaacccctccccgcagtgagtcccgatccacaagccgatcaggtccagatgccgcgcagttgcctgtggtag

SEQ ID NO: 178020 - DNA, 2442 bp, synthetic construct
  misc_feature 1..2442: note = Description of Artificial Sequence: Synthetic coding sequence
  source 1..2442: mol_type = other DNA
atgggctggcggccccggcgggcccggggcacccccctgctgctgctgctgttgttgcttctgctttggccagtgccaggcgccggtgtgctccagggacatattcccggtcagccagtgacccctcattgggtgcttgatggccagccatggaggaccgtgtcgctggaagaacccgtgtcgaagcctgacatggggcttgtggctcttgaggccgagggacaggaacttctgctggaactggagaaaaaccatcgtcttctcgcacccggatacatagagacccactatggacccgatggacagcctgtggtgctcgcgcccaaccatacagaccattgtcattaccaaggccgcgtgagaggttttcccgattcctgggtggtgctctgtacatgtagcgggatgtctggtctgattactctgagccgtaacgcctcttactacctgcgcccttggcctccaaggggcagcaaggacttttcaacgcacgagatctttcgcatggaacaactgctgacttggaaagggacctgtggccacagggaccccgggaacaaagccgggatgacatcactaccaggaggtcctcaaagtaggggccgccgcgaagcccggcgcacacgtaagtatttagagctctacatcgtggccgatcacaccttatttttgacacgacatcgtaacctaaaccacacaaagcagagactgctcgaagtggccaactatgttgaccagctgctccgaactttggatatacaggtggctttgactggcctggaggtgtggacagagagggatcgaagccgggtgactcaggacgctaatgctaccctctgggcgtttttacagtggaggcggggcctgtgggctcagcggccacacgattctgcacagcttctgactggtagggcctttcagggcgccactgttgggttggcaccagtggagggcatgtgccgggctgagtcaagtgggggcgtgagcacagaccattccgaactgcccatcggggctgctgccacaatggcccacgagatcggccactccttagggctgtcccacgaccccgacggctgttgtgtggaggccgccgccgagtccggaggctgcgttatggcagcggccaccggccatcctttcccgcgggtgtttagcgcctgcagcagacgacagttacgagccttcttccgtaaaggcggcggagcctgtctgtccaatgcccccgaccccggcctgcccgtgcctccagcactgtgtgggaacggatttgttgaggccggggaagaatgtgactgtggtcctggacaggaatgcagagatctatgctgctttgctcacaactgctccctgagaccaggagcacaatgcgcccacggagactgttgcgtaaggtgtcttctgaagcctgcaggggccctgtgccgtcaggccatgggagattgtgatctaccggagttttgcaccgggacgtcctcccactgcccaccagatgtgtatctgctggacggttccccatgtgcacgcggaagtggttactgttgggacggcgcctgcccgacccttgaacagcagtgccagcagctctggggaccaggaagccaccctgcgccagaagcctgcttccaggtagtaaatagcgcgggagacgcacacggcaattgtgggcaggactccgagggacacttcctgccctgcgcaggcagggatgccctatgcggaaagttgcaatgtcaaggtgggaaaccttcactgttggcccctcatatggtcccggttgattctactgtgcacctcgacggacaggaggtgacctgccgaggtgctctggctctaccctccgcgcaactggatctgttaggacttggattggttgaacccgggacacaatgtggcccacggatggtgtgccaatccaggaggtgtcggaagaatgcattccaggaacttcagcggtgtcttacagcttgtcattctcacggagtgtgtaattccaatcacaactgccactgtgccccaggatgggctcccccattttgcgataagcccgggttcggtggaagtatggacagtggtccagtccaggctgagaaccatgataccttcttactggccatgctcttatccgtgctgctgcctttgctccctggagcaggattggcatggtgctgttatcggctgcccggagcccacctccagagatgctcttggggttgccgccgtgaccctgcctgttccggacctaaggatggacctcatcgggaccaccctttaggaggggttcatcctatggagctaggccctactgccacgggtcagccatggcccttagacccagaaaacagtcacgaaccctctagccatccagagaaacctctgcccgccgtctcaccagatccccaggctgaccaggtacagatgccacgcagctgtctatggtag

SEQ ID NO: 178021 - DNA, 417 bp, synthetic construct
  misc_feature 1..417: note = Description of Artificial Sequence: Synthetic coding sequence
  source 1..417: mol_type = other DNA
atgggctggcggccccggcgggcccggggcacccccctgctgctgctgctccttctcttgctgctgtggccagttccaggagctggcgtgctgcagggacacattccggggcagcctgttaccccccactgggtacttgacggccaaccctggcgaaccgtctcactggaagagcctgtttctaagccagacatgggcctcgtggctctggaggctgagggacaggagctcctactcgagttagaaaagaatcatagactgctggcacccgggtatatcgaaacacactatggtcctgacggccagccagtggtgttggctccaaatcacactgtccgatgtttccacggactctgggatgcacccccagaagtgccgccgcatcattcatacccgtactcgtcgctgcattcctag

SEQ ID NO: 178022 - DNA, 543 bp, synthetic construct
  misc_feature 1..543: note = Description of Artificial Sequence: Synthetic coding sequence
  source 1..543: mol_type = other DNA
atgggctggcggccccggcgggcccggggcacccccctgctgctgctgttgttacttctcttgttgtggccagtccctggagccggagtcctgcaggggcacataccaggacaacctgtcacgccccactgggtactcgacgggcagccctggcgtactgtcagccttgaagaacccgtgagcaaaccagatatggggctggtcgctctagaggccgaagggcaggagttgctactagagctagaaaagaaccaactgctggcacccggatacatcgagacacactacggcccagacggccaacctgtggttcttgccccaaaccacaccgtccgctgtttccatggcctgtgggacgcgccccctgaggggagacgtgaggcacgacggacacggaagtatttggagctctacatagttgccgaccatacactcttcctgactagacaccgaaatctgaaccataccaagcagcgcctattggaggttgcaaattacgtggatcaggaatgccgggatctgtgttgcttcgcccataattag

SEQ ID NO: 178023 - DNA, 2439 bp, synthetic construct
  misc_feature 1..2439: note = Description of Artificial Sequence: Synthetic coding sequence
  source 1..2439: mol_type = other DNA
atgggctggcggccccggcgggcccggggcacccccctgctgctgcttcttcttctcctactgctgtggccagttcccggcgccggagtgctccagggacatattccaggacagcccgttacaccacattgggttctagacggccagccctggcggacggtttcactcgaagaaccagtcagcaaaccagatatggggttggtcgccctggaggcagagggccaggaacttctcttggaactggagaaaaaccataggttgttggccccagggtatatcgagacacactatggccctgacggacaacccgttgtcctggccccgaatcacactgaccattgtcactatcagggccgcgtgagaggttttcccgattcatgggtagtcctgtgtacatgttccggaatgagcgggttgatcactttgagtcgaaacgcttcgtactatttgagaccatggcctccccgaggctctaaagacttctcaacccacgaaatattccgcatggaacaattgctcacttggaaggggacctgtggacatagggaccctggcaataaggccggcatgacctcccttccagggggtccccagtcgcgagggaggagggaagcccgccgtacaagaaagtatctggaactctatatagtggccgaccacaccctgttcctgacccggcatcgcaacctgaaccacaccaagcagaggttgcttgaggtagccaattacgttgatcagcttctgagaacattagatatacaggtggctttgaccggcttagaagtgtggacagaaagagaccggagcagggtgacccaggatgccaatgctaccctctgggcattcttgcagtggcggcggggactgtgggcgcaaagaccgcacgattccgcacagcttctgactggaagggcgttccagggagctacagtgggcctcgcccctgtggagggcatgtgtagggcggaaagcagcggaggagttagtaccgaccacagtgagctacctattggggctgcggccaccatggcacatgagatcggtcattctctgggcctgtctcatgatcctgatggctgttgcgtggaggcggcagcggagtcaggaggctgtgttatggcagccgcaactggccaccccttccccagagttttctcagcatgctcaagacgccaactaagagccttctttcggaagggaggcggtgcctgcctttccaatgcacccgaccccggcctcccagtgcctcccgcactctgcgggaatgggtttgtcgaagccggagaggagtgtgattgtggtcccgggcaggagtgccgggatctgtgctgcttcgcacacaattgcagtttaaggcctggagcacagtgcgcacatggggactgctgtgtccgctgccttcttaaacccgctggggcgctatgccgccaggcaatgggggattgtgatcttccggaattctgcacaggaactagctcacactgcccacccgatgtctaccttctggacggctccccctgcgcacgcggcagcgggtattgttgggatggcgcttgccctacgctggaacaacaatgccagcagctgtggggccctggtagccatcccgcaccagaggcgtgcttccaggtggtgaactccgccggagacgctcatgggaattgcggccaagacagcgaggggcactttctgccctgcgctgggcgggacgccctctgtggaaagctacagtgtcaaggggggaagccttcgctcctcgcgccccacatggtgcccgtagactccacagtgcatttagacggccaggaagtgacatgtcggggggccctggcactgcccagcgctcaacttgatctactgggcttagggctagtagagcccggcacccaatgcgggccaaggatggtatgtcagtcaaggaggtgcagaaaaaacgcattccaggagctgcagagatgccttaccgcttgccactcccacggcgtttgtaattccaaccacaactgtcactgtgcacccggatgggcccctccattttgtgacaaacccggctttggcggatctatggactccggcccagtgcaggccgaaaatcacgacacattcctcttggccatgctgctgagcgttctactgccactgcttcccggcgccggcctcgcctggtgctgctataggttgcctggagcccaccttcaacgctgctcttggggctgtaggagggacccagcatgttctggtccaaaagatggaccacacagagaccatccacttggcggagtgcatcccatggaattgggtcccacagccacagggcagccatggcctctggatccggagaattcacacgagcctagttctcacccggagaagccgctcccagccgtatccccggatccacaggaccaggtccagatgcctcgctcctgtctctggtag

SEQ ID NO: 178024 - DNA, 456 bp, synthetic construct
  misc_feature 1..456: note = Description of Artificial Sequence: Synthetic coding sequence
  source 1..456: mol_type = other DNA
atgggctggcggccccggcgggcccggggcacccccctgctgctgctcctactgttgctcctactgtggcccgtaccaggtgccggggttttgcaggggcacatcccaggccagcctgtgaccccccattgggtcctcgatggacagccctggcggacagtgagtctcgaagaacccgtgagtaagcccgatatggggctagtggctctggaggccgaagggcaggaacttctgctggaactcgaaaagaatcaggacgctctctgcggtaagttgcaatgccagggtgggaaaccgagtctactggcgcctcatatggttcctgttgactccaccgtgcatctggacgggcaagaagtgacttgccgaggagccttggctctccctagtgctcagctggatctgttggggctaggtctggtggaacccggtactcagtgcggtccacggatgtag

SEQ ID NO: 178025 - DNA, 2079 bp, synthetic construct
  misc_feature 1..2079: note = Description of Artificial Sequence: Synthetic coding sequence
  source 1..2079: mol_type = other DNA
atgggctggcggccccggcgggcccggggcacccccctgctgctgttgttgctgctgctgctattatggccagtccccggggccggcgtcctgcagggtcatattcccggccaaccagtgaccccccattgggtgctcgatgggcagccctggagaactgtgtcactggaggaacccgtgtccaagcctgacatgggcttggttgcactagaagccgagggtcaagagctgttgctggagctcgagaagaaccatcgcttgctcgctccaggctatatcgagacacactatgggcctgatggtcaacccgtagttttagcacccaatcataccgaccactgtcactaccagggcagggtgcgcgggttcccggattcctgggtggtcctctgtacctgtagcggcatgtccgggcttattacactgagcagaaatgcttcttattatctgaggccctggcccccacggggctccaaggatttcagtacccacgagatctttcggatggagcagctcttaacgtggaaaggaacttgtggccatcgcgacccaggcaacaaggctggcatgacgtccctgccaggcggtccgcaatcccgcggccggcgagaagctcgaagaacaagaaaatacctcgagctgtacatcgtggccgatcacactctgtttctcaccaggcatcgcaatttaaaccacaccaaacagcgtttgcttgaagttgcaaactacgtcgaccagctgctgaggactctagatatccaagtcgcccttactgggctggaagtgtggacagaacgggacagatctaggcgccagctgagagcattctttcgcaagggtggtggtgcctgtctgtcgaatgcccctgacccagggctgcccgtgccaccagcactctgcggtaacggcttcgtggaagccggtgaggagtgtgactgtggccccgggcaagagtgccgagatctctgttgttttgcacataactgttctcttagaccgggcgcccagtgtgcgcacggtgactgttgcgtgagatgcctgctgaaacccgcaggtgccctctgtcgccaagctatgggtgactgcgacttgccggagttctgtactggaactagctctcactgtcctccagatgtgtacctattggatggctccccgtgcgcccgcggaagcggctattgttgggatggtgcctgtccaacgctcgaacagcagtgccaacaactttggggacccggttcacaccccgcccctgaagcatgcttccaggtcgtcaactctgccggtgacgcccatggtaattgcgggcaggacagtgaaggacacttcctcccttgcgccggtcgcgatgcactctgcgggaagctccaatgccagggcggcaagccatccttgctcgctccacacatggttcctgtggactcaaccgttcacctcgatgggcaagaggtcacgtgccgcggtgcactagccctcccatcagcccagcttgatctcctgggactggggcttgtcgagccagggactcaatgcggcccgaggatggtgtgccaaagtcgtaggtgcagaaagaatgcatttcaggagctgcagagatgtttaaccgcctgccatagccatggggtatgtaactctaaccacaattgccattgcgccccggggtgggctccccccttttgcgataagccaggctttgggggttccatggattctggtcccgtccaggccgaaaatcacgatacattcctcttagcaatgctgctgagcgtgcttctgccactcctgcctggggctggactggcttggtgttgctaccggctgcccggggcgcaccttcagcgctgttcttggggatgcaggagagacccagcatgcagtggtccaaaagacggcccacaccgtgaccaccccctgggcggggtacaccccatggaattaggccctaccgccactggccagccatggcccttggacccagagaattcccatgaaccatctagtcaccccgagaaacccctgccagcggtgagcccagacccacaggatcaagttcaaatgcccagaagctgtctttggtag

SEQ ID NO: 178026 - DNA, 522 bp, synthetic construct
  misc_feature 1..522: note = Description of Artificial Sequence: Synthetic coding sequence
  source 1..522: mol_type = other DNA
atgggctggcggccccggcgggcccggggcacccccctgctgctgcttctccttctgcttctactttggccagtccccggcgccggcgttctacagggccacatccccgggcagccagtgacacctcactgggtgttagacggtcaaccctggcggaccgtgtcgcttgaggaacccgtatccaagcccgatatggggttggtcgccttggaggccgaggggcaagaactgttgctggagctcgaaaagaatcaccgcctgctggctcctggttacatcgagactcactacggcccagacggccagcccgtggtcctcgcccccaaccacaccgtgcgatgcttccacggcctgtgggatgctcctcccgaggaccactgccattatcagggccgagtgcgtggctttcccgattcttgggtggtgctatgtacctgcagcggcatgagagccggggaaaaacgagcaggtcctggttccacatggaattgcaccttgtggcaaaccacaccctgcagctag

SEQ ID NO: 178027 - DNA, 291 bp, synthetic construct
  misc_feature 1..291: note = Description of Artificial Sequence: Synthetic coding sequence
  source 1..291: mol_type = other DNA
atgggctggcggccccggcgggcccggggcacccccctgctgctgctcctgctgttgttactgctctggccagtacctggggcaggagtgctgcaaggacatatcccaggccagccagtgacacctcactgggtgctggatggccaaccgtggcgaaccgtctcgttggaggagcctgttagtaagccggacatgggcctggttgctttggaagccgagggacaggaattgttgctggagctggaaaaaaatcagttcgccatcgcaacgattactgctaccgttctctag

SEQ ID NO: 178028 - DNA, 2265 bp, synthetic construct
  misc_feature 1..2265: note = Description of Artificial Sequence: Synthetic coding sequence
  source 1..2265: mol_type = other DNA
atgctgcccggctgcatcttcctgatgatcctgctgatcccccaggtgaaggaaaagtttattttgggcgtggagggtcagcaactcgtccggcccaagaagttgcccttgattcagaaaagagataccggccacactcacgatgacgatatcctgaagacatatgaagaggagctactgtatgaaatcaagctgaacaggaagaccctcgttctccacctgctgaggagccgtgaatttttgggctctaactatagcgagactttctactccatgaagggcgaggccttcacccgccacccccagatcatggatcattgtttttatcagggctcaatagtgcacgagtatgattctgcggcatcgattagcacatgcaacgggctcagggggttctttaggattaacgatcaaaggtacctgatcgagccggtgaagtactctgatgaaggtgaacatttggtttttaagtacaacctgagagtgccctatggcgctaattattcctgcaccgaactgaacttcacacgaaaaactgtaccaggcgacaatgaaagtgaggaggattcaaaaataaaggggatacacgatgagaagtatgtagaactttttattgtggccgatgacaccgtgtacagaaggaatgggcatccacataataaattgagaaaccgcatttgggggatggtcaactttgtcaacatgatatataagacgcttaacatccacgtaacattagtgggcattgagatctggacacatgaggacaagattgaactatactccaacattgagacaactctgctgcgctttagtttctggcaggagaagatcctgaagacccgcaaagattttgatcacgtggtgttgttatccggtaagtggctgtattcacacgtccaaggcatcagttatcccgggggaatgtgtctcccctattactccacgagcataataaaggacttactgccagacacaaatattattgcgaatcgcatggctcatcagctgggacacaacctagggatgcagcacgatgagttcccttgcacttgccccagtgggaaatgcgtaatggactcggatggaagcatccccgcccttaagttttccaagtgcagccagaatcagtaccaccagtacttaaaggactacaagcccacatgcatgctgaacatcccatttccgtacaactttcacgattttcagttctgtgggaataaaaagctggatgaaggagaggagtgtgactgtgggcccgcacaggagtgtacaaacccgtgttgcgacgcccatacatgcgtgctgaagcctggatttacttgtgccgagggcgaatgctgcgaatcctgccaaattaagaaggcgggcagtatttgccggccggctaaggatgagtgcgattttcccgaaatgtgcaccggccactcacctgcctgccccaaggaccagtttcgggtgaatgggtttccttgtaagaactctgaaggttactgtttcatgggtaagtgtcccacacgagaggaccagtgttccgaactgtttgatgacgaggccatcgagtcacatgacatctgttacaagatgaacacaaaggggaacaagttcggatactgcaagaataaggagaaccgatttctgccatgcgaagaaaaggacgtcagatgcggaaagatctactgcacaggcggtgagttatctagtctgctgggggaggataagacctatcatctgaaagatccacagaaaaacgcaaccgtaaaatgtaagacaatctttttgtaccacgacagtactgatatcgggctggtggcttccgggactaaatgcggggaaggcatggtgtgtaacaatggggagtgccttaacatggagaaagtttatatttctacaaattgtcctagccaatgcaatgagaatcccgtcgatggccacgggctgcagtgccattgtgaagaaggccaggcgccggtcgcctgcgaagagaccctgcacgtgacgaacattacaattttggtcgtggtcctggtgctggtgattgtgggaatcggcgtgctaatcctgcttgtccggtaccgtaaatgtatcaagctgaaacaggtgcaatccccacctacggaaacgttgggcgttgagaacaagggttactttggggatgagcagcagataaggacagagcccattctcccagaaattcatttcctgaacaagcctgctagcaaggactcccgtgggatagccgaccccaatcagtcagctaagtag

SEQ ID NO: 178029 - DNA, 1656 bp, synthetic construct
  misc_feature 1..1656: note = Description of Artificial Sequence: Synthetic coding sequence
  source 1..1656: mol_type = other DNA
gtgtgcccccggagctacttcctggagggccggggcagctacagctttctctctctcttctccacgagccctgctccttatcgtaggaacgggcatccccacaataagttaagaaatagaatttggggtatggtcaacttcgtcaatatgatatataagacccttaacattcatgtcaccctcgtgggcatagaaatctggacacatgaagacaagattgagctgtactccaatatcgagaccaccctcttaaggttttccttctggcaggagaagattctcaaaacccggaaggatttcgatcacgtggtcctcctcagcggcaaatggctgtatagtcacgttcaaggcatatcttaccccgggggcatgtgtctcccatactattctacgtctataattaaagacctgctaccggacacgaatatcatagccaatagaatggcccaccagctcgggcataacctgggtatgcaacatgacgaattcccatgtacctgtccgtccggtaaatgcgtgatggattcagatggctctattccagccttgaagtttagcaaatgttcccagaatcaataccaccaataccttaaggattataagcctacttgcatgctcaacatccccttcccttataacttccacgactttcagttttgtgggaacaaaaaattagatgaaggcgaggaatgcgactgcggtcccgcccaggagtgtaccaatccttgctgtgatgctcatacttgtgttctgaaacccgggttcacatgtgccgaaggagaatgttgcgagagttgccagatcaaaaaggccggttcaatctgtcgacctgccaaggacgaatgtgacttcccggaaatgtgcacagggcacagtcccgcttgtcccaaagaccaattccgggtcaacgggtttccatgcaagaacagtgaaggctattgctttatgggaaagtgtccaactcgcgaagaccagtgtagcgagctgttcgatgacgaggccatcgaaagtcacgacatctgctataagatgaatacgaagggaaacaaattcggctactgtaagaataaagaaaatcggttcctaccatgcgaggagaaggacgtgagatgcggaaagatctactgcacaggcggcgaactctccagcttgctgggtgaggacaagacataccacctcaaagatcctcagaaaaacgccacagtaaaatgcaagactatctttctctaccacgattctaccgatattggactggttgcctcgggaactaaatgcggagaggggatggtgtgcaataacggtgagtgtctgaacatggaaaaagtgtatatttctacgaattgtccgtcccaatgtaatgagaaccctgttgatggacatgggttgcagtgccattgcgaagaagggcaggctcctgtcgcctgtgaggagactttgcatgtgacgaatatcaccatcctggtcgtggtccttgtgctggtcatagtcggcatcggagtgctcattctgcttgtgagatatcggaaatgcatcaagttaaagcaggttcagtctccaccaaccgagaccctgggtgttgaaaataagggctattttggggatgagcagcagatcaggacagagcctattctacccgagatccactttctgaattag

SEQ ID NO: 178030 - DNA, 2475 bp, synthetic construct
  misc_feature 1..2475: note = Description of Artificial Sequence: Synthetic coding sequence
  source 1..2475: mol_type = other DNA
atgcggggcctgggcctgtggctgctgggcgccatgatgctgcccgctatcgcccccagccggccttgggccttgatggaacagtacgaagtggtgttgccttggcgcctgcctggacctcgggtcaggagggccttaccaagccacttgggactgcacccagagcgagtaagctatgtgctgggagcaaccggacacaattttacgttgcacctccggaaaaatcgtgacctgcttggttctggctatacagaaacatatactgctgcaaacggcagtgaggtgactgaacagccaagaggccaggaccactgcttttatcagggccatgtcgaaggataccctgattctgccgctagtctctcgacttgcgcgggtctaaggggcttctttcaggtcggcagcgatcttcacttgattgagccgctcgatgagggcggagaaggcggccgtcatgctgtgtaccaggccgaacatctcctgcaaaccgcgggtacatgtggcgtgtccgacgacagccttggatccctgctgggaccacgcaccgccgctgtgttcagacccagaccaggggattctcttccgtcaagggagacaaggtacgtggagctttatgtcgtggttgacaatgccgagttccagatgttgggcagcgaggcggcagtgcgtcaccgcgttctggaggtggtcaatcacgtcgacaaattgtaccaaaagctgaatttccgggtcgtgctagttgggctcgagatttggaatagccaggatcgtttccacgtgtcacccgatccctccgttaccctggaaaacctgttgacctggcaagcacggcagcgcacccgcagacacctgcatgacaacgtgcaattaataacaggggtcgacttcacaggaactacagtcggattcgccagggtgagtgctatgtgctcacacagctctggcgccgtgaaccaggatcattcaaagaatccagtgggggtcgcttgtacaatggctcacgaaatgggccacaacctgggcatggaccatgacgagaatgtgcagggctgtcggtgccaggagcgttttgaagcgggcaggtgtattatggcagggtccataggcagctctttcccaagaatgttctcagattgcagccaagcttatctagaatcatttctggaacggccccagtctgtatgcttggcgaacgcccctgatctctcccacctggtggggggccccgtctgtggtaatctctttgtggaaagaggcgaacagtgcgactgtgggccacctgaggactgcaggaaccgttgttgcaatagcaccacctgccagctggccgagggggcccagtgtgcacacggtacgtgttgccaagaatgtaaagttaagcctgccggagaattgtgcaggcccaagaaggacatgtgtgacctagaagagttctgcgacggccggcaccccgaatgtcctgaggacgcctttcaggagaacggcaccccatgcagcggcggctactgctacaatggcgcatgccctaccttagcccagcagtgccaggccttttggggtcctggagggcaggccgccgaggaatcgtgtttttcttacgacatccttcccggttgcaaggcatcccgatacagggcagacatgtgcggtgtactacagtgtaaggggggccaacagccactcgggcgggccatctgtatcgtggacgtgtgccatgcactcacgactgaagatggaaccgcctacgagccggtacccgaagggactcgttgcggacccgaaaaggtttgttggaaaggcaggtgtcaggacttgcatgtatatcggtctagcaactgttctgcacaatgtcacaaccatggcgtctgcaatcataaacaggaatgtcactgccacgctgggtgggcgcctccacattgcgcaaaactgctcacggaggtgcacgccgcatcgggcagcctcccggtattcgtggtggtggtgctcgtgctgcttgcagtggtcttggtaacactcgcaggcataatcgtgtaccgtaaagcccgctcaagaatacttagccgcaacgtcgcgcccaaaaccacgatgggtcgtagtaacccgctctttcatcaggccgcctcccgcgtccccgccaaaggaggcgcacccgcaccctcaagaggaccccaagaactggtgcccacaacccaccccgggcagcctgcccgccatcccgcctcctcagttgcgcttaagcggcctccccccgccccaccagtgactgtgtcatccccaccattcccggttcccgtatatactaggcaggccccaaagcaagttatcaagccgacgttcgccccacctgtgccacccgtgaaaccaggcgcgggcgccgctaatccaggccctgcggaaggagccgttggcccaaaggtcgctctgaaaccccccattcagagaaaacagggcgccggcgcacctacagcgccttag

SEQ ID NO: 178031 - DNA, 2202 bp, synthetic construct
  misc_feature 1..2202: note = Description of Artificial Sequence: Synthetic coding sequence
  source 1..2202: mol_type = other DNA
atgcggggcctgggcctgtggctgctgggcgccatgatgctgcccgggcccgcccctcgggagggcgagctgagaccttggggtcaccgggcacagctgcacccacctcctgctgaagaacagggaccggccggcttgcgcctacatcgggacctgtacgggtgtcaatggcttcgtggagacggagcagcctcccgtgccggcccgctgctcctgccaggtccacgacgtggcgtcccaggcctgagccgacagccccagcacctgtgccggcctcaggtcggcagtgacctccaccttatcgagcctttggacgagggtggcgagggagggaggcatgcggtgtaccaggccgagcacctgctgcagaccgcaggcacttgtggggtgtccgacgacagtttggggtcacttttgggacctcgcactgctgccgtgtttaggcctcgtcccggagacagcctgccatcaagggaaacaaggtacgttgagctatacgtcgtcgtggataacgctgaatttcagatgctgggcagcgaggctgctgtgagacacagagtcctggaggttgttaatcacgtggacaaattataccagaaactgaattttcgtgtcgtgcttgtgggtctcgaaatttggaattcccaggaccgctttcatgtttctcctgacccctccgtcactcttgagaatctgcttacctggcaagctcgccaacgcactcgtagacaccttcacgataacgtccagctaataaccggcgtggactttaccggcactaccgtaggctttgcaagagtgtccgccatgtgcagccacagcagtggagcagtcaaccaagaccactccaagaatcctgtgggggtggcttgcacaatggctcatgaaatgggtcacaacctggggatggatcacgacgagaacgtacagggctgccggtgtcaggagcggttcgaggccgggaggtgcatcatggcaggctccattggaagctcctttccacggatgttctccgactgctcacaggcgtacctcgagagtttcttggaacgcccgcagtcggtgtgccttgccaatgcacccgatctaagccatctcgtgggagggcccgtatgcggcaatctgttcgtcgaacgcggggaacagtgtgactgtggacctccggaggattgccgtaatcgctgttgcaatagtacaacatgccaactggcagagggggcacagtgcgctcacgggacatgttgtcaggaatgtaaagtgaagcctgccggtgaattgtgccgccccaagaaggacatgtgtgacctggaagaattctgcgatggacgccatcctgagtgtcccgaggatgcttttcaggagaacggcactccttgttccggcggatactgctacaacggtgcttgccctacactcgcacagcagtgtcaggctttttgggggcctggtggtcaagcggccgaagaatcttgtttttcatacgatattttacctggctgtaaggcttcaagatacagagctgatatgtgtggcgtgttacagtgcaagggaggccagcagcctttggggagagctatatgcatcgtagatgtgtgccacgcactcactactgaagatgggacagcatatgagcctgtacctgaggggacgagatgtggccccgaaaaagtctgcaaccacaaacaagagtgccactgtcacgccgggtgggctcccccacactgtgcaaaactgctcacagaggtgcacgcggcatccgggtcactgcctgttttcgtagtggtggtgctggtgctccttgccgtggtcctggttactctcgccgggatcatagtttatcggaaagctcggagcaggatcctcagcaggaacgtcgcccctaagacaactatgggtagatctaatcctctattccaccaggcagcctcacgtgtgccagccaagggaggcgcgcccgcaccgagcaggggcccacaggagctggtgccaacaacgcaccctggccagccagcccggcacccggccagtagcgtggccctcaagaggccacctcccgcacctcccgtaacagtgtcttccccgcccttccctgtgcccgtatacactcggcaggctcccaagcagggcgccgtcggccccaaggtggccttgaagcctccaattcaacggaaacagggcgccggggctcccaccgcgccatag

SEQ ID NO: 178032 - DNA, 2229 bp, synthetic construct
  misc_feature 1..2229: note = Description of Artificial Sequence: Synthetic coding sequence
  source 1..2229: mol_type = other DNA
atgcggggcctgggcctgtggctgctgggcgccatgatgctgcccgctatcgccccctccagaccgtgggcgttgatggagcagtacgaggtggttctgccatggcggctccctgggccaagagtccgcagagccctgccgtcccacctgggcctgcatcctgaacgcgtcagttacgttcttggagctaccggtcacaattttacactgcacctgcgcaagaacagagacctgctggggtcaggatacaccgagacatacacagcagccaacgggtccgaggtcaccgaacagccccgaggtcaggaccactgcttctaccagggacacgttgaaggatatcctgattccgccgcttcactgtctacatgtgccggtcttagaggcttctttcaggttggtagcgaccttcatctgatcgagccccttgacgaagggggcgagggtggcagacacgctgtttatcaggccgaacatctgctgcagactgccggtacttgcggagtgtctgacgacagtctgggatcacttcttggcccacgcaccgccgccgtttttcgaccccgccctggagatagcttacccagtcgcgagacccggtacgtggagctctacgtcgtggtggataacgccgagtttcagatgctcggtagcgaggccgccgtgagacatagagtcttagaggtggtgaatcatgtggataagctttaccaaaagctcaattttagggtggttttggttggtctggaaatttggaactcacaggacaggttccacgtatcgcccgatccctctgtaaccctggagaacctgctgacatggcaggccaggcaacggacgaggagacatttgcacgataacgtccaactgatcactggtgtggattttaccggaacaacagtgggatttgcccgggtgtcagccatgtgctcccatagttccggcgcagtaaatcaggaccactcaaagaacccagttggtgtcgcttgcactatggctcacgaaatggggcataatctcgggatggaccacgatgagaatgtgcagggatgtagatgccaggagcgatttgaagccggccggtgcattatggcaggcagcattgggtcatcatttccccgtatgttctccgactgttcacaggcatacctcgagtcctttttggaaagaccgcaatccgtttgcctggcaaatgcacctgacttgtcacacttagtgggaggtcccgtgtgtggtaatctcttcgttgaaaggggagaacagtgtgattgtggccctccagaagactgtcggaatcgttgttgcaactcgacaacatgtcagcttgccgagggagctcaatgtgcacacggcacatgctgtcaagaatgtaaagttaagcccgcaggtgaactatgccgccctaaaaaagacatgtgtgacctggaggaattctgtgacggcagacaccctgagtgccctgaagatgctttccaggaaaacggcaccccatgttcagggggctactgctacaatggcgcctgccctaccctcgcccaacagtgtcaggcattctggggcccaggtggtcaggcagctgaggagtcatgcttctcatacgacatcttgcctggctgcaaagcatcccgttacagagccgatatgtgtggagtgctccaatgcaagggcgggcagcaaccattgggacgggcgatttgcatagttgatgtgtgccatgccttgaccacagaagacgggacagcctatgagcccgtccccgagggcacacggtgcggccccgagaaagtttgttggaaaggtcgctgccaggatctgcatgtctatcggtcttcaaactgtagcgcccagtgccataatcacggcgtttgcaaccacaagcaggagtgccattgccacgccggctgggcgccgccccactgcgccaaactgctcaccgaggttcacgcagggtgtcagcctagggctggccagggacgagggtcctctccaatacaggggcctccacgcgcaggcccccatcatcccccggggcctgccaggcccacgcctggccttttgggaggctccgaagaggctgcaccttgttcaagtggccattgtgtgcagccaactctgccctcatcttgccttcacccggctggcacaaaggcaggccaccaggccaatgtgcggactccttccgccccatcacagaccaggggatggtgcggccagccctggtcttcctag

SEQ ID NO: 178033 - DNA, 2460 bp, synthetic construct
  misc_feature 1..2460: note = Description of Artificial Sequence: Synthetic coding sequence
  source 1..2460: mol_type = other DNA
atgggcagcggcgcccggttccccagcggcaccctgcgggtgcggtggctgctgttacttggtttggtgggaccggtcttgggggcggccaggcccggcttccaacagaccagtcaccttagctcttacgaaataattaccccatggagattgacaagagagcggcgtgaggctcctcgtccctattccaaacaggttagctatgtaattcaggccgagggaaaagaacatataatccatttagagcgtaataaggatctgttgcctgaagacttcgtcgtctacacttataacaaggaagggacactgattactgaccatccaaatatccagaatcattgtcattaccgcggatacgtggagggtgtgcacaatagcagcatagctctctccgactgcttcgggctgcgcggcctgttacacctcgaaaatgcctcatatggcatcgaaccgctacagaatagctcacatttcgaacatatcatttatcggatggatgatgtttataaagagccgttgaagtgcggagtgtcaaacaaggatatcgaaaaggagaccgctaaggacgaagaagaggagcccccatcgatgactcagctactgagacggcggagagcggtcctgcctcagacccgctacgtggaacttttcatcgtggtcgacaaggagaggtatgatatgatgggtcggaaccagaccgccgtcagagaagagatgatattactagccaactatctcgattccatgtacattatgttgaacattaggatagtgcttgtgggccttgaaatttggactaacggtaatctgatcaatatcgtcggcggggcaggggatgttttgggaaatttcgtgcaatggagggaaaagttcctgataacgcgtcggcgtcatgactccgcccagctcgtgcttaaaaagggcttcggcgggaccgcaggtatggccttcgtgggcactgtgtgcagccggagtcatgccggtggcattaatgtctttggccagatcaccgtggagacattcgcttcgattgtcgctcatgaattaggtcataatctcggaatgaaccatgacgatggtcgggattgttcatgtggcgctaagagctgtatcatgaattctggggcgtccggcagcaggaacttctcatcttgctccgccgaagacttcgagaaattaacgcttaacaagggcggcaattgcctgctcaacatcccaaaacccgatgaggcctattctgccccgagctgcgggaataagctggtggatgctggtgaagagtgtgactgcgggacaccaaaagaatgcgaactggatccttgctgcgagggaagcacttgtaagctaaaatcttttgctgaatgcgcttatggcgactgctgtaaagactgcagatttttgcctggaggaactctatgccgcggtaaaaccagtgaatgcgacgtgcctgagtactgcaacggctcctcccagttctgtcagccagacgtgttcatccagaatggctacccctgccagaataataaagcatattgttacaatggcatgtgtcagtactacgatgcacagtgccaggtgatcttcgggtctaaggctaaagcagcaccaaaggactgcttcattgaggtgaactcaaagggagataggttcggcaactgcggcttttcgggaaatgaatataaaaagtgcgcaactgggaacgctctatgtggaaagctgcaatgtgagaatgtgcaggaaattcccgtgttcggcattgtgccagctatcatacaaacgccgagccggggtaccaagtgctggggtgttgacttccaactgggatcggacgtgcctgatccagggatggtgaacgaagggaccaagtgtggagcaggtaagatctgtcgaaattttcaatgtgttgacgcttcagtcctcaattatgattgcgacgtgcagaaaaaatgccacggacatggcgtctgtaactccaacaagaattgccactgtgaaaatggctgggcaccacctaactgtgagaccaaaggttatggaggctctgtggacagcggccctacatataacgagatgaataccgccttgagagatggcctactggtctttttctttctgatcgtcccactgatcgtgtgtgcaatcttcatttttattaagcgtgaccaactttggcgtagctattttcggaaaaagagatcacaaacttacgaaagcgatggcaagaatcaggctaatccaagtcgtcagcctggctccgtacccaggcacgtcagccctgtcactccacccagagaagtgcccatatatgccaataggtttgctgtgcctacgtacgccgctaagcagccgcagcaattcccctccagaccaccgccaccacaaccaaaagtgtcaagtcagggcaacctcataccggcgagacctgcccccgcaccccccctgtacagcagtttgacctag

SEQ ID NO: 178034 - DNA, 2904 bp, synthetic construct
  misc_feature 1..2904: note = Description of Artificial Sequence: Synthetic coding sequence
  source 1..2904: mol_type = other DNA
atgcagcgggccgtgcccgagggcttcggccggcggaagctgggcagtgacatgggaaacgctgaaagggcgcccggcagcagatcctttggccctgtgcccacactgcttctcctagctgccgctctcctcgccgtgagtgacgccttaggccgcccttccgaggaggatgaagagttagtcgtcccagaactggaaagggcccccggccacggaacgaccagactgagacttcatgcctttgatcaacagttggacctggagctcagacccgatagttcatttctggcccctgggtttacactccagaacgtagggaggaagagtggttctgagaccccactgccggaaaccgacttggcccattgcttctactctggcaccgtcaatggcgaccccagctccgcagccgctctatccttgtgtgagggcgtgcgcggcgctttttatttgctgggcgaagcctactttattcagccattgccagccgcctcagagcgtctagcgactgctgcacctggagagaaaccgcctgcgcctctccaattccatctgctgagaagaaacagacagggtgatgttgggggcacatgcggagtagtggatgacgaaccccgccccacaggcaaggctgaaacggaagatgaggacgagggaacggagggtgaggatgagggcgcccagtggtcccctcaagaccctgcccttcagggagtaggacaacctacaggaaccggcagcattaggaaaaagcgctttgtctcctctcacagatacgtggaaaccatgctggtcgcagatcagtctatggcagagtttcacgggtctggcctgaagcactatctgttgactttgttctcagttgcagcacggctgtacaagcacccatcaattcgcaactctgtgagcctggtggtggtgaagattctagtgatccacgacgagcagaaaggcccggaagtgacatccaatgccgctctgaccctccgtaacttttgtaactggcagaaacaacataaccctccatctgatcgtgatgcagagcactatgatactgccattttgtttacgaggcaggacctgtgcggatcgcagacctgcgacaccctcggcatggctgacgtgggaaccgtgtgtgatcctagccggagttgttccgtgattgaggatgacgggttgcaggccgcatttacgactgcacacgaattgggccatgtctttaatatgccacatgatgatgctaaacagtgcgcttcgttgaatggcgtcaatcaagattcccacatgatggccagcatgctaagcaacctggatcattcacagccatggagcccctgcagtgcttatatgatcactagctttttagacaacggccacggggagtgcctaatggacaagccacagaacccaatacaactgcctggggaccttccgggcacaagctatgacgccaaccgacagtgccagttcactttcggcgaagatagcaagcactgtcccgacgcagcaagtacttgtagtacattgtggtgtaccggcacatctggtggggtgcttgtctgccaaaccaagcatttcccctgggccgacgggacctcctgcggagagggaaagtggtgtattaatggcaaatgtgtgaataaaacagatagaaagcacttcgacaccccctttcatggaagctggggcatgtgggggccctggggggattgttccagaacctgcggcggcggggtgcagtatactatgagggaatgcgataatccagttcccaaaaatggaggtaagtactgcgagggaaagcgggtgcgttatcgttcttgtaacttggaagattgcccagataataacggaaagacatttcgcgaggaacaatgtgaggcacacaatgagttctcgaaagcctcatttggcagtggccctgccgtggagtggatccccaagtatgccggcgtcagcccaaaagaccgatgcaagctgatttgtcaggctaagggcatcggctactttttcgtattgcagcccaaagtggtggacggaacgccctgctcacccgattctaccagtgtttgcgtccaaggccaatgtgttaaagcaggatgtgaccgcattattgactcgaaaaagaaatttgataagtgtggtgtgtgcggcggcaacgggtcaacctgtaagaagatttccgggtccgttacctcagccaagcctggctatcatgatattatcacaatacctacaggcgctaccaatattgaagtcaagcaaagaaaccagagaggcagcagaaataacggctcttttttagctatcaaagccgctgacggcacttatatcctaaacggagactacaccctaagtaccctcgaacaagacattatgtacaagggagttgttctgcgctatagcggttcttccgcagcgcttgaacggatccgaagcttctcgccactgaaggagcccctgacgattcaggttctgactgtgggcaacgcgctgcggcccaaaattaaatacacttatttcgtgaagaaaaagaaagagagcttcaacgccatcccaaccttcagcgcttgggtcatcgaagaatggggcgagtgctcgaagtcatgtgaattgggctggcaaagacgccttgtggagtgtagagatattaatggacagccggcttccgagtgtgccaaggaggtaaagcccgcttccactcggccctgtgcggatcacccctgccctcaatggcagctgggagaatggtcttcatgctcaaagacttgtggaaagggatacaagaagcggagtctaaagtgtctgagtcatgacggaggggtgctctctcacgaaagctgtgacccactaaagaagcctaaacatttcatcgatttctgcacaatggcagaatgttcatag

SEQ ID NO: 178035 - DNA, 3312 bp, synthetic construct
  misc_feature 1..3312: note = Description of Artificial Sequence: Synthetic coding sequence
  source 1..3312: mol_type = other DNA
atggcccccgcctgccagatcctgcggtgggccctggccctgggcttgggtcttatgttcgaggtaactcacgcttttcgttctcaggacgaatttctgtcctcccttgaatcatatgagatcgccttccctacccgggtggatcataatggagccctgctggcattctctcctccgcccccccggcggcagcggcgaggaactggcgccacggctgagtccaggctgttttacaaagtggctagcccctcaactcacttcctgctgaacttaaccagatctagcaggctcttagcgggccatgttagcgtagaatattggacgagggaggggttagcatggcagagagcagctcgaccccattgtctgtatgctggacatcttcagggccaagcaagcacttcgcacgtggcaattagcacatgtggaggactgcacggactgatagttgccgatgaggaagagtacctgatcgaacccctccatggcgggcccaagggaagcagaagcccagaagagtcaggaccgcatgtggtgtacaaacgaagttcattgcgacacccccacctggatactgcctgtggcgtgagggatgaaaagccctggaagggacgtccctggtggcttcggacactgaaacctccacctgccaggcccctgggaaacgagaccgagcgtggacaacccggccttaaacgcagcgtcagcagagaaagatacgtggaaacgctcgtggtcgctgataaaatgatggtggcctatcacggaaggagggacgtagaacagtatgtgctggcgatcatgaacatcgtagcaaaattgttccaggactctagtctgggctccacagtgaatatcctcgtaaccagacttattctcttgaccgaggaccagccaacgttggaaattacccatcacgctggaaagtcccttgactccttttgcaagtggcagaaatcaattgtgaatcactcaggccatgggaacgctattccagagaatggcgtagctaatcacgacacagcagtcttgattaccagatatgatatttgtatttacaaaaataaaccctgtggaacgttggggctggcgcctgtcggtggtatgtgcgaaagggaaagaagttgcagtgtcaacgaggacattggcctggctactgctttcacaattgcccacgaaataggtcatacctttggaatgaaccatgacggagtgggtaactcttgcggagctcgaggccaggatcccgccaagctgatggcggcccatataacaatgaaaaccaatcctttcgtgtggtctagttgttcacgtgattatatcacctccttcctggattctggactaggactctgtctgaataacagacccccaaggcaggacttcgtgtaccctaccgtggctccgggccaggcctatgatgccgatgaacagtgcaggtttcaacacggcgttaaatcaaggcaatgcaaatacggcgaggtttgtagtgaattatggtgtctgtccaaaagcaacagatgcattaccaacagtatcccagctgctgagggcaccctgtgccagacccacaccatcgataagggatggtgctacaagcgcgtgtgtgtgccattcggctcacgtcctgagggggtcgatggggcctggggaccttggaccccctggggagattgcagccgcacatgtggtgggggagtgtcctcctcgtcgcgtcactgtgacagtccccggcccactatcggaggtaagtattgcttaggagaacgcagacgccaccggtcctgtaatacagacgattgtccacctgggagtcaggacttccgagaggtgcagtgcagtgaattcgacagcattccttttaggggaaagttttacaagtggaaaacatatagagggggtggcgtaaaggcttgcagtttgacctgcctggccgagggattcaacttctataccgagcgtgcggctgctgttgtggacggcacaccttgcaggccggacactgtggacatctgcgttagtggggagtgtaagcacgtgggttgcgacagagtcctgggatccgatttacgagaggataagtgtagagtctgcggtggtgacggcagcgcttgcgaaacaatcgaaggagtttttagcccggcatcacctggcgccgggtacgaagacgttgtgtggatccccaagggaagtgtgcacatctttatccaggacttgaatctatccctatcccaccttgccttgaagggtgaccaagagtcgctgttgttggaggggcttcccggaaccccacagccccacagactgccactggctggaacgacgttccagttgcgacaaggaccagatcaggtccagtctctcgaagctctgggaccgattaacgccagcttgattgtcatggtgctggcccggaccgagttgccagcattgcggtataggtttaacgccccaatagcaagggacagcctgccgccatacagttggcactacgcgccctggaccaaatgctcagcccaatgcgcaggtgggtcacaagttcaagctgtagaatgtcgaaatcagctggattcatctgctgtggctccacattattgctccgcccattccaagctgcccaagcggcagcgagcgtgtaacaccgagccttgcccgcctgactgggtagtgggaaattggagcttgtgtagtaggagctgcgacgccggggtacggtctagaagcgtggtgtgtcagagaagagtgtcagctgcagaagagaaggccctggacgacagcgcgtgtcctcaacctcgccctccggtattggaggcgtgccacggtccaacatgcccgccagaatgggccgcgctggactggtccgagtgcacgcctagttgtggtcccggactcagacaccgagtggttctatgcaagagcgcagaccatcgcgctacactgccacccgcccactgcagtcctgccgccaaaccacccgccactatgaggtgtaatctccgaaggtgcccacccgcccggtgggttgccggcgaatggggcgaatgctccgcccagtgcggggtgggccagcgccagcgatccgttaggtgtacttcacataccggacaggcttcccacgagtgtaccgaggcgctgcggccacctactactcagcagtgcgaagccaagtgcgactcccccaccccaggggacgggcccgaagagtgcaaagacgtgaataaagtagcttactgtcctctggtgttgaagtttcaattttgtagccgcgcctactttaggcagatgtgctgtaaaacctgtcacgggcactag

SEQ ID NO: 178036 - DNA, 2544 bp, synthetic construct
  misc_feature 1..2544: note = Description of Artificial Sequence: Synthetic coding sequence
  source 1..2544: mol_type = other DNA
caggacgacggcggcctgagccgggcccccggctgcggcgccgtgtgccctggtcatcacgagcactgtcaggttgctaaactgtttcaggatagcagccttgggtccaccgttaatatcctggtgacccggctgatattgctgaccgaggatcaaccaaccttggagatcacccatcacgcagggaaaagcctagattccttttgcaaatggcagaagtctattgttaaccatagtgggcatgggaacgcaataccagagaatggtgtggccaaccatgacacggctgtgctcattaccaggtatgacatctgcatatataagaacaaaccgtgtggaactctggggctcgcccccgtggggggaatgtgtgaacgggaacgctcatgctccgtcaacgaggatatagggctggccacggctttcaccatagcgcatgagattggccacacattcggcatgaaccatgatggcgtgggcaacagctgtggggcgcggggacaagatcccgctaagttgatggcggctcacataacgatgaaaaccaacccttttgtatggagttcctgtagcagagactatatcacatccttcttagacagtggccttgggctgtgcctgaacaatagaccccctaggcaggattttgtttaccctacagtagcaccagggcaggcatacgacgccgacgaacaatgccggtttcaacacggcgtgaaaagccggcaatgtaaatatggagaggtctgtagcgagctttggtgcttaagcaagagcaaccgttgcatcactaattcgatcccagcagccgaaggtacactgtgccagacacacactattgacaagggatggtgctacaagagggtatgtgttcctttcggaagccgccctgagggagttgacggcgcatgggggccctggactccttggggtgactgctccaggacttgcgggggcggagtgtcgagtagctcccgccactgcgactccccccgaccaacaatcgggggaaagtattgtctaggcgagcggagaaggcaccgttcctgtaatacggacgactgtccaccaggctcccaggacttccgcgaagtacagtgctccgagtttgattcgattcccttcaggggaaaattctacaaatggaaaacttaccgaggggggggagtgaaggcatgtagccttacttgtcttgccgagggctttaatttttataccgaacgggccgccgccgtggtcgacggcaccccctgtaggcccgatacggtggatatctgtgtctcgggagaatgtaagcatgtaggctgtgaccgagtattggggtctgacctccgtgaggacaaatgccgggtgtgcgggggggatggatctgcgtgtgagaccattgaaggagtgtttagcccggcgtcccccggcgctggatacgaagatgttgtgtggattcctaaaggatccgtgcatatttttatccaagatctgaacttgtctcttagtcacctggctttaaaaggggaccaggagtctctgctgctggagggcctgcccgggactccccagccccaccggctcccccttgcggggacgacttttcagctgcgccaggggccggaccaggtccaatcccttgaggcactcggccccattaacgcctcacttatcgtgatggtactggcccgcactgagcttcctgccctgcggtatcgtttcaacgctccgattgcgcgcgactcccttcccccttactcttggcattacgctccctggactaagtgctcagctcagtgtgctggcggctcacaggtccaggccgtggagtgccgcaatcagctagattcatccgcagtggctcctcactattgctctgcgcacagcaagcttccaaagagacagcgggcctgcaataccgagccatgcccgcctgattgggttgtaggcaattggtctctttgtagtcgctcttgcgatgctggtgtccgctcccgcagtgtggtctgtcagaggcgcgtgtccgccgccgaggaaaaggcattggacgacagcgcttgcccacagcccaggccccctgtgctggaggcctgtcatggcccgacctgtcctcctgagtgggctgccctggactggagcgaggtgagcagacccctcccatcacgtcccctgggctgtcccggcggtgtgtctaccgagactccactgcggggccttcaggtgtcttgtcccctcttgacatctcactgggggtccactctttccacaaaaaggccttttcagctacagtgcactccatcctgcggacccgggctgcggcatagagttgttttatgtaagtctgctgaccaccgtgcaactttgccaccggctcattgcagccccgccgctaagcctccagctaccatgaggtgtaacctgcggagatgcccgcctgccaggtgggtggccggagagtggggtgagtgcagtgcccagtgtggggtgggccaacgccagcggtcggtccgctgcacctcccacactggccaggccagtcacgaatgcaccgaggcttag

SEQ ID NO: 178037 - DNA, 4530 bp, synthetic construct
  misc_feature 1..4530: note = Description of Artificial Sequence: Synthetic coding sequence
  source 1..4530: mol_type = other DNA
atgccctgcgcccagcggagctggctggccaacctgagcgtggtggctcaactgctgaactttggggctctgtgctatggccgccagccacagccgggacccgttcgcttcccagacagacgtcaggagcattttataaaagggctgcccgagtaccacgtcgttggccccgtgcgagtggacgctagcggccattttctatcatacggcctacattacccaatcaccagctcgcggaggaaacgggacctggacggatcagaagattgggtgtactatcgtatttctcatgaagagaaggatctgttctttaatctgacggtgaatcagggcttcctaagtaattcttacattatggaaaagagatacggtaatctcagccatgttaagatgatggcgtcatcagcccctctgtgccatctctccggaacggtcctgcagcaggggactcgcgtcggcactgccgctctcagcgcttgccatggacttacaggattttttcaactgccccatggagactttttcatcgaacccgtgaagaagcacccactggtggagggaggataccaccctcacatcgtatataggagacagaaggtgcctgagaccaaggaaccaacttgtggactgaaggattctgttaacatatctcagaagcaggaactgtggagggagaagtgggagcggcacaacctcccttctaggagtttgtcccgccgcagcatttccaaggagaggtgggtggaaacgctggtcgtagccgacacaaagatgatagaataccacggttctgaaaatgtggaaagttatatattgacaatcatgaatatggtgactggtctgttccacaatcctagtattgggaatgccatccacatcgtagtcgtgagactgatactgttagaggaggaagaacagggccttaaaatagttcatcacgccgagaaaactctgtcatccttctgcaagtggcagaagagcatcaaccctaagagcgacttgaaccccgttcaccatgatgtggccgtgctgcttacccggaaggatatttgcgccggctttaaccgaccctgtgaaaccctggggctgtctcaccttagtggaatgtgccagccccatcgatcgtgtaatatcaacgaggactccggcctgcctctcgcctttacaattgcacacgagctgggccacagtttcggaatccagcatgatggcaaagagaatgattgcgagcctgtgggacgtcatccgtatatcatgtcacgccagctgcagtacgatccaacgcccctgacctggtcaaagtgctcagaagagtatataacacggttcctggaccgcggatggggcttctgtctggacgatatccccaagaaaaagggactcaaaagcaaggtgattgcccccggcgttatttatgacgtccaccaccagtgccaactccaatacggacccaacgccactttctgccaagaagttgagaatgtttgccagactctgtggtgtagtgttaaggggttctgtcgttcgaagttagacgccgctgcagatgggacccagtgcggggagaaaaaatggtgtatggcgggtaaatgtatcactgtgggcaaaaaacctgaatccatccctgggggttggggtcgatggtctccgtggtcacactgcagcagaacctgtggcgcgggcgttcaatctgcagagagactttgtaacaacccagaacctaagttcggagggaaatactgcactggcgagcgtaaaaggtatcgactttgcaatgttcacccatgccgctccgaagccccaacgttccggcagatgcagtgttcagagttcgataccgtgccgtataaaaacgagctgtaccactggtttcccattttcaacccaggatatgttgacattggtctaatccctaaaggagcacgagacattagggtgatggagattgaaggcgctgggaactttcttgctatacggagcgaagaccccgagaagtattatctcaacggaggctttataatacaatggaatggcaattataagctggctggaactgttttccagtacgatagaaaaggagacctggagaaactgatggccaccgggcccactaacgaaagtgtgtggatccagcttctgttccaagttactaatccagggatcaagtacgaatacacaatccaaaaggacgggttggataacgacgttgagcagcagatgtatttttggcaatatggacattggaccgagtgttctgtgacatgcggaaccggaattaggaggcagacagctcattgtataaagaagggacgtgggatggtgaaggcgacattctgtgatcctgaaactcagcctaatggccgccagaagaaatgtcatgagaaagcctgccctccaaggtggtgggcaggggaatgggaagcttgttccgctacctgcggcccccacggggaaaaaaagaggaccgtcctctgcatacagactatggtttctgacgaacaggccctgcccccgactgactgtcagcacctgctgaagcccaagacactgctgtcctgtaacagagatatactgtgcccgtcagattggaccgtgggaaactggtccgagtgtagcgtctcctgcggcgggggagtgcggattaggagcgtcacttgcgccaaaaaccatgatgagccgtgcgatgtgactagaaaaccaaactcacgtgccctttgcggcctacagcagtgcccgtctagtagaagagtgctcaaaccaaataaaggcaccatcagcaatggcaagaatcctccaacattgaaacccgtccccccccccacatcccgcccgagaatgctgacgaccccaacaggtcccgaatctatgagcacatcgactccagcaataagctcaccctcccctactactgctagtaaggagggagatctgggcggcaaacagtggcaggatagcagcacacagcccgagttgtccagtcgttacctcatatctactggttccacaagccaacccatcctcacatcccagtccctttctatacaaccatccgaagagaatgtgtcgagctccgacaccggacctacctctgaagggggcctggtcgcaacgacgactagcggatctgggctgagttcatctcgcaatccgatcacttggccagtgacacctttctacaataccctgaccaagggcccggaaatggaaatacatagtggctctggggaggagcgcgagcagccagaagataaggacgaaagcaaccctgtcatctggacaaagatcagggtcccagggaacgatgcccctgtagagtccactgaaatgccactggcaccccccctaactccggacttgtctcgtgaatcatggtggccccccttttccactgttatggaaggactccttccctctcagcgcccaaccacctccgaaaccgggactccccgcgtcgaaggcatggtgaccgagaaaccagccaatactctcctgcccttgggcggggatcatcaacctgagcccagtggcaaaaccgccaatcgaaaccacctcaagttaccaaataatatgaaccaaactaaaagttccgagcccgtgctgaccgaggaagacgcaacgtccctaattaccgaaggattcctgctgaacgcctccaattacaagcagctcactaatgggcatggatctgcacactggattgtcgggaattggtcagaatgctcgaccacctgcggactgggagcttactggaggcgggtcgaatgttccacacagatggactctgattgtgctgctatccagcggcctgaccccgccaagcggtgtcacttaagaccttgtgcgggctggaaagtgggaaattggagcaagtgttccaggaactgcagcgggggatttaaaatccgtgagatccagtgcgtggacagcagggaccaccgtaatctgaggcccttccactgtcagttcctcgcaggcattccacctcccttgtccatgtcttgcaaccccgagccctgtgaggcctggcaagtggaaccatggtctcaatgctcccggagctgcggcgggggcgtccaggagcgcggcgtcttttgtccaggggggctttgcgattggaccaaaagacccacttccaccatgtcctgcaatgagcatctctgctgtcattgggccaccggaaactgggatctctgcagcaccagctgcgggggaggatttcagaagaggacagtgcagtgcgtgccctccgagggcaacaaaacagaagaccaggatcagtgcttgtgcgaccacaagcctcggcctcctgaatttaagaaatgtaaccaacaggcatgcaagaagtcagctgacctgctctgtacaaaagacaagttgagtgccagcttttgtcagacattgaaggccatgaagaagtgttcggtgcccaccgtacgggcagagtgttgctttagctgcccccagactcacattactcacacgcagcggcaaaggagacagagactgctccagaagtctaaagaactatag

SEQ ID NO: 178038 - DNA, 4785 bp, synthetic construct
  misc_feature 1..4785: note = Description of Artificial Sequence: Synthetic coding sequence
  source 1..4785: mol_type = other DNA
atgccctgcgcccagcggagctggctggccaacctgagcgtggtggctcagctgctcaattttggagctctgtgttacgggaggcaaccccagcctggcccggttcgattcccggatcgccgccaggaacatttcattaagggcctgcctgaatatcatgtagtgggcccagtccgagtcgacgcttctgggcactttctgtcctacggtctccactaccctattacgtcaagccgcagaaagagggatctggacggatctgaggattgggtgtactatcgcatctcacacgaggagaaggacctgttttttaatctaaccgttaatcagggctttctgtctaattcgtatatcatggaaaagcgctatggaaacttatctcatgtcaagatgatggcctcaagcgcccctctttgtcacctgagcgggacagtgctgcagcaggggacccgagtagggaccgccgccctctcagcctgtcacggcttgactgggttttttcagctcccacacggagacttcttcatcgagcctgtgaagaaacaccccctggtggagggcgggtaccatccgcatatagtatacagaaggcaaaaggtgcccgagactaaagagccaacctgcgggctgaaggacagcgtcaatatctcccagaaacaggaactgtggcgcgagaaatgggagagacacaacctcccttcccggtctctgtcccggcggtccattagcaaggagcgatgggtcgagacactcgttgtagcagacacgaaaatgatcgagtaccacggcagtgagaacgtggaatcatatatccttacgattatgaatatggtgaccgggctgtttcataatccctctatcgggaacgcgatacacattgtggtagtgcgcctgatcctgctggaagaagaggaacaaggactgaagattgtgcatcacgcagaaaaaaccctcagttcattttgtaagtggcagaagagtataaaccccaagtcggatttgaatcctgtgcatcatgatgtggcagttctgctcactagaaaggatatatgcgctggctttaaccggccgtgtgaaacactaggtctcagtcatctatctggcatgtgccagccccataggagttgtaatatcaacgaggacagtggcctgccattggccttcaccatagcacatgagctaggtcattcttttggcatccagcacgacggaaaggaaaacgactgtgaacccgtcggaaggcatccatacatcatgagccgtcagttacaatatgatcccacccctttaacatggtcgaagtgcagcgaggagtacattacacggttcctcgatagaggctggggcttttgcctcgatgacatcccaaagaagaaaggcttaaagagcaaggtgattgcaccgggagtgatatacgacgtacaccaccagtgccagctccagtatgggcccaatgccactttctgccaggaggtggagaatgtttgccagactctgtggtgcagtgtgaagggcttctgtagatcaaagctggatgcagcagcagatggtacacagtgcggggaaaaaaaatggtgtatggccggaaaatgtatcactgtgggaaaaaaacctgagagcatccccgggggatggggccggtggtcaccttggtctcattgctccaggacttgcggcgcaggagtacagagtgctgagaggttgtgcaacaatcctgagcctaagttcggaggtaaatactgcactggggagcggaagcgatacagactttgcaacgtgcatccttgcagatccgaggcacctacattccggcagatgcaatgttccgagtttgataccgttccctataagaacgagctgtatcactggtttcccatctttaaccctgcacacccctgcgagctgtattgtagaccaattgacggacagttcagcgaaaagatgctcgatgcagtaatcgacggcacaccctgctttgaaggcggaaactccaggaatgtttgcataaacggaatttgtaagatggtggggtgtgactacgaaatagactcgaatgcaacagaggatcgatgcggggtgtgtctgggggatggcagcagttgccaaaccgtgcgaaagatgtttaagcagaaagaaggctcggggtacgtggacattggactgattcccaagggggcaagggacatcagagttatggagattgagggggcaggaaacttcttggccattcggtcagaggacccagagaagtactacctcaatggcgggttcattattcagtggaatggaaattacaagctggccggcaccgtgtttcagtatgacaggaaaggcgatttggaaaaactgatggctactggacctactaacgaatccgtttggatccaattgctctttcaggtaacgaatcctggcattaaatatgaatatactatccaaaaggacgggctggataacgatgtcgagcagcagatgtacttttggcagtacggtcactggacagagtgttctgttacttgcggaactggaatccggcgccagactgcacactgtattaagaaaggccgggggatggtgaaggcaaccttctgcgaccccgagactcaacctaacggaagacaaaaaaagtgtcacgagaaggcgtgtccccctcggtggtgggctggagaatgggaggcttgttcagcaacttgcgggccacacggtgagaagaaacggactgttctttgcatacagactatggtttctgacgaacaggcactgcccccgaccgactgccagcacctccttaaacctaagacccttctgtcatgtaatagggacattttatgtccatcagactggaccgtgggaaactggagcgaatgtagtgtgagctgcggagggggtgttagaattcgctccgtgacctgtgccaaaaaccatgacgaaccatgtgatgttacccggaaaccaaattctagagctttatgtgggcttcagcagtgcccttcctctcggcgagtcttaaagcctaataagggaaccatctcaaacggcaagaacccccccacgctcaagcctgtgccaccaccgacgtcaagaccccgcatgctaaccactccaaccggaccagagagcatgtctacttctacaccagccatttcctccccgtctcctacaaccgcatctaaggaaggagacctcgggggtaaacagtggcaggattctagtacgcaacccgagctcagctctcggtatctgatttctaccggtagcacctctcaacccattctgacttcacagagcctgtctatccagccgagcgaagagaatgtctcttccagtgacactggcccaactagtgaagggggtttagtcgccacaaccacctcaggctccggactgagctcaagcagaaacccgattacctggcccgttacacctttttacaacacgctgactaaagggcccgaaatggaaatacactctggcagcggcgaggaacgagaacagcctgaggataaggatgaatcgaatcctgttatttggaccaagatccgagtgcccgggaacgatgcaccagttgaatccacagagatgccactggctcctcccctcacccccgatctgtctagagaaagctggtggcctccgttctccactgtgatggaggggcttctgccatcacaacggcccaccactagcgagactgggaccccccgggtcgagggaatggtgacagagaaacctgccaacacgctcctcccccttggtggagatcatcagcctgaaccctcaggtaaaaccgcgaataggaatcacctgaagctgcctaacaacatgaatcaaacaaaaagcagtgaaccggtgttaacagaagaggatgctacatccctcataacagagggctttctcctaaatgcttcaaattataaacagctaacaaacggtcacggatctgctcactggatagttggcaactggagcgagtgctccacgacatgtgggctgggagcttactggagaagagtggaatgctctacccaaatggacagtgactgtgcagctatccagcgtccagatcccgctaagaggtgtcacttaaggccatgcgccggctggaaagttggaaattggtcgaagtgctctcggaattgttctggcggatttaaaatacgagagattcaatgcgtcgactcccgcgatcacaggaatctcaggccctttcattgccagttcctggctggcatccctccgcccctcagcatgtcctgtaaccccgagccctgcgaggcatggcaggtcgagccctggagccagtgctcaaggtcctgcggtgggggcgtccaggaacgaggggtgttttgccctggaggcctgtgtgattggacgaaacgtccgacaagcaccatgtcctgcaacgaacacctttgttgccactgggcgacaggcaattgggacctttgctcaacaagctgcggcggcggattccagaagagaactgtgcagtgcgtgccctccgagggaaacaagacagaggaccaggaccagtgtttgtgcgatcacaagccacggcccccagaattcaagaagtgcaatcagcaagcttgcaagaaatctgccgacctgttgtgtacaaaagacaagctatctgcgtctttctgccaaactctgaaagccatgaagaagtgttcagtcccgactgtgagagcagagtgttgttttagttgcccacagacccatattacccatacacagcggcagcgcagacagaggttacttcagaagtcgaaagagttatag

SEQ ID NO: 178039 - DNA, 699 bp, synthetic construct
  misc_feature 1..699: note = Description of Artificial Sequence: Synthetic coding sequence
  source 1..699: mol_type = other DNA
atgccctgcgcccagcggagctggctggccaacctgagcgtggtggcccagttgctgaactttggcgccctgtgttacggcagacaaccacaacctggcccagtcaggtttccagaccgtagacaggagcattttatcaaagggctgcctgagtatcatgtggttggcccagtcagagtagacgccagtggccattttctgagctacggcctacactaccctataacctcatccagaaggaaacgggacttggacggttccgaagactgggtctactaccgcatcagccacgaagagaaggacctgttctttaatctcaccgtgaaccaaggtttcctgtccaattcttatattatggagaaacggtacggtaatctatcacatgtgaagatgatggcaagctccgctcctttatgtcatctgagtggcactgttcttcaacagggaactcgcgtgggtacagcggctctgagcgcatgtcacgggctcacaggcttctttcagctgcctcatggggacttcttcatagaacccgtgaagaaacatccactggtggagggaggctatcaccctcatattgtatataggagacaaaaggtacctgaaactaaggaaccaacctgcgggcttaagggaatagtaacccatatgtcttcatgggtggaggagtccgtgctgttcttttggcttttctactag

SEQ ID NO: 178040 - DNA, 3675 bp, synthetic construct
  misc_feature 1..3675: note = Description of Artificial Sequence: Synthetic coding sequence
  source 1..3675: mol_type = other DNA
atgaagccccgggcccggggctggcggggcctggccgccctgtggatgctgctagcacaggtcgcggagcaggctcctgcttgtgctatgggaccagctgccgccgctcccggctctcccagcgttccaaggccccccccaccggctgagaggcccggttggatggagaagggcgagtacgaccttgtaagcgcctatgaggttgaccataggggcgactacgtgagccacgagatcatgcatcaccagcgcaggcgtcgcgccgtcccagtcagtgaggtggaatccttgcatctgcggctgaaggggagccggcatgacttccacatggatctccgcacgtcctcatctctggtagcccctggcttcattgttcagactcttgggaaaacaggcactaagagcgtgcagacgctgcccccggaggacttttgcttctatcaaggcagcctgcggtcgcacaggaactcgagcgtagccctctccacttgccaaggtctgagcggcatgatcagaactgaagaggccgactattttttgagacccctgccctctcacctctcttggaagctggggagggccgcccagggttcaagtccgagccatgtactgtataagagaagcaccgaaccacacgctcccggcgccagcgaagtcctcgtcacttcccgcacgtgggagctcgcacatcagcctctccatagttccgatctgcgactgggcttgcctcagaaacagcacttctgtggtaggcgcaaaaagtacatgccccagcctcccaaagaagacctctttattctccctgatgagtataaaagctgcttgaggcacaagcggtctctgctgcgttctcacaggaacgaagagctcaacgtcgagaccctggtcgtagtggacaaaaagatgatgcagaatcacggacatgaaaatataactacgtatgtactgactattcttaatatggtcagcgcgttatttaaagacgggacgatcggcgggaacattaacattgcaatcgtgggcctcattctgctggaagacgaacagcctggcctggtcatctcacaccacgctgaccacactctgagctccttttgtcagtggcaaagtggtctgatgggcaaggatggaacccggcacgatcacgctatcctgctaaccggcctcgatatttgtagctggaaaaacgagccctgtgatacattggggtttgctcctatctcgggcatgtgctccaagtaccgttcgtgcacaattaacgaggacaccggcttgggtctggctttcaccatagctcatgaatccgggcacaacttcggaatgatccatgatggcgagggcaatatgtgcaaaaagagcgaaggcaacatcatgtcccccacactggccggccgcaacggggtattttcatggtcaccgtgctcaagacagtacctgcataagttcctgagtactgcccaggccatatgcctagcagatcaaccaaaacccgttaaagagtacaagtatcctgagaagctgccaggtgaactgtacgatgctaatacgcagtgtaaatggcagtttggtgagaaagctaagctgtgtatgttggatttcaagaaagatatttgtaaggccttgtggtgtcatcgcataggccggaagtgcgaaactaagtttatgcctgccgcggaaggcactatctgcggtcatgacatgtggtgccgcggaggacagtgcgtgaaatacggggacgagggccctaagcccacccatggacactggtccgattggtccagctggtcaccatgttcccggacctgcggcggtggcgtgtctcatcgctcccgcctctgcactaaccccaaaccttcacatgggggaaagttctgtgagggatctacaagaacgctgaaactgtgcaactctcagaaatgtcctagagactccgtcgatttccgtgccgcccagtgtgctgaacacaattctaggcgctttcggggacgtcactataaatggaaaccgtacacccaggtagaagaccaggatctctgtaagctgtactgtattgcagaggggttcgatttctttttcagcctgagcaacaaggtgaaagacgggacaccatgtagcgaggactcacgaaacgtgtgtatagacggtatctgtgagagggtcggatgcgacaatgtgctaggatctgacgccgtagaggacgtgtgtggggtgtgcaatgggaacaattctgcgtgcacaattcaccggggactatatacaaaacatcaccacacgaatcagtactaccatatggtgacaataccctccggcgctcggtccatccggatctacgaaatgaatgtttcaacttcatatattagcgtccggaacgcgctcaggagatattatcttaatggtcattggacggttgactggccaggtcgctacaagttctctggcactaccttcgattaccgccgttcctacaacgaaccagagaatctgatcgcgacaggtccaactaacgaaacccttattgttgaactgctctttcagggtcgcaaccctggcgttgcctgggagtatagcatgccaaggctgggcacggagaaacagccccctgcccagcccagctacacgtgggcgatcgtgcgctctgaatgctctgtatcctgtgggggcggccagatgacagtgagggagggatgctatcgcgatctgaaattccaagtcaatatgagcttttgcaaccctaagacccgcccagtgacggggctcgtaccttgtaaagtgtccgcctgcccgcccagctggtctgtgggcaactggtcagcgtgttcacgcacctgtggtggtggcgcacagtcccgaccagtccagtgtacaagacgcgtacattatgacagcgagcctgtgcctgcctcgttgtgtccccagcccgctcctagctcgcggcaagcatgcaactcccaaagctgtcctcccgcctggtccgcaggcccatgggccgaatgtagccatacgtgcgggaaggggtggcgtaagcgcgccgtggcctgcaaaagtactaatcccagcgccagggctcagttactccctgacgctgtctgtacctcggagcccaagccccgcatgcacgaggcctgcttgttacaaaggtgtcacaaacccaaaaagctgcaatggcttgtcagcgcttggtctcagtgtagcgtgacctgcgagaggggtacccaaaaaaggtttctgaagtgcgcagagaaatatgtgtcgggaaagtatagggaactggcaagcaagaagtgctcacacttgcctaagccctctctggagctcgaaagggcctgtgccccactgccgtgcccccggcacccgcctttcgcagcggccggaccaagtcgaggctcctggttcgctagcccctggagtcagtgtaccgcgagctgtggcgggggagttcagacacgatctgtgcaatgcctggccggcggacggcctgccagtggctgtctgctgcaccagaagcccagcgcatcccttgcttgtaatacacacttttgcccaatcgccgagaagaaagatgctttctgcaaagattactttcactggtgctatctcgtgccacagcacggaatgtgctcacacaaattctacggaaagcagtgttgcaagacctgttcaaaaagcaacctgtag

SEQ ID NO: 178041 - DNA, 2787 bp, synthetic construct
  misc_feature 1..2787: note = Description of Artificial Sequence: Synthetic coding sequence
  source 1..2787: mol_type = other DNA
atgaagccccgggcccggggctggcggggcctggccgccctgtggatgctgcttgctcaggtggctgagcaagctcctgcgtgtgctatgggtccagcagctgcagcccctggcagtccgagcgtgccccgcccacctcccccggccgaacgtcctggatggatggaaaaaggcgagtacgatttagtctcagcctacgaggttgatcatcggggcgactatgtgagtcatgaaattatgcatcaccagcggaggagaagggcagtgcctgtttccgaagtggagtcattgcacctccgcctcaaggggagcagacacgactttcatatggacttgcggacatccagctctctggtggcacccggcttcatcgtgcagacactcggcaagaccggaacaaaatcggtgcagaccttgcctccagaggacttctgcttttaccaggggtcgctacggagccaccgcaattccagtgttgcgctttctacctgtcagggtctttccggcatgatccggaccgaagaggctgattactttttgagacctctgccctctcacctcagttggaaactcggaagagcggcacaaggaagcagccctagccatgtcctgtacaagcgatctaccgagccccacgcacccggagcctccgaagtcttagttaccagccggacctgggaacttgcccaccaacctttgcatagtagcgatctccgactcggattgcctcaaaaacagcacttctgcggtagacgcaaaaaatacatgccccagcctcctaaagaggacctgttcatcctgccagacgaatacaaaagttgcctgaggcataagcgatctttactgcggtcccatcgcaacgaagagctcaacgtcgagacattggttgtggtggataagaagatgatgcagaatcacgggcacgaaaatattaccacctacgtgctcactattctcaacatggtgagtgccttatttaaagacgggactatcggggggaatatcaacattgcaattgtgggactcatcctactggaggacgagcaacccggtcttgttataagccaccacgctgaccacacccttagttctttttgtcaatggcaatcaggactcatggggaaggatggcacccggcatgaccacgcaattcttctaacaggtctggacatatgttcctggaaaaacgaaccctgtgacactctcggcttcgcccctataagtggaatgtgttcgaagtatcgctcctgcactatcaatgaagacaccggcctgggactggcctttactatcgcccacgaaagcgggcacaactttggaatgatccacgacggggaggggaatatgtgtaaaaaaagcgagggcaatataatgtcgcccacgctggccgggaggaatggtgttttttcttggtcaccttgctccaggcagtatctccacaagttcctgtccacagcacaggcaatatgcctcgccgatcagccaaagccagttaaggagtacaagtaccctgagaaactcccgggagagctctacgatgccaatacccagtgcaagtggcaatttggggaaaaggccaagttatgcatgcttgattttaaaaaagatatctgcaaggcgctttggtgccataggatcggtcggaagtgcgaaaccaaatttatgccagctgcggagggcactatatgtggccatgacatgtggtgcaggggaggccaatgcgtcaagtacggggatgagggacctaagccaacacacggacactggtcagattggtcatcttggagcccgtgctcccggacctgcgggggtggggtgagccatagatcccggctttgtaccaaccccaagccctcccacggggggaaattttgcgagggttcaaccagaacactgaaactttgtaatagccagaagtgcccacgggacagcgtggacttccgtgctgcacaatgtgctgaacataatagccgtagatttaggggacggcactacaagtggaaaccgtatacccaggtggaagaccaggatttgtgcaagttgtattgcatcgccgagggcttcgactttttcttcagtttatccaataaggtcaaggacgggaccccctgctccgaagacagccggaacgtgtgcattgacggcatttgtgagcgggtgggttgcgataacgtcctgggctcagacgctgtggaggacgtctgtggcgtttgtaacggaaacaattcggcatgtacaattcatcgcggtctatataccaaacatcaccacacaaaccagtactaccacatggtgactatcccgagtggagccaggagcatccgcatatacgaaatgaacgtctcaaccagctatatttctgtgagaaatgccctcaggagatactacttaaatggccactggaccgtggactggcctggacgatataagttctctggtactacctttgattataggcggtcatacaatgaaccagaaaaccttatcgcgaccggacctaccaatgaaactctgattgtagaacttttattccaagggcgtaaccctggggtggcctgggagtattccatgcccaggctggggaccgagaagcagccccctgcccagcccagttacacctgggccattgtacgttcagaatgctccgtctcatgtgggggcgggcaaatgacggtccgggagggatgctatagggacttcttgtacttcatgttctacctctcccaactcttcgccagtgagtgtccattcaaaaacacgttgctgcacgccttcctgtgcaaatag

SEQ ID NO: 178042 - DNA, 3288 bp, synthetic construct
  misc_feature 1..3288: note = Description of Artificial Sequence: Synthetic coding sequence
  source 1..3288: mol_type = other DNA
atgtgcgacggcgccctgctgccccccctggtgctgcccgtgctgctgttgctggtctgggggctagacccaggtaccgcagtgggagacgccgccgctgacgtggaagtggtgcttccctggcgggtccgaccagacgacgtgcacttgcctccgctgcctgccgcccccggaccacgccggagaaggagaccgaggaccccgcccgcagcacccagagctagacctggagagcgagctctgctgcttcacctgcctgccttcggacgcgacctctacttgcagctgcggcgggacttaagattcttgtcccggggcttcgaggttgaggaagctggtgccgctagacgccgagggcggccagcagagttatgtttctacagtggaagagtgcttggacaccccggaagtctggtaagcctatccgcctgcggagctgccggaggtttagtaggactgattcagctgggccaggagcaagtattaatacagccacttaataacagccaaggcccgttttcaggaagggaacaccttatccgacggaaatggtcactaacccccagtccatcagctgaggcccagcgccctgagcagctgtgtaaggtgcttacagagaagaagaagcctacctggggaagaccgagccgcgactggcgggagagacgaaatgcaataaggttaacaagcgagcacacagtggagactctggtcgtcgcagacgcggatatggtccaatatcacggggcagaagcggcccagcggttcattctaactgtgatgaacatggtttataatatgttccagcaccaatcgctgggcattaagatcaacattcaggttacgaaactggttcttctgagacagcgccctgcaaagctgtcaatcgggcaccatggggagcgcagtttagagagcttctgtcattggcaaaacgaggaatacgggggggccaggtacctcggtaacaaccaggtgccgggagggaaagacgacccacctctggtcgatgccgctgttttcgtcacacgcaccgacttctgtgtgcacaaggacgagccctgcgataccgtcgggatagcttaccttggcggtgtctgttctgcaaaaagaaaatgtgtcttggccgaggataacggcctcaatcttgcttttaccatcgcccatgaactgggacacaatctgggcatgaatcatgacgatgatcattccagttgcgctggacgatctcacatcatgtcaggtgaatgggtaaaaggccgcaacccgtccgatctgagctggagctcgtgctcccgtgatgatctcgaaaattttctgaagagtaaggtgtctacctgcctcctcgtgactgacccccgaagccagcatactgtgaggctgcctcataagttgccagggatgcactatagcgctaacgagcagtgtcagattttattcggcatgaacgccacattttgcaggaacatggagcacctgatgtgtgctgggctctggtgcttggtcgagggcgacacatcttgcaaaacgaagttagatccccctctggatgggacagagtgcggagctgacaagtggtgcagagcaggggaatgtgtgtcaaagacaccgattccagagcacgtagacggagattggtcaccctggggtgcttggagtatgtgttcacgaacatgcggtaccggagcccggttccgtcagagaaagtgcgacaatccccctcccggccccggcggtacccattgtcccggcgcgagcgtcgaacatgccgtctgcgagaacctcccctgtccaaaagggctcccatctttcagggaccagcagtgtcaggcccacgacaggctcagccccaaaaagaaaggcctgttgaccgctgtagtggtggacgataaaccctgcgagctgtattgcagccctctaggcaaagagagcccattgttagtagcagatcgggtcctggacggcacaccctgtggcccttatgagactgacctgtgcgtgcacggaaaatgccaaaagatcggttgcgatgggattatcggttccgctgccaaggaggatagatgcggggtatgcagtggcgacgggaaaacatgccatctggtcaagggagatttctctcacgcgagaggaactgcacttaaagactctggaaagggaagtatcaacagcgactggaagattgagctgccgggagagttccaaatcgccggaactacggtaagatacgtgcgcagggggctgtgggagaagatatccgccaagggtcctactaaactgcctctccatctcatggtgcttcttttccacgatcaggattatggaatccattacgagtatacggtgccggtgaacaggacagcagaaaaccaaagcgaacctgagaagccccaggatagtctgtttatttggactcactccggttgggaaggctgttccgttcagtgtggcgggggcgagcgtcggacaatcgtgtcttgcacacggatcgtcaacaagacaaccaccctggtcaatgacagcgactgccctcaggcctcccgccccgagccgcaggtgcggcgctgtaacctccacccttgtcagagtcggtgggttgccggcccttggagcccttgctcagctacttgtgagaagggatttcaacatcgtgaggtgacctgtgtctatcaactccagaatggaacgcatgtagccaccagaccactgtactgtcccgggcctagaccagctgcagtccagagctgcgaaggccaagactgcctctccatctgggaggccagcgagtggtcccaatgttcggcctcctgtgggaagggcgtatggaagcgtaccgtggcctgcactaattcccaaggcaaatgtgacgcatccacaagaccgcgcgctgaagaggcgtgtgaggactatagcggatgttatgaatggaagactggagattggagcacctgttccagcacctgtggtaaggggctgcagtccagagtggtccagtgcatgcataaggtcaccggacgtcacgggtcggaatgtcctgccttgagcaagcccgccccataccgccagtgttaccaggaggtgtgcaatgatcgaatcaatgccaacaccattacttccccacgactggctgcactgacttacaaatgtacccgcgatcaatggactgtatattgtcgtgtgatccgcgaaaaaaatctgtgccaggacatgagatggtatcaacggtgttgccagacttgtcgcgatttttatgccaataagatgcgccagcctccccctaatagctag

SEQ ID NO: 178043 - DNA, 3666 bp, synthetic construct
  misc_feature 1..3666: note = Description of Artificial Sequence: Synthetic coding sequence
  source 1..3666: mol_type = other DNA
atggagtgcgccctgctgctggcctgcgccttccccgccgccggcagcggccccccccgtgggctggccggtctcggcagggtcgccaaggccctgcaactttgttgcttgtgctgcgcgtcagttgccgcagcactcgcgtccgatagtagctctggtgcctcgggacttaatgacgattatgtgtttgtcacacctgtcgaggtagattccgccgggtcgtacatctcccatgacattctgcataatgggcgtaagaagaggtctgcccagaatgcacgaagcagcttgcactacagattttccgcattcggacaagaattacatcttgagcttaaacctagtgcaatcctgtcctcacatttcatcgttcaggtactcgggaaggatggggcctccgaaacccagaaaccagaggtgcagcagtgcttttatcagggattcataagaaatgatagttcgtcttccgttgcagtgtccacttgtgctggcctgagtggattgataaggacccgcaaaaatgagttcctcatttcccctctgccccagctactggctcaggagcataactacagctcacccgccgggcatcatccacacgtgttatataaacgtacggccgaggagaagatccagagatatagaggttacccgggatctggtagaaactaccctggctacagcccctcccatatcccccatgccagtcaaagccgggagactgaatatcatcaccgtaggctgcagaaacaacatttttgcggaagacgcaagaaatatgcccctaagcctcctacagaagatacttacctccgattcgacgagtacggatcttcaggacgacctcgccgcagcgccggcaaatcacagaaaggcctgaacgtcgagaccttggtcgtggcagataagaagatggttgagaagcacgggaagggtaacgttacgacatatatcctgacggtaatgaacatggtttcagggttatttaaggacggtacaattgggtctgacattaacgtggttgtggtgtccctcatactcctagagcaggaacccgggggactgcttataaatcaccatgcagatcagagtctgaatagcttctgccagtggcagagcgccctgatcggaaagaatgggaagcggcacgaccacgccattctgcttacagggtttgacatttgtagttggaagaacgaaccctgcgacaccctcggattcgccccgataagcggaatgtgtagcaaatatagatcctgcaccattaatgaggacacggggctaggtttggccttcaccattgcacacgagagtggccataattttggtatgattcacgacggtgaaggaaatccttgtagaaaggcagagggcaacatcatgtctcctaccttgacggggaataatggcgtgtttagctggagcagttgctcgcgccaatacctgaagaaattcctgtccactccacaggctggatgtcttgtggatgagcccaagcaggccggccagtacaaatatcccgataagcttcctggtcagatctatgacgccgatacccagtgtaagtggcagttcggcgcgaaggccaaactgtgctccttgggcttcgtcaaagacatttgcaagtcattatggtgccatagagtcggtcatcggtgcgagacaaagtttatgcctgcagctgaaggcacagtatgcggactctccatgtggtgccgccaggggcagtgcgtgaagtttggcgaactcgggcctcggcccatccatggccagtggtctgcttggagtaaatggagcgagtgttcacggacctgcggggggggcgtgaagtttcaggaacggcactgcaataatcccaagcctcagtatggggggcttttctgccctggatcatcacgaatttaccagctgtgcaacattaatccgtgtaacgagaatagcttggattttcgggcacagcagtgtgccgagtacaatagcaagccctttcgcggctggttttatcagtggaagccctacacgaaagtggaggaggaagatcgttgcaagctctattgcaaagcggagaatttcgaattcttcttcgccatgagtgggaaagttaaggatggcactccctgcagcccaaataagaatgatgtttgcattgatggcgtctgtgagctggtgggctgtgatcacgaattaggatcaaaagccgtttcagacgcttgtggtgtctgtaagggagacaattcgacgtgcaaattctacaagggactgtatctgaaccagcacaaggcgaatgagtattatcctgtggtgctcatcccagcaggtgcaaggtcaattgagatccaagagctccaggtaagctcttcctacctggctgtaagaagtttgagccagaaatattatctgacaggcggttggtccatcgattggcctggtgagttccctttcgcaggaacaaccttcgagtaccagcgatcttttaaccgcccggagcgattgtatgcacctggaccaactaatgaaaccttggtcttcgagatcctaatgcaggggaagaacccaggcatcgcctggaaatatgcgttacccaaagttatgaacgggactccccccgctactaagcggcccgcctatacatggagtatagtacagtccgagtgttcagtatcttgtggtgggggctatattaacgtgaaggccatatgtctaagggatcagaacacccaagtgaatagctccttctgctccgctaaaaccaagcccgttactgaacccaagatctgcaacgctttcagttgccctgcctactggatgccaggtgagtggagcacttgctccaaagcctgtgcaggtggccagcagtctagaaagatccaatgcgtccagaagaaaccctttcagaaagaggaggcagtgcttcactctctgtgtcctgtaagtacccccacacaggtacaggcctgtaacagtcacgcttgccctcctcagtggagccttggcccctggtctcagtgctccaagacttgtgggaggggtgtgagaaagcgcgagctcctgtgtaaaggaagcgccgcagagaccttaccggaatctcagtgtactagtctaccccgacccgagctccaagaaggttgtgttctggggagatgtccaaaaaattcccgcctccagtgggtagcgagcagctggagcgaatgttccgccacctgcggccttggcgtgagaaaacgggagatgaaatgctctgagaaaggtttccagggaaagctgataactttcccagaaaggcggtgtcgcaatattaaaaaacctaacctcgaccttgaggaaacatgcaaccgcagggcttgccctgcacatcccgtgtacaacatggtggccggctggtatagccttccttggcaacaatgtacagtaacttgtggcgggggagtccaaacgaggtccgtgcactgtgtacagcaaggtcggccttcgtctagctgtctgctccaccagaaacctcctgtcttaagagcctgtaatacaaatttctgtcccgctccagaaaagcgggaagacccaagttgcgtggacttttttaactggtgccatctcgtaccccaacacggagtgtgcaatcataaattctacggcaaacagtgctgtaagtcctgcacgcgcaaaatttag

SEQ ID NO: 178044 - DNA, 825 bp, synthetic construct
  misc_feature 1..825: note = Description of Artificial Sequence: Synthetic coding sequence
  source 1..825: mol_type = other DNA
atggagtgcgccctgctgctggcctgcgccttccccgccgccggctccggccccccgagaggactggctggattaggacgtgtcgctaaagcacttcaactgtgttgtctttgttgcgcgtctgtcgctgcggcactggcatcagatagctcgtcaggagcttccggcctgaacgatgattacgtgttcgttaccccagtcgaagtggactctgctggtagttatattagccacgacatcctgcataatggccggaagaaacgatccgcgcagaatgctcggtcctcgctgcattatcggttttccgctttcgggcaggagctgcatttggagttaaaaccatcagctattctgtcatcccatttcattgtacaggtgttggggaaggatggtgccagcgagacccagaaacctgaggtgcagcagtgtttctatcaaggatttatcaggaatgatagtagctcttccgtagcagtgtctacctgcgccggactctcaggactgatacgcactcgtaaaaatgaattcctgattagccctcttccacagctgctcgcacaagagcacaactactcatcacccgctggacaccacccccacgtactgtacaagcgcacagcagaggaaaaaattcagcgttataggggatatcccggatctggcagaaattatcccggctattcgcctagccacatcccacatgcctcgcagagtagagagaccgaatatcaccaccggcgcctccaaaagcagcacttttgcggacggcggaagaaatgcatttgctctcaggccagccatagaggccacctatccaaggtgtag

SEQ ID NO: 178045 - DNA, 3636 bp, synthetic construct
  misc_feature 1..3636: note = Description of Artificial Sequence: Synthetic coding sequence
  source 1..3636: mol_type = other DNA
atggacccccccgccggcgccgcccggcggctgctgtgccccgccctgctgttgctcttattgcttctgcctccacccttgcttccgcctccgccaccgcctgccaatgcacggctagccgctgctgcagaccccccaggcggccccctagggcacggggctgaacgaatccttgcagtgccggtgcgcacggacgcccagggtcgcctggtatcacatgtcgtgagtgctgccacctctcgcgccggcgtcagagcccggagggcagcccctgttcgaaccccaagcttcccaggggggaatgaagaggaacctgggagccatcttttctataatgtcacggtattcggacgagatttgcacttgagactgagaccaaacgctagattggtggcccctggcgcaaccatggagtggcagggagaaaaagggaccactagggtggaacccctgctgggaagttgcctgtacgtgggtgatgtcgctggtctggcagaagcaagctcagtcgcactatccaattgtgacgggctcgcaggacttatccgcatggaggaagaggagtttttcattgagcctcttgaaaaaggtctcgcggctcaggaggccgaacaaggaagagtgcatgtggtgtaccgaagaccgccgacctcaccgccactgggcggaccgcaggcattagacactggggcgtctcttgattccctggactcactgagtagagctctgggagtgctggaggagcatgctaatagttcgagacggcgcgctaggcgccatgcggctgacgatgactacaacatcgaggtgttacttggggtggatgattccgtcgtccagttccatgggaaggaacatgtccagaaatatctcctgacactaatgaatatcgtgaacgagatataccacgacgagtccctgggggcccatatcaacgtggtgctggtcaggattattcttctgagctatggaaaatcgatgtccctgatagagattgggaacccgagtcagtctctcgaaaatgtgtgcaggtgggcgtacctgcagcaaaagcctgacacaggacatgacgagtaccacgaccatgccatcttcctgactaggcaagacttcggcccgagtgggatgcagggatacgctcctgtgactgggatgtgccatcccgtcagatcatgcacgctcaaccacgaggatggattctcctccgcgttcgttgtggctcacgagactggacacgtgttagggatggaacatgacggtcagggtaatcggtgcggggatgaggtgagactgggtagcatcatggctcctttagtccaggcagcctttcataggttccactggtcgagatgtagccaacaagaattgagtcgctatctgcactcatacgattgccttctagacgatcctttcgctcacgactggccagctctgcctcagcttcccggtttacattattccatgaatgagcaatgtcgctttgattttgggctcgggtacatgatgtgcaccgctttccgcactttcgacccttgcaaacagctgtggtgttcccacccagataacccatatttctgtaaaacaaagaagggcccccctctggatggaacgatgtgtgcccccgggaagcactgtttcaagggacattgcatctggctaactcctgatatactgaaaagagacgggagctggggtgcctggagccccttcgggtcgtgttccagaacgtgtgggacaggggtcaagttcaggactcggcagtgtgataatccccatccagcgaacggaggtaggacatgcagcggactggcgtacgattttcagctgtgctcccggcaagattgtccagatagccttgctgactttcgggaagagcagtgtagacagtgggacctctatttcgagcacggtgacgcccagcatcactggctcccacatgagcatcgagacgccaaggagcggtgccacctatactgcgaatctcgcgaaaccggtgaggtggtgtcaatgaagaggatggtgcacgatggcacacgctgttcctataaggacgcattcagcctctgtgtccgcggggattgtagaaaagtcggctgcgatggggtgataggctcatctaaacaggaggacaagtgtggtgtgtgtggaggtgataatagtcattgcaaggtcgtgaaggggacatttacgaggtcacctaagaagcacgggtacattaagatgttcgaaatacccgccggagctagacacctgcttatacaggaggtcgatgccacatcgcaccacctggccgtgaaaaaccttgagacggggaaatttatattgaatgaggagaacgacgttgacgcttcatctaaaactttcattgctatgggagtcgagtgggaatatagagatgaggacggtcgagaaactttacagaccatgggccccctccacgggacaattacagtgctagtgatacctgttggagacacacgggtaagtttgacatataagtatatgattcatgaagacagcttgaacgtggacgataacaacgtgctggaggaggactcagttgtgtacgagtgggcactcaagaagtggagcccttgcagtaagccgtgtggcgggggaagtcaattcactaaatacggatgcagaagacgtctggatcataaaatggtacacagaggcttctgtgcggcactcagtaaaccaaaagccataaggagagcttgtaacccacaggagtgcagccagcccgtgtgggtgactggggagtgggagccctgttcgcagacatgtggccgaactggtatgcaggtgaggtctgtgagatgtatccagccccttcacgacaacactacccgatccgtccacgcgaaacattgcaacgatgccaggccagaatcacgccgggcttgtagccgagaactgtgccctgggcggtggagagccggcccttggagccagtgcagtgtgacctgcggcaacgggacgcaggagagacccgtgctgtgccggactgccgatgattctttcggcatttgtcaggaagaacgcccagaaactgcccgcacatgcaggctggggccctgtccgcgcaacatttcagatccctcaaagaagtcatacgttgtgcagtggctgtctcgtcctgatcccgacagtccaataagaaagatctcatctaaagggcactgccagggggataagtctatattttgtcggatggaagtactttcgcgctactgctcaatccccggttataacaagctatgctgtaagtcatgtaatctttataataatctcacaaacgtggagggacgaatcgagcctccgccaggcaagcataatgatatcgatgtttttatgcctacgctgcctgtgccaacagtcgcaatggaggttcggccatccccatccacaccccttgaggtacccctgaacgcttctagtactaatgccaccgaagatcaccctgaaaccaatgcggttgacgagccatataagattcatggtttagaggatgaggtgcagccacctaatcttatcccacgccggccgagcccctacgagaaaactaggaatcagcgcatccaggagctgattgacgagatgaggaagaaggagatgttgggcaagttttag

SEQ ID NO: 178046 - DNA, 1701 bp, synthetic construct
  misc_feature 1..1701: note = Description of Artificial Sequence: Synthetic coding sequence
  source 1..1701: mol_type = other DNA
atggacccccccgccggcgccgcccggcggctgctgtgccccgccctgctgctgctgctcttgctcctgccaccaccacttctgcctcccccacctccgcccgccaacgcacggttagccgccgctgcagacccacccggtggccccctgggacacggggccgagcgaatacttgccgtgcccgtgcgcacagacgctcaaggtcgactcgtctctcacgtggtctccgcagctacttcccgcgctggtgtgcgggctcggcgtgcggctcctgtgaggacccctagcttcccagggggcaatgaagaagagccgggaagtcatcttttttataatgtcaccgttttcggcagagacctccacttgcgactgagacccaacgccagattggtcgctcccggcgcaaccatggaatggcagggagaaaaaggaaccacccgcgtggaacccctgttggggagctgcctctatgtgggagacgtcgccggtctggctgaggcatcctctgtggccctgtcaaattgcgatgggcttgctggactgatccggatggaggaggaagagttcttcatcgaacccctggaaaaggggctggcggctcaggaggccgagcagggcagggtacatgtcgtctaccgaagacccccgacaagcccccctctgggcggacctcaagccttggacacaggcgctagtctggatagcctcgatagcctctcccgggctctgggcgtgctagaggagcacgccaatagcagtcgacggcgagcccgccgacacgccgctgacgacgactacaacatcgaagtactgctgggggttgacgacagtgttgtgcagtttcacggcaaagagcacgtgcaaaagtacctgctgacgttgatgaacattgttaacgagatttaccacgacgagagccttggggcccatataaatgtggtcctcgtgcgtatcatcctcttaagctatggcaagtccatgtcactaatcgaaattggtaatccgagccagagcctggaaaacgtgtgtcgctgggcgtacctccagcaaaaacctgataccgggcacgacgaataccacgaccacgccatcttcctgacaagacaggacttcgggccgagcgggatgcagggttacgcaccagtcaccgggatgtgccatccggtccgcagctgcactctaaaccacgaagacggcttttcttctgcgttcgtggtcgctcacgagaccggacatgtgctgggaatggagcacgatggtcagggtaatcgctgcggcgacgaagtccgactcgggtccatcatggctcccctggtgcaggccgcgttccatagattccattggtcccggtgctcacagcaagaactcagtagatacctacactcttatgattgtctattggatgacccttttgctcacgactggccagcattgccacaactgccagggctccactacagtatgaacgagcagtgcaggtttgacttcggtctgggttacatgatgtgcacagcatttagaacctttgatccctgtaagcagctctggtgttcccaccctgataacccctacttctgcaaaaccaaaaaaggcccaccactggatggaactatgtgcgcgccagggaaattccggcctggagccgttgcacacgcatgctacccgagtactcttggtggacagggacgctggatcgcgtag

SEQ ID NO: 178047 - DNA, 4515 bp, synthetic construct
  misc_feature 1..4515: note = Description of Artificial Sequence: Synthetic coding sequence
  source 1..4515: mol_type = other DNA
atgtgggtggccaagtggctgaccggcctgctgtaccacctgagcctgtttatcactagatcctgggaggtagactttcatcctcgacaagaagccctggtcaggaccttaacctcttacgaggtggttattcctgagcgcgtgaacgaatttggggaggttttccctcagtctcatcatttctctcggcagaaacgaagcagcgaggccctggagccgatgcccttccggacgcattataggttcacggcctacggacagctcttccagctgaacctcactgccgatgctagtttcctcgccgctggatatacagaggtccacctgggaaccccggaacgtggcgcctgggagagtgacgctggcccatctgacctccgccattgcttctatcgcggtcaagtcaacagccaagaagattacaaggccgtcgtctccctgtgcggtggcctaactggaaccttcaaggggcagaacggggagtatttcctagaaccaattatgaaggccgatggcaacgagtacgaggatggtcacaacaagccacatctgatctatcgacaggatctgaataattccttcctgcagactctcaaatactgctcggtctccgaaagccagataaaagaaactagcctcccatttcacacctactccaacatgaacgaagacctgaacgtaatgaaagaaagggtgttggggcacacttctaaaaatgttcccttgaaggatgagaggagacattctcgcaaaaaaagattaattagctacccaagatacattgagattatggtaactgcggacgcgaaggttgtctccgcacatgggtctaatctgcagaactatatcctgacactgatgtcaattgtggcaacgatctacaaggacccatctatcggaaatctgattcacattgtagtagtgaagctagtgatgatacatagggaggaggagggacctgtcattaactttgatggagccactacactaaaaaacttttgttcctggcagcagacccagaatgacctagacgatgtgcaccctagccaccatgatacggctgtgctgattacgcgggaggatatctgttctagcaaagagaagtgcaatatgctgggcctgtcttaccttgggactatctgcgaccccctgcagagctgctttattaacgaggagaagggcctgattagtgcctttacgattgctcacgaattaggacatacactcggagtgcaacatgatgacaatcctcggtgcaaagagatgaaggttactaagtatcacgtaatggctccagcacttagctttcacatgagtccatggagttggtccaattgttcccggaagtacgtgacagagtttcttgacacagggtacggcgaatgccttcttgacaagcctgacgaggagatttacaacctgccatcggagcttcccgggagcagatatgacgggaacaagcagtgtgaattagccttcggacctggcagccagatgtgcccccacatcaatatctgtatgcacctgtggtgtactagtacggagaaattacacaagggctgcttcactcagcatgtgcctccggccgacggtacggattgcggccccggcatgcactgtaggcacggactctgcgttaacaaggagacggagaccagacccgtcaacggcgaatggggtccttgggaaccctattcaagctgctcgcgcacctgtggtggagggatagaatcggccactcgcaggtgcaatagaccagagcctagaaacggaggaaattattgtgtggggaggaggatgaagttccgtagttgcaacacagattcctgtccaaagggcacccaggactttcgcgaaaaacagtgctcagactttaatggtaagcacctagacatttcaggaattccatcaaacgttcggtggctgcccaggtatagtggtatagggacgaaggataggtgcaaactgtattgccaggtcgccggcaccaactacttctatctcctgaaagatatggtggaggacgggacaccgtgtggcacagagtcgtataatatcgactgcaactgtgtgcttaaggcagccggctgcgatcacgtccttaacagctcagcaaagatcgacaagtgtggtgtttgtggcggggacaacagctcgtgcaaaacaattactggagttttcaactccagtcactacggctacaatgtagtagtgaagattccggctggagcgactaacgttgacattcggcagtacagttacagcgggcagcccgacgactcctatttagccctgtcagacgccgagggcaacttcctgtttaatggcaactttctgctcagcacctcaaagaaggagattaacgtccaggggacccgaacagtgatcgagtatagcggaagcaataatgccgtggagcgtatcaactcaactaatcgacaggagaaagaaatcctcatcgaagtgttgtgcgtaggtaatctctacaaccccgacgtgcattatagtttcaatattccactggaagagagaagtgacatgttcacatgggacccatatggcccttgggaaggttgcacaaaaatgtgccaggggttgcaacgcagaaatattacctgtatccataaatcggatcattccgtggtttccgacaaagaatgtgaccacctacccctcccctccttcgtcacccaaagctgtaacaccgactgcgagctgcgatggcacgtcattggcaagtccgagtgctcaagccagtgcggccagggctataggactctggatattcattgtatgaagtactcgattcacgagggacagaccgtgcaggtggacgatcactactgcggggatcagttaaagcctcccacacaggagctctgccatggtaactgcgtgttcactaggtggcactacagtgagtggagccagtgcagccggtcctgcggaggaggcgagcgttctagggagagctactgcatgaataatttcggtcaccgtctagcagacaatgagtgtcaagaactttcccgagtaacccgcgaaaactgcaacgaattcagttgccctagttgggccgcaagcgaatggtctgagtgtctggtcacgtgtgggaaaggtaccaagcaaagacaggtttggtgccaactcaacgttgaccacctgtccgatggcttttgcaactctagcacaaaaccagaaagtctaagcccttgcgaactccatacctgcgcttcttggcaggtgggcccatggggtccctgtaccaccacgtgcggacatggttatcagatgcgagatgtcaaatgcgtgaacgagttagcttccgcggtcctagaggacactgagtgccatgaagcttcaagaccaagcgacagacagtcatgtgtattaaccccctgcagctttatctcaaagctagaaacagcacttctgcctacagtcctgataaaaaagatggctcagtggagacatggcagttggacaccttgctccgtatcttgcgggcgtggcacacaggcccggtatgtatcctgtcgcgacgccctggatagaattgcagacgagagctattgcgcccacctgccgcggcccgcggagatttgggattgcttcactccctgcggagagtggcaagcaggggattggtcaccttgctctgcgtcgtgtgggcatggtaagacaacaaggcaggtactgtgtatgaactatcaccagccaattgacgagaattactgcgatcctgaggtgcgccctttgatggaacaagaatgttccctggccgcctgcccaccggcccactcacacttcccctcttctcccgtgcaaccttcgtactatctctcaaccaatctgcccctcactcagaagcttgaagacaatgagaatcaggttgtgcatccgtcagtcagaggcaaccagtggcggacaggcccctggggtagttgctcctcatcctgcagcgggggcctgcagcatcgagccgtggtttgtcaggatgaaaatggccagagcgcctcctattgcgatgctgcttcaaagcctccagaattgcagcagtgcgggcctggcccttgccctcaatggaattacggaaactggggtgagtgtagccagacctgtggcggcggtataaaaagccgcttggttatttgccagtttcctaacggtcagatcctggaagaccacaattgcgagatcgtgaataaacctccctcagtgatacagtgtcatatgcacgcttgccctgccgatgttagctggcaccaggaaccctggacatcagaggacctcaaagtgaaattgctgccacagcgtactattatactttgggagttaatgaagaatattttttgtcatggaaagcactctcacatgtatcttattaatgttgtgaccgatcacctcttgtacccacggcactgtgaccccgagaccatcgagacatatttcctctccctttggtccctgcagttcacttggggggacctgaagtactacaagaactcgctgtag

SEQ ID NO: 178048 - DNA, 5733 bp, synthetic construct
  misc_feature 1..5733: note = Description of Artificial Sequence: Synthetic coding sequence
  source 1..5733: mol_type = other DNA
atgtgggtggccaagtggctgaccggcctgctgtaccacctgagcctgttcataactcgctcctgggaagtggattttcaccctaggcaggaagcgttagtgagaactttgacatcatacgaagtcgtgatcccggagcgggttaacgaattcggagaagtgttcccacagtcgcaccacttttccagacagaaacggagctcagaagccctggagccgatgccatttcgcactcattatcgttttaccgcctatggacagctgttccaactcaatttgacagcggatgcctcttttctagccgcagggtacactgaggtgcatcttggaacccctgaaagaggtgcatgggagtcagacgcaggaccctccgatctgagacattgcttttatagaggacaagtgaattcccaggaggattataaagcagtcgtatcgctgtgtggggggctaacagggacctttaagggccaaaacggggagtactttctcgagccaatcatgaaggccgatggcaatgagtacgaagatggccataataagcctcacctgatctataggcaggacctgaataacagcttccttcagaccctcaaatattgcagtgtctctgaatcacaaatcaaagaaacctccctcccatttcatacctacagcaacatgaatgaagacctgaatgtcatgaaggaaagggtacttggccacacttccaagaacgtgcctctgaaggatgagcggcgccactctaggaagaaacgtcttatctcttatccccgctacattgaaatcatggttaccgccgatgccaaagtcgtgtctgcccacgggtctaacctgcagaactatatcttaactctcatgtcaatagtggccactatttataaggacccgtcaatcggaaatcttattcacattgtggtggtcaagctagtgatgatccacagagaggaagaagggcctgtgatcaattttgatggggccaccacgctcaaaaatttttgcagctggcagcagactcaaaatgacctggatgacgtgcacccctctcaccacgacacagcggttctgatcacacgcgaagatatctgctccagcaaggagaagtgcaacatgctggggctgtcttatcttggcactatctgtgatcctcttcagtcgtgtttcataaacgaagaaaagggtctcatcagtgcctttaccatcgcccacgagctcggacacactctgggcgtgcaacacgatgacaatcccaggtgtaaggagatgaaagtcactaagtaccacgtcatggcccctgccctctcctttcatatgtccccctggagctggtctaactgcagcagaaaatacgtgaccgaattcctagatacggggtacggtgagtgtcttctagacaaacccgatgaggaaatctataacctgccaagtgagctgcccgggagccggtacgacgggaacaagcagtgcgagctggcttttggtccgggcagccagatgtgcccccacattaacatatgtatgcatctctggtgcacttcaacggaaaaactgcataagggctgcttcacgcagcacgtcccccccgccgacggcacagattgcggccccggcatgcactgtaggcatggtctgtgtgtgaataaggagaccgagacccgccctgttaatggggagtggggcccatgggagccttactccagttgttctaggacctgtggtggaggcatcgaaagtgccacccggaggtgtaatagaccagaacccagaaatggcggaaactactgtgttgggaggcgcatgaagttccggtcctgtaatacagactcctgtcctaagggaacgcaggactttcgtgaaaagcagtgttcagattttaacgggaagcaccttgacatctccgggatcccatccaatgtacgatggctcccccgatactcgggaattggcacaaaggatcgctgtaagctgtactgccaggttgccggcacgaactacttttacttacttaaggacatggtggaggacgggacaccctgtgggaccgagacccatgatatctgcgtacagggacagtgtatggcggcgggttgcgaccacgttctgaactctagtgcaaagatagacaagtgtggggtctgtgggggagacaattcatcctgcaaaacgataacgggtgtgtttaactctagccactacgggtataacgtggttgtgaagatccccgccggtgccacaaacgtggacattcgccagtactcttactcaggacagcctgacgactcctatcttgctctctccgatgcggagggcaacttcttattcaacggaaacttccttctgtccacaagcaaaaaggagatcaatgtccagggcacacgtacagttatcgagtacagcggtagtaacaatgccgtcgagcgaattaacagcacaaatcgccaggaaaaagaactcatcctgcaggtgctgtgtgtgggtaatctctacaatccggatgtccattactctttcaatattcccctggaggagagatccgatatgttcacctgggacccctatggtccttgggagggctgcactaagatgtgtcaaggcctgcagcgaagaaacattacttgtatccataagtccgatcacagcgtggtgagcgacaaggagtgtgatcaccttcctctgccttcattcgtgactcagagttgtaatacagattgcgagctgcggtggcacgtcattgggaagagcgagtgcagctcccaatgcggccaaggctaccgcaccctagacatccactgtatgaaatacagcatccatgaagggcagaccgtccaagtggatgatcactactgcggagaccagttaaagcctccaacccaggagctgtgccacggcaactgtgtgttcacccgttggcactacagcgagtggtcgcagtgttctcggtcctgcggcggcggagagaggtccagagaatcctattgcatgaataatttcggccaccgactagccgacaatgaatgccaggagctgtccagggtgacacgagaaaactgcaatgagttcagttgcccgagctgggctgcgagcgaatggagtgagtgtttggtgacgtgtggaaaaggcaccaagcagcgtcaggtctggtgccaactgaatgtggatcatctcagtgacggcttctgcaactcaagtacgaaacccgaatcactatccccttgtgaactgcacacatgcgctagttggcaggtgggcccatggggtccttgtacgactacctgcggacatggataccaaatgagggatgtcaagtgcgttaatgagcttgcgtcagcagtcctcgaagacacggagtgtcacgaggcctcacgaccttccgatcgccagtcctgcgtgcttacaccctgcagtttcatatctaagctggaaacagctctcctccctactgtgcttattaagaaaatggcccaatggaggcatggatcttggactccttgctctgtttcctgcggccggggcacacaggctaggtacgtgagctgccgtgacgccctggacagaatcgcagatgaaagctactgcgcccacctacctcgccctgccgaaatatgggattgtttcaccccctgtggcgaatggcaagcgggggattggtccccgtgcagcgctagttgtgggcacggaaaaaccacaagacaggtgttatgtatgaattatcatcagccaattgacgagaattattgcgaccctgaggtacgcccacttatggaacaggagtgttcgctagccgcatgtccgcctgcccatagccactttccctcaagcccagtccagccttcctactacctgagtactaaccttccgctgactcaaaagctggaggataatgaaaaccaggtggtgcatcccagcgtgcgtggcaaccagtggagaacagggccttggggaagctgtagcagcagctgttcaggagggctacagcaccgcgccgttgtctgtcaagatgaaaatggccaatctgcctcctattgcgatgcagcctccaagccaccagaactacagcagtgtggccctggaccatgccctcaatggaactacggaaactggggagaatgcagtcagacatgcggtgggggcatcaagtcaagactcgtgatatgccagttcccaaacgggcaaatattagaggatcataattgtgagattgttaataagccgccctcagttatacagtgtcatatgcacgcatgtcccgctgacgtatcgtggcatcaagagccatggacctcctgctcagctagctgtggaaaagggcggaagtacagagaagtcttctgcatcgatcagttccaacgcaaattggaagacactaattgctctcaggtgcagaaaccccctacacataaagcatgcaggagcgtgcgctgcccaagctggaaggcaaactcttggaacgagtgctctgtgacttgcggtagtggcgtccagcaacgagatgtgtactgtaggctgaaaggagtaggacaggtggtggaggaaatgtgtgaccaaagtactcgcccatgctcccagaggcggtgctggagccaggactgtgtgcaacataaaggcatggagcgcggccgtctgaactgttcaacttcttgcgaacgaaaagacagccaccaacgcatggaatgtacagacaatcagattagacaggtaaatgaaatcgtttataacagcagcaccattagcctgacgagcaaaaattgtcgcaacccaccctgcaattacatcgttgtcacggcggactcttcacaatgcgccaacaattgcggcttcagctacaggcaacgaattacgtattgtacggaaataccaagtacaaagaagcacaaactgcatcgcttgaggcctattgtttatcaggagtgtccggtggtaccaagctctcaggtgtaccagtgtattaatagttgccttcatctcgctacctggaaagtgggaaagtggtctaagtgctctgtaacatgcggcataggtattatgaagcgacaggtcaaatgtattacaaagcatggcctgagctccgatctgtgtttgaatcatctgaaacccggggcacagaagaaatgctacgctaacgactgcaagagtttcacaacgtgcaaagagatacaggtaaagaaccacatccgaaaggacggagactattacttgaacattaagggaagaataattaaaatttactgcgcagatatgtacctcgaaaaccccaaagaatacttgaccctggtgcagggggaggagaacttctccgaggtgtacggctttcggctgaagaacccatatcaatgtccgtttaacggatccagacgtgaggactgcgaatgtgacaatgggcacctggccgccggctacaccgtattttccaagataaggatcgacttgacgagcatgcagattaagactaccgatctcctgttctctaaaacaatttttggtaatgcagtgcctttcgccactgccggtgattgttacagtgcctttaggtgtcctcagggtcagttctctattaacctctcgggcacagggatgaagatcagcagcaccgctaaatggctgacccaaggtagctacacatccgtttcaatcagacggtctgaagacggtaccaggttctttggtaaatgcggcggctactgcggcaagtgtcttccccatatgaccactggactgcccattcaggtcatttag

SEQ ID NO: 178049 - DNA, 1869 bp, synthetic construct
  misc_feature 1..1869: note = Description of Artificial Sequence: Synthetic coding sequence
  source 1..1869: mol_type = other DNA
atgttcacctgggacccctacggcccctgggagggctgcaccaagatgtgccagggcctgcagagaagaaatataacatgtatacacaaaagcgatcattcagtagtttcggacaaggagtgcgaccaccttccactgccttcattcgtcacccagagctgcaacacggactgtgaactgagatggcacgtgattggcaagtctgaatgctcttcgcagtgcggccaggggtatcgaacactggacatccattgtatgaagtacagtattcatgagggccagacagtgcaggttgacgaccattactgcggggatcagctgaagccccctacccaggaactctgtcatggcaattgcgtattcacgcggtggcactatagcgaatggagccaatgctcacgtagttgcggggggggtgaaagaagcagggagtcctactgcatgaataacttcgggcaccgcttggccgacaacgagtgtcaggagttaagtagagtgacgagagagaactgtaacgagttttcatgtccgagctgggcagccagtgagtggtcagagtgtcttgtcacatgcggcaagggtacaaaacagaggcaggtttggtgtcagctgaatgtggaccacctctcagacggcttctgtaactcttccaccaagccggagagccttagtccgtgtgagctccacacatgcgcttcctggcaggtgggtccatggggtccttgcacaacaacttgcgggcacggctaccaaatgagagatgtaaaatgtgtcaatgagctcgccagtgcagtgttagaagacacagagtgccatgaggcctccagacccagcgaccgacagtgtagtgtgagttgcggccgaggtacacaggcccggtacgtgtcctgtcgcgatgcactggacaggatcgccgacgaaagctactgcgctcacctgcctagacccgcagagatttgggactgtttcaccccttgcggggagtggcaggccggggattggtcaccctgcagcgcaagctgtggacatggcaaaaccacacgccaagtcctctgtatgaattatcaccagcccattgacgagaactactgcgacccagaggtccggccacttatggaacaggagtgctccctcgctgcatgccctccagcccactcccattttccctcatcgccagtgcagccttcctactatctgagcacaaacctgccactgactcagaaactcgaggataacgagaatcaggtggtccacccatccgtccggggtaatcagtggaggaccggtccgtgggggagttgctcctctagctgtagtggaggcctgcaacaccgcgccgtggtgtgccaagatgaaaatggacagtcagccagttactgtgacgcagcttccaaaccacccgaactacaacagtgtggacccggcccctgtccacagtggaactatgggaactggggcgagtgctcacagacctgtggtggcggtatcaagtctcggctggtgatatgccaatttcccaacggccaaattcttgaagaccacaactgcgagattgtcaacaagcccccttcggtcatacagtgtcacatgcatgcttgtcctgctgatgtcagctggcaccaggagccttggacatccgaggacctaaaagtcaagcttttacctcaaagaacaataattttgtgggagctgatgaaaaatatcttctgtcacgggaagcacagccatatgtatctcattaacgtggttactgaccaccttctataccctcggcattgcgacccagaaactattgaaacctatttcctgagcctctggtcacttcagtttacgtggggagacctgaagtattacaagaacagcctctag

SEQ ID NO: 178050 - DNA, 4515 bp, synthetic construct
  misc_feature 1..4515: note = Description of Artificial Sequence: Synthetic coding sequence
  source 1..4515: mol_type = other DNA
atgtgggtggccaagtggctgaccggcctgctgtaccacctgagcttgttcattacaagaagttgggaggtggattttcaccctaggcaggaagcgctcgtgagaacccttacatcatacgaggtggtgatccccgaacgcgttaatgaatttggcgaagtatttcctcaatcacatcacttcagccgacaaaagcgatcatctgaagctctcgagccaatgcccttccgcacacactaccggtttacagcttatggccagcttttccaactgaacctgacagcagacgcctccttccttgcggccggatatacagaggttcaccttggcacccccgagaggggggcgtgggaaagtgacgccgggccttctgatcttaggcactgtttttacaggggccaagtgaatagtcaggaggattacaaggccgtggtgtccctgtgcggcgggctgaccggaacctttaaggggcaaaacggcgaatactttctggagcccatcatgaaggcagatgggaacgaatacgaggacggacacaacaaacctcacctgatttatcggcaggacctgaacaatagctttctacaaacactcaagtattgctccgtctccgaaagccagattaaggagacctcccttcccttccacacatatagcaacatgaacgaggacctcaacgtgatgaaagagagggttctcggtcatacttccaaaaacgttccgctgaaagatgaaaggcggcacagccgaaagaagcggctaataagctacccccggtacattgagatcatggttactgccgatgccaaggttgtgtccgcacacggaagcaacttgcagaactatatcttaacgctgatgtcgatcgtagctactatctataaagaccccagcatcgggaacttgattcacatcgtcgtggtgaaacttgtcatgatccatcgggaagaagagggccccgtgatcaattttgacggggccacaaccctgaaaaatttctgttcatggcaacagactcaaaatgacctggatgacgttcaccctagccatcacgacactgcagtgttaatcaccagagaagacatctgttctagcaaggagaaatgcaatatgctcgggctgtcctacctagggacaatctgtgaccctttgcagagttgcttcataaatgaagaaaagggcctcatcagtgcattcaccatcgctcatgagctgggccacaccttaggcgtgcaacacgatgacaaccccagatgcaaggaaatgaaagttactaaataccacgtcatggctcctgcccttagttttcacatgtcaccctggtcttggagcaattgttctcgcaagtacgtgacagagtttctagatactggttacggtgaatgtctcttggataaacccgatgaggaaatctataatctgcccagcgaactgccgggcagtcgctacgacggcaacaagcagtgtgagctagctttcggccccggttctcagatgtgtccacatatcaacatttgcatgcatctttggtgcacttcaacagagaagctgcataaaggatgtttcacccagcacgtgccgccagcggatgggacagattgtggaccaggcatgcattgcagacatgggctgtgcgtgaataaggagaccgaaacccgacctgtgaatggcgaatggggaccttgggagccctatagtagctgcagcaggacttgcggaggtggtatcgagtccgccacgcgaaggtgcaatcgcccagagccacgtaacggcggaaactactgtgtgggccggaggatgaagttccgttcatgcaacacggacagttgcccgaaaggaacccaagacttcagagagaagcagtgcagcgacttcaacggaaagcaccttgacatttccggcatcccatctaacgtgcgatggcttcccagatattctggcataggcactaaggataggtgtaagttgtactgccaggttgctgggacaaactacttctacctgctgaaagatatggtcgaggacgggaccccttgcggtaccgagacacacgacatttgtgtacagggccagtgcatggcagccggctgtgaccacgtgctgaactcttcagctaaaatcgataaatgtggcgtgtgtgggggagataactctagctgcaagaccattacaggagtctttaactctagccactacggctataacgtcgtggttaagatacctgccggcgccacaaatgtggatatcaggcagtactcatacagtggccagcccgatgactcctatctcgcactgtccgacgcagaaggcaatttcctgttcaacggcaacttcctattgagcacttccaagaaagaaataaacgtgcagggcaccaggacagtaatagagtacagtgggtcgaacaatgcggtggagagaattaatagtaccaaccgccaagaaaaggagctcattctacaagtgttatgtgtgggcaatctgtacaaccctgatgttcactactcatttaatatccctctcgaggagcgaagtgatatgttcacctgggacccatatggcccttgggaaggatgtactaaaatgtgccaagggctacaaagaaggaacatcacttgtatccacaagtctgatcactcagttgtaagcgacaaggagtgtgatcatcttcccctgcctagcttcgttacccagtcctgcaacaccgattgcgaactgaggtggcatgtcatcggcaaatccgagtgcagttctcaatgcggccaaggatataggacccttgacatccactgcatgaaatactccattcacgagggtcagaccgtccaggtcgatgaccattactgtggagaccagttaaagccccccactcaggagttgtgccatgggaactgtgtctttaccagatggcactattccgagtggagccagtgttctcgatcatgcggcggcggcgagcggtctagagagtcctattgcatgaacaacttcggacacaggctagctgacaatgaatgtcaggaactgagtcgcgtgacgcgagagaactgtaacgagtttagttgcccttcttgggccgccagcgaatggagtgagtgtcttgtcacatgtggtaaagggaccaaacaaagacaggtgtggtgccaactcaatgtggatcatttgtctgatggcttctgcaattcaagcacaaaaccggagtctctgtccccatgcgaacttcacacatgtgcgagctggcaagtcggtccctggggcccttgtactactacttgtgggcacgggtatcagatgcgggacgtgaaatgtgtgaacgagctagctagtgccgttttagaggataccgagtgtcacgaagccagtcggccatccgacaggcaatcctgtgtgctgacaccctgctcctttatctctaaactagagaccgccttgctcccaaccgtgctcatcaaaaaaatggcacagtggaggcacgggtcctggactccatgttcagtttcgtgcggtcgcgggacccaggcccgatacgtctcttgcagggacgcactcgatcgcatagcagacgagagctactgtgcccaccttccgcgtcccgctgagatatgggactgtttcacaccttgtggggaatggcaggctggcgactggagcccgtgctccgcctcatgtggccacgggaaaacaacacgacaggtcttgtgcatgaattatcaccagccgatagacgagaattattgcgaccctgaagttagaccgctgatggagcaggagtgcagccttgccgcctgtccccccgcgcactcacatttcccctcaagccccgtccaaccatcatactatctgtctacaaacttgccactgacccagaaattagaagacaatgagaaccaggttgtccatccttccgtgcgtggtaatcagtggcgcaccgggccatggggtagttgtagtagtagctgcagtggcgggttgcagcacagggcggtcgtgtgccaggacgagaacggacagagcgcatcttattgtgacgccgcaagcaagcctcctgaactgcaacagtgcggccctggcccttgcccccagtggaattacggcaactggggtgagtgttcacaaacctgtggtggaggtataaagtctcgactggttatctgccagttcccgaacggccaaattttggaggatcacaattgtgagattgtgaataaacccccatccgtgatccagtgtcatatgcacgcctgccctgcagatgtgtcttggcaccaagaaccatggaccagcgaggaccttaaggtgaagttgctgccgcagaggaccataatcttgtgggaattaatgaaaaatatcttctgccatgggaagcatagccacatgtatttaatcaatgtggtgacggatcatctgctatacccaagacattgcgatccagaaactatcgagacctacttcctcagcctctggtcactccagtttacgtggggggacttaaagtactataaaaactctctctag

SEQ ID NO: 178051 - DNA, 3618 bp, synthetic construct
  misc_feature 1..3618: note = Description of Artificial Sequence: Synthetic coding sequence
  source 1..3618: mol_type = other DNA
atggtgctgctgagcctgtggctgatcgccgccgccctggtggaggttagaacttccgccgatggacaggcgggcaacgaggaaatggtacagatcgatctgccaatcaaaagatacagggagtatgagcttgttacccctgtgagcacaaatctggagggaaggtacctgtcacataccctgagcgcctcccacaaaaaaaggtcagccagagacgtgagctccaacccagaacagctcttcttcaatattaccgccttcggcaaagacttccacttgcgactaaagccaaatacacagctagtcgcccccggggcagttgtcgagtggcatgagacaagcctagtgccaggaaatatcaccgaccctatcaataatcatcagcctggttcggccacgtaccgaatcaggaggaccgaacctctccagaccaactgtgcctacgtgggagatatcgtggacatacctggaacaagcgttgcgataagcaactgcgacggactggccgggatgatcaagagtgataacgaggagtatttcattgaacccttggagcggggcaagcagatggaagaggagaaggggcggattcacgtggtatataagcgctccgccgttgagcaggctcctattgacatgtctaaagactttcactacagagaatcagacttggagggtctggatgacctgggcaccgtatacgggaacatccatcaacagttaaatgagacaatgcgcagacgtagacatgctggcgaaaacgattataatattgaagtgctgcttggagtggacgattctgtggttcgctttcacggcaaagaacacgtgcagaactacctactaactttgatgaacatcgttaacgagatctatcacgacgaaagcctaggcgtgcacatcaatgttgttctggttagaatgatcatgctcgggtatgctaagagtattagtctcattgaacgcgggaatccatctaggagcttggagaacgtctgccgttgggcttcccaacagcaacgctcagacttgaaccactcagaacaccacgaccatgcgatcttcctgactcgccaggacttcggccctgcagggatgcaaggttatgccccagtgactggcatgtgccaccccgtccgttcatgtaccctcaatcacgaagacggattctcaagcgcctttgtagtcgcacatgaaaccggtcatgtcctaggaatggagcacgacggccagggtaaccgctgcggagatgagaccgccatgggtagcgtaatggcccccctggtgcaggcagcctttcataggtaccattggagcaggtgcagcggacaggaattaaagcgatatatccactcttatgactgcctgttggatgatccattcgatcatgactggccgaaactccctgaacttcccggtataaactacagcatggatgagcagtgtaggttcgacttcggtgtagggtacaaaatgtgtacagcatttaggactttcgacccatgcaaacaactgtggtgctcgcatcccgataatccttacttctgtaagactaagaaggggcctccactggatggaacggagtgcgctgcggggaaatggtgctacaaaggccattgtatgtggaaaaatgccaatcaacaaaaacaggatggaaattggggctcctggacaaagttcgggtcatgttcgaggacctgtggaaccggcgtgaggtttcggacacggcaatgcaacaatccgatgcccatcaacgggggccaggattgtcccggagtaaattttgagtaccagctttgcaatacagaggagtgccaaaaacatttcgaagactttagggcacagcagtgccaacagaggaactcccacttcgagtaccagaatactaaacaccactggttgccttacgaacaccctgaccccaagaaacgatgtcacctgtattgccagagcaaggagaccggcgacgttgcctacatgaaacagttggtacacgacggcactcactgcagctacaaggatccctatagcatctgtgtcagaggggaatgcgtgaaggtaggatgcgacaaagaaataggctctaacaaagtggaggataagtgcggcgtgtgcggaggagacaattcccactgccggacggtgaaaggaacttttacacgaactcctagaaaattggggtacctgaaaatgttcgatatcccccctggtgctcggcatgtgctgatccaggaggacgaagcttcccctcacatacttgccataaagaaccaggcaaccgggcattacattctgaacgggaagggagaagaagccaaatcccgcacctttattgacttgggagtggagtgggattacaatatcgaagacgacatcgaatccctgcataccgatggcccgctccatgaccccgtaatcgtgctgatcatccctcaggagaacgacaccagatctagtctgacctacaagtatatcatacacgaggacagtgtgcccactatcaattctaataacgtaatccaggaagagctggacacctttgagtgggccctcaaaagttggagtcagtgcagtaaaccatgtggcggtggctttcagtataccaaatacgggtgccggcgcaaatccgataataagatggtccatcgctctttttgtgaggctaataagaagcccaagcctattcgacgcatgtgtaacatccaagagtgcactcacccactctgggtggctgaggaatgggagcactgcacaaagacttgtggcagctcaggatatcagttgcgcactgtgagatgtttgcaaccactgcttgacggcaccaacaggagcgttcactctaaatattgtatgggagaccgccccgaaagccgtaggccttgcaatagagtcccatgccctgctcagtggaaaactggtccctggtccgagtgcagtgtaacctgcggagaaggtaccgaggtgcgccaggtcctatgccgggcaggcgatcattgtgatggcgaaaagcctgaatctgttagggcctgccagttacccccttgcaacgacgaaccctgcctaggggacaagagcatcttctgccagatggaggtgttggcccgatactgctccattcccggatacaacaaactctgctgtgagtcgtgctcaaagcggtcctccacattaccccctccatacctcctggaagccgccgaaacgcatgatgacgtcatctcgaatccttctgatctcccccgcagtctagttatgcctacctccttagtaccataccatagtgagacaccggcgaagaaaatgtccctgagttccatatcttctgttgggggtccaaacgcatacgcggcattcaggccgaactcaaaacccgacggggcgaacctgcggcagcggagcgctcaacaggctgggtccaagacagtgcgcttagtgacagtgcccagctcacctcctactaagagggtccacctcagcagcgcttcacagatggctgctgcaagtttctttgccgctagcgacagtataggggcctcaagtcaagccagaacctcaaagaaagacggtaaaatcatcgacaacaggcgccccacccgcagctccacacttgagcgatag

SEQ ID NO: 178052 - DNA, 1020 bp, synthetic construct
  misc_feature 1..1020: note = Description of Artificial Sequence: Synthetic coding sequence
  source 1..1020: mol_type = other DNA
atgagccagaccggcagccaccccggccggggcctggccggccggtggctgtggggtgctcaaccttgccttctgttgccaattgtaccactgtcgtggctggtctggttgttactcttgctactggccagcctcttgccaagcgccagattagcttcaccacttccccgggaggaggaaattgtcttccccgagaaactgaatggcagcgtgctgccagggagcggtgcccctgcacgcctcctctgcaggcttcaggcttttggtgagaccctgttattggaattagagcaagacagcggggtccaggtcgaaggattaactgtccaatacctcggccaggctcccgaactactcggtggagctgagcctggaacctatttaacgggtacaattaacggcgacccagagtctgttgcctctcttcactgggatggcggtgctcttttaggagtgctgcagtacaggggagcagaattgcatctgcagccactcgaaggcggcactccaaattctgccggagggccaggggcgcacattttgcgtaggaaatcccctgcttccggccaggggcccatgtgtaacgtgaaagctccactgggttctccttcccctaggccacgcagagccaaaaggttcgccagtctaagccgcttcgtggagaccctggtagtcgccgacgacaaaatggccgctttccatggggctggcctcaaaagatacctgctgacagtgatggctgctgcggcaaaagctttcaagcacccgtcaatcaggaaccctgtgagcctagtagtgaccagactggttatattggggtctggagaagaaggaccccaggtcggtccctccgcggcccagaccctgcggagtttctgcgcatggcagaggggccttaacactccagaagactctgacccagatcacttcgacactgcgatcctatttacaaggcaggtgcggccccagtcagccccccaagccatgcactgtacaatccttcgttctgcgaccacatag

SEQ ID NO: 178053 - DNA, 2514 bp, synthetic construct
  misc_feature 1..2514: note = Description of Artificial Sequence: Synthetic coding sequence
  source 1..2514: mol_type = other DNA
atgagccagaccggcagccaccccggccggggcctggccggccggtggttatggggagcccaaccgtgcctgctgctcccgattgtcccattaagctggcttgtctggctattgcttctgctcctggcatccctgcttccgtcagcgcgacttgcgagccccctgccccgcgaggaggagatcgtcttccccgagaagctaaacggctccgtgctccctggtagtggcgccccagcgcggctgctgtgccggctgcaggcttttggtgaaaccctcctgctggaattagagcaggactccggggtgcaggtggagggtctcactgtacagtaccttggacaggccccagaactgctcggcggtgcagaacctggtacttatctgacaggaactatcaatggggacccggagagtgtagcctctctgcattgggacgggggggccctcttaggagtgctgcaatatcgaggagccgagctacatctgcagcccctggagggaggaacaccgaactcagcaggggggccaggagcgcatatcctccggcgcaagtcacctgccagcggtcaggggcccatgtgcaatgtcaaagcccccctaggttctccctcacctaggcccaggagagccaaacggttcgcttctttaagccgcttcgtagagaccctggtggtggccgacgataaaatggccgcctttcacggagccggattgaaacgctacctccttactgtcatggccgccgcggccaaggcctttaaacatccctctatcaggaaccctgtgtccctggtagtaacccggctcgtcatactcgggtcgggagaggaagggccccaggtgggtccctcagcggcccagactctcaggagcttctgtgcttggcaaagaggcctaaatacacccgaggatagtgacccggaccacttcgacaccgccatcctgtttacaaggcaagatttgtgcggggtgagtacatgcgataccctgggaatggccgatgttggcaccgtatgtgatcctgcgcggtcctgtgcaatcgtcgaggatgatggactgcagtcagcctttacagccgcacatgagttgggacatgtcttcaatatgttacatgacaactcaaagccgtgtattagcctgaacggtcccctgtccacatctagacatgtgatggcccctgtgatggcacacgttgaccctgaagaaccatggtccccctgttccgctcgctttattactgatttccttgacaacggctacgggcactgtctgttagacaagcccgaggctccactgcatctgccagtgacattcccagggaaggattatgacgctgaccgtcagtgtcagctgacatttggccctgactctcggcactgccctcagctccccccaccttgtgcagccttatggtgctcaggccatttaaacgggcacgccatgtgtcaaacaaagcattcaccttgggcggacggaactccatgcggacccgctcaggcttgtatggggggcagatgcttacatatggatcaacttcaggacttcaacatcccgcaagcagggggctggggaccctggggaccctggggagactgttctcgaacatgcgggggcggagttcagttttcctctcgggactgcacacgaccagtgcctagaaacggcggaaagtactgtgaaggacggcggacacgattcagatcctgtaataccgaagactgccctactgggtccgccctaactttccgagaagagcagtgtgctgcgtacaatcacaggacagacctcttcaaatcttttcctggcccgatggattgggtgcctcgctatacaggagtggccccacaggatcagtgcaaattaacctgtcaagctcaggcactcgggtattactatgtgctcgagcctagggtagtggacggtacaccatgctcacctgattcctcgtctgtctgcgtgcagggacggtgtatccacgctggttgcgacagaataatcgggtccaagaaaaaatttgacaaatgcatggtgtgtgggggagatgggtccggctgctccaaacagtctggttcgttcagaaagtttcgttacggctataacaacgtcgttaccattcccgcaggagccacccatattctcgtccggcagcagggtaaccctggccatagatcaatctacctggcactcaaattgcccgatggatcatacgcattgaatggcgagtataccctgatgccaagccctaccgatgtggtgttgccaggggcagtgtctttgcggtactcaggggcaaccgctgcatcagaaacactgagcggacatgggccccttgctcaacccttgacactgcaggttctggtggctggcaacccacaggatacacgtttgcgctacagctttttcgtaccacgacctactccctctactccgcggccaacacctcaagactggttgcataggagggcccagattctggagatactgaggaggagaccatgggctggtagaaaatag

SEQ ID NO: 178054 - DNA, 2793 bp, synthetic construct
  misc_feature 1..2793: note = Description of Artificial Sequence: Synthetic coding sequence
  source 1..2793: mol_type = other DNA
atgctgctgggctgggccagcctgctgctgtgcgccttccggctgcccctggccgccgttggccctgccgccactcccgctcaggataaggccggtcagccacccaccgccgcagcagcagcgcaacccaggagacgccaaggcgaagaagttcaggaaagggctgaacctcctggccatccccatccactcgcgcagagacgccggagcaagggtctcgtccaaaacattgatcaactgtattccggaggagggaaggttgggtacttggtgtacgccgggggtcggcgcttcttgctggatcttgaaagagatggttctgtcggcatcgctggattcgtacctgccgggggtgggacgagtgccccctggaggcaccgaagccactgcttttacagagggacggtggatggctctccacgatctcttgccgtctttgatctttgcggcggactggacgggttctttgcggtgaaacatgctcggtacacactcaagcccttattgcgtggcccatgggcagaagaagaaaagggaagagtgtatggggatgggtccgctcgcatccttcacgtgtatacccgcgaaggcttctcctttgaggctctcccgcccagagcctcatgcgagacacccgcttccacccccgaggcccacgagcacgcacctgcacattccaatccctccggccgtgccgcccttgccagtcagctacttgaccaatctgcactgtcccctgccggtggctcaggtcctcaaacctggtggcgcaggcggcggcgatccatctcacgggctcgccaggtcgaactcctgctagtggcggatgcgtctatggcccgcctgtatgggaggggcctgcagcactacctactgaccctggcctccattgctaaccgactgtacagtcacgctagtatcgagaatcatatccggctggcagtcgtaaaagtggtcgtgctaggtgacaaagataaatctctggaagtgtccaagaacgccgctaccacccttaaaaacttctgcaaatggcagcatcagcataatcagctcggagacgatcatgaggagcactacgatgctgcgattctctttaccagggaagatctgtgcggccatcactcttgcgatacacttgggatggctgatgtcggaaccatctgttcgcccgaacgctcatgcgccgtcatcgaagatgatggcctgcacgccgcttttacagttgcccacgagatcggtcacctcctgggactgagccacgacgacagtaagttctgtgaggagacgttcggtagcacagaggacaaaagattgatgagctctatactgacaagcatcgatgcttcaaagccctggtccaaatgtacctccgccacaatcactgagttcctggatgacggccatggtaattgtctgctcgatcttccaagaaaacaaattctagggcctgaggaacttccgggccagacctacgatgctactcaacagtgcaacctaacgttcggaccagaatatagcgtctgtccagggatggatgtctgcgcgcggctgtggtgtgccgtcgtgaggcagggtcaaatggtatgcctgactaaaaaactccctgccgttgaaggaaccccctgcggtaagggccgcatttgccttcagggtaagtgcgttgacaagacgaagaaaaaatactacagtactagttcacatggcaactggggaagttggggcagctggggtcagtgctccagaagctgtggcggaggcgtccagtttgcctacagacactgtaacaaccctgcaccccgcaataacgggcgctactgcaccggtaagcgtgcaatctaccgtagctgttccctgatgccttgtccaccaaatggtaaaagttttcgccacgagcagtgtgaagctaagaacggttaccagtctgatgcaaagggggtgaaaactttcgttgagtgggtcccaaagtacgccggagtgctgcccgcagatgtctgtaaactcacatgccgggccaagggtaccggctattatgtggtgtttagcccaaaggtgaccgacggaaccgagtgccggctgtactctaattcagtctgcgtgcgaggaaagtgcgttcggaccggatgtgatgggataattgggagcaaactccaatatgataagtgtggggtttgtggtggagataactcctcctgtaccaagattgtcgggacatttaacaaaaagagtaaagggtatacagatgtggtgaggatccccgagggcgccacccatattaaggtgcgtcaattcaaggccaaggatcagacacggtttacggcgtacctcgcgttgaaaaaaaagaatggcgagtatttgattaatggaaaatacatgattagcacctcagagacaatcatcgacattaacggcactgtgatgaactatagcggatggagtcaccgggacgattttctccacggaatgggttactccgctactaaagagatcctgatagtccaaattttggctactgatcctactaagcctcttgacgtgcgatattcttttttcgtgcctaagaagtccacccctaaagttaacagtgttacaagccatggaagcaacaaagtaggcagccatacctcccaacctcagtgggtcactggaccttggttggcgtgcagtaggacttgcgacaccgggtggcacactaggacagtgcagtgccaagacggaaaccgaaaactagctaaaggctgccccctgagtcaacgcccgtctgcatttaagcagtgcttgttgaagaagtgttag

SEQ ID NO: 178055 - DNA, 2577 bp, synthetic construct
  misc_feature 1..2577: note = Description of Artificial Sequence: Synthetic coding sequence
  source 1..2577: mol_type = other DNA
atggagatcctgtggaagaccctgacctggatcctgagcctgatcatggccagttcagaattccactcagatcacagactgagctattctagccaagaagaatttttaacgtatcttgaacattatcaactgaccataccaattagggtcgaccagaatggggcattcctgagtttcacggtgaaaaatgacaaacattcccgacggaggcgaagcatggaccctatcgatccccagcaggccgttagcaaactgttcttcaagctgtcagcgtacggcaagcacttccatctaaacctcaccttgaacacggacttcgtttctaaacattttactgtggaatactggggtaaggacggtcctcagtggaagcacgattttctggataattgccactacacaggatacctccaggaccagcgcagcacaacgaaagtcgcccttagtaactgtgtgggactgcacggtgtgatcgccacggaagatgaggagtattttattgagcccctcaagaataccaccgaagactccaaacatttctcctacgagaacgggcaccctcatgtgatctacaagaaatcagccctccagcaacgccatttatacgaccactcccattgtggagtttccgattttactcgtagcggaaaaccctggtggctgaacgatacttcaactgtatcctattcccttcccattaacaacacacatatccatcaccgacagaaacgtagtgtgagtatagaacgctttgtggagactctcgtggtggccgataaaatgatggtagggtatcacggcaggaaggatatcgagcactatattctgtccgttatgaatattgtggcaaaactgtaccgcgacagttctctcggtaatgttgtaaatatcatagtggcacggctgattgtcctcacagaggatcagcccaacctggagatcaatcaccacgcagataaaagtctagatagcttttgtaaatggcagaaaagcatactcagtcaccagtcagacggtaacactattcccgaaaacggtatcgcccatcacgacaacgcagtgctgattaccaggtacgatatctgcacatataagaataagccctgtggcacgctgggactggcgtccgtggccggcatgtgtgagccagagcgtagctgttccatcaacgaggacatagggttggggtcagctttcactatcgctcacgaaatcggacacaattttgggatgaaccatgacggtattgggaactcctgcagaaaggtaatgaagcaacagtacggctcttcgcattattgtgagtaccaatcgttcttcctcgtatgcctgcagagtcgactgcaccatcaactgagccgcgaagtttgtcgagagctgtggtgcctgtcaaagagtaatcggtgcgttacaaacagcatccctgcagcggagggcaccctctgccagacggggaatatcgaaaagggctggtgttaccaaggtgactgtgtcccatttggtacctggccccagtcaatcgacgggggctggggcccatggtctctttggggtgagtgttcgcggacctgcggagggggagtgtccagcagtcttcgacactgcgatagtcctgccccatcaggaggaggaaaatactgtctgggggagagaaagcggtatagaagctgcaatacagacccatgtcctctcggcagtagggacttccgagagaagcaatgtgcagatttcgacaatatgccttttagaggcaaatactacaattggaagccatatacaggcggtggagtaaagccctgcgctctcaactgcctggctgaaggttacaatttctatacagagcgtgcaccggctgtcatcgatggcacacagtgcaacgccgattctcttgatatttgcattaatggggaatgcaaacatgtgggctgcgacaacatcctcggatctgacgcaagagaagaccggtgcagggtgtgcggtggagatggatcgacttgtgatgcaatcgaaggcttcttcaacgattccctgcctcggggcggctatatggaagttgtacagattcctcgcggaagcgtgcacatcgaagtccgcgaagtcgccatgagtaaaaactacatcgcactgaaatctgagggtgatgattattacataaatggggcatggacaatcgattggcctagaaagttcgacgttgcagggactgcctttcactataagcggccaaccgacgaacctgagtctctggaggctttgggcccaacctccgaaaatctgatagtgatggtgcttctgcaggaacagaacctggggattaggtacaagtttaatgtcccaatcacgcggaccgggagcggagacaacgaggtcggtttcacatggaatcaccaaccttggagtgaatgttctgccacctgcgcaggtggtaaaatgcccacaagacaacctacccagcgcgcccgttggaggactaaacatatcctgagttacgcattatgccttctaaagaaactgatcggaaatatatcatgtagattcgcctccagttgcaacttagctaaagagactttgctgtag

SEQ ID NO: 178056 - DNA, 3354 bp, synthetic construct
  misc_feature 1..3354: note = Description of Artificial Sequence: Synthetic coding sequence
  source 1..3354: mol_type = other DNA
atggagatcctgtggaagaccctgacctggatcctgagcctgatcatggcgagctctgagttccatagcgatcacaggctgtcttatagcagccaagaggaattcctcacttatctggaacattatcagctcacaatcccaattagagtggaccaaaacggggcatttctcagctttaccgtgaagaatgacaaacattcccgacgtcgccggtccatggacccaatcgatcctcagcaggccgtctctaagttgttttttaaactctccgcttatggtaagcactttcatctgaaccttaccctgaacactgattttgtcagtaaacattttaccgtcgagtactggggcaaggacggtcctcagtggaagcatgatttcctagacaattgtcactacactggatacctccaggatcagcgcagcactacaaaggtggctttatctaactgtgtgggcctgcacggggtgatagccacagaggacgaagaatacttcattgaacctctgaagaacactacagaagacagcaaacacttcagctacgaaaacgggcacccacacgtgatctacaaaaaaagtgctctccagcaaaggcacttatatgaccactcccattgtggagtctctgattttacgcggtcaggaaaaccctggtggctcaacgatacatccaccgtgtcatactcactgcccataaacaatacacacattcatcatcggcagaagagatccgtctcaatcgagagattcgttgaaaccctcgtggtggcagacaaaatgatggtgggctaccacgggcggaaagacattgaacactatattctgagcgtgatgaacatcgttgctaagctgtatcgagattcgtctctggggaacgtggtcaacatcattgtagcaagacttatcgttttaaccgaggaccagcccaatctggagatcaaccaccatgcagataaaagccttgattcattctgcaaatggcagaagtctatcctgagccatcagtccgacgggaatacgattcctgaaaacggcatcgcacaccacgacaacgccgtgcttatcacaaggtacgacatctgtacctataagaacaagccttgcggaacacttggactcgcgtcagtagcagggatgtgcgagccagaaaggagctgttcaatcaatgaggacatcggtcttggtagcgccttcacaattgcccatgaaataggacataatttcggaatgaaccacgatgggattggcaatagttgcggcaccaaagggcacgaggccgcaaagttgatggctgcccacataaccgcaaacactaaccctttctcttggtctgcctgctcgcgggattatataacgtcattccttgattccggacgcggaacatgtttagacaacgaaccacctaagcgggattttctataccccgccgtggcccctggccaagtgtacgatgctgatgagcagtgtagatttcaatatggagccacctcgagacaatgcaaatatggggaggtgtgtagggagctctggtgtcttagcaagagtaacagatgcgtcaccaattctatccctgccgccgagggaacattatgccagactgggaacatagagaaaggttggtgttaccaaggggactgcgtgccatttggaacttggccacagtcaattgatgggggctgggggccatggagcttatggggtgaatgttctcgaacctgcgggggtggagtctccagttctttacgtcattgcgacagtccagctccctcgggcgggggtaagtactgtttgggggaaaggaaacgttataggagctgcaacaccgacccatgcccgctcgggtcaagagattttagggagaagcagtgcgctgatttcgacaatatgcctttccgaggaaagtactacaactggaagccatatacaggaggaggcgttaagccgtgcgcactgaactgcctggcggaggggtacaatttctataccgaacgagcgcctgctgtgatcgacggcacacagtgcaacgccgattcactcgacatttgcatcaatggagagtgtaagcatgtgggatgtgacaacatccttggatctgacgcgcgggaggatcgctgcagagtgtgcggaggtgacggcagcacgtgtgatgcaatagaggggtttttcaatgattccctccccagaggagggtatatggaggtggtgcagattcccagaggcagcgtccacatcgaggtgagggaagtggcaatgagcaaaaactatatcgccctgaagagtgagggcgacgattactacattaatggagcttggacaattgactggccaagaaaattcgacgtcgctgggactgcctttcattataagcggccaacagacgagcccgagagccttgaagcgctgggtcccactagtgaaaatctgattgtgatggtcctgctccaggagcagaatttgggcatccgctacaagtttaacgtgcccataaccaggactggatctggcgacaacgaagtaggtttcacatggaatcaccaaccctggtccgaatgtagcgctacctgcgccggtggagtccagaggcaggaggttgtctgcaaaagattagacgataacagcattgtgcaaaacaactattgcgatccggacagtaagccaccagagaatcagcgagcctgcaacacggaaccttgccctcccgaatggttcattggcgactggctcgagtgtagtaagacttgtgatggggggatgcgtaccagagctgtgctttgtattcgcaaaatcgggccgtcagaggaagagactttggattactccggatgcctgactcatcggcccgttgaaaaagaaccatgtaataatcaaagctgtccccctcagtgggtggcacttgactggtccgaatgtactcctaaatgcgggccaggcttcaagcaccggattgtactgtgcaagtcatccgacctcagtaaaacattcccggccgcccaatgtcccgaagaaagtaaaccaccagtgcgtataagatgttctctcggacgatgccctccgccccggtgggtgactggtgattgggggcaatgtagtgctcaatgtggactgggacagcagatgaggacagtacagtgcctgtcatatactgggcaggcttcatctgactgcttggaaacagtgcgcccaccatcaatgcagcaatgtgaatccaagtgcgactccaccccgatatcaaacactgaagaatgtaaagatgtcaataaagttgcctactgtccgctcgtcctaaagttcaaattttgtagccgggcctacttccggcagatgtgttgcaaaacatgtcaggggcactag

SEQ ID NO: 178057 - DNA, 1407 bp, synthetic construct
  misc_feature 1..1407: note = Description of Artificial Sequence: Synthetic coding sequence
  source 1..1407: mol_type = other DNA
atggagatcctgtggaagaccctgacctggatcctgagcctgatcatggcatcttcagagttccattccgaccaccgtctgtcctattcctcccaggaagagtttctgacatacctggaacactaccagctcactattccaatccgcgttgatcagaacggggcctttctgtctttcaccgtaaagaacgacaagcactcaagaaggagacgctctatggaccccatcgatccccagcaggctgtgtccaagctgttctttaagctctcagcttatggcaaacacttccacctgaatctcacccttaatactgactttgtttctaagcacttcactgtagagtactggggaaaggatggccctcagtggaagcatgacttcctggataactgccattacacaggctatctccaggaccagcgctctacgaccaaagtagccctaagcaattgcgtgggtcttcatggggtcatcgccacagaagatgaggagtacttcatcgagcctctgaaaaacacaaccgaggacagcaagcatttcagctatgaaaacggacaccctcacgtgatctataaaaaatctgcattgcagcagaggcatctgtacgatcactcacactgtggtgtaagcgactttacccgatcaggcaagccctggtggctgaacgatacaagcacagtgagctactccttgcccataaacaatacacatattcatcaccggcagaagaggtcagtgagcattgaaagatttgtggagactctcgttgtggccgacaaaatgatggtgggctatcatgggcggaaggatatcgagcactatatccttagtgtcatgaacatcgtggccaaactttatcgtgattcttcattgggaaacgttgttaatatcattgtggctcgcctgatagtcctgaccgaggaccagcctaatctcgagattaatcatcatgcagataagtcacttgattctttctgcaagtggcagaaatcaatcttgtctcatcagagcgatggcaatactattcccgagaatggtatagcccatcacgataatgccgtgctcatcacaaggtatgacatctgcacatataaaaacaaaccatgtggtacactgggcctggcatctgtggccggaatgtgcgagccagaacgctcatgcagcatcaacgaggacataggactcgggagcgcattcaccatagcacacgaaattggccacaatttcgggatgaaccatgacggcatcggaaactcctgtgggactaaaggccatgaagccgccaaactgatggcagcacacattaccgctaacacgaaccccttctcttggtccgcttgctctagagactatattacctcttttcttgagttcctgaaactgggagactccatttccggatcatag

SEQ ID NO: 178058 - DNA, 5061 bp, synthetic construct
  misc_feature 1..5061: note = Description of Artificial Sequence: Synthetic coding sequence
  source 1..5061: mol_type = other DNA
atgcccggcggccccagcccccggagccccgcccccctgctgcggcctctgctgttgctcctttgtgcgctggcccctggagcacctggcccagctccaggacgagctacagaggggcgcgcagctctcgatatagtacaccccgtgagagtggatgctggaggcagcttcctgtcttatgagctttggccacgcgccctgcgcaagcgggatgtgtcagtgcggcgcgatgcccctgcattttatgagctgcagtaccgcggccgcgaacttagattcaacctgactgcaaaccagcatctcctggcgcccgggtttgtttctgagacacgtaggcgggggggcctaggacgagcccacataagggctcacactcccgcctgtcaccttctgggagaagtccaggatcctgagttggagggcggcctggctgctatttctgcatgcgatggactgaagggagtttttcagctgtctaacgaggattatttcattgagccactcgatagtgccccagcgaggcccgggcatgctcaaccacacgtggtgtataagagacaggcacccgaacggttggcccagagaggcgatagctctgccccctccacctgcggcgttcaggtctaccctgaactggaatccaggagggagcgatgggaacagcgtcagcagtggaggcggccgagactcaggaggcttcaccagcggagtgtttccaaggagaagtgggtcgaaaccctcgtcgttgctgatgcaaaaatggtggagtaccatggtcagccccaggtagaatcatacgtccttactattatgaatatggtcgcaggcctgttccatgatcccagtattgggaacccgatccacattacgattgtgcgattagtcctactggaggatgaggaagaagatcttaagattacccatcacgccgacaacacactcaaaagtttctgtaagtggcaaaaatcgatcaacatgaaaggtgatgcccaccctctgcaccacgacacagccattcttctcaccagaaaagatctgtgcgctgctatgaatcgaccatgtgaaaccctggggttgtctcatgttgccggcatgtgtcagccacacagatcttgcagcatcaatgaagataccggcctccctttagctttcaccgtggcccacgaactcggacacagttttggaatccagcacgatgggtccggcaatgactgtgagccagtgggtaagcggccgtttattatgtctccacagcttctatatgatgccgcccctttgacatggtcacgctgctcccgacagtacatcacccggttcctggaccgtggatggggactgtgccttgatgatccacctgcaaaggacatcatcgattttccatccgtaccacccggggttttgtatgatgtatcacatcagtgcagactgcagtatggtgcctacagcgcattttgcgaagacatggacaacgtgtgccatacgctctggtgtagcgtaggcacaacttgccactcaaaactggatgccgcggtggatggcacccggtgcggtgagaacaaatggtgcctcagtggagaatgtgtcccagtcggattccgccctgaagccgtggacggcggctggagcggatggtctgcgtggtcaatttgttctcggtcatgtggtatgggcgtgcagagtgccgagcggcagtgtacccagccaactccaaagtataaggggcggtattgtgttggcgaacgaaaacggtttcggttatgcaatcttcaggcctgccccgccggcaggcctagttttagacatgtgcagtgtagtcactttgacgctatgttgtataagggtcagctgcatacctgggtgcccgttgtgaatgacgtcaacccttgtgagctccattgtagacccgcaaatgaatattttgctgaaaagctacgagacgccgtagtggatgggacaccatgttaccaggtccgcgccagccgagacctctgcatcaacgggatttgcaagaatgtcgggtgtgacttcgaaattgactcgggggccatggaagatagatgcggtgtgtgtcacggaaacgggagcacatgccacactgtctcaggaacatttgaggaagcagagggcctgggatatgtcgacgttggactcatacctgccggcgcccgagaaattcgcattcaagaagtggccgaagctgcaaactttctggccttgaggtcggaagaccctgagaaatattttttgaatggtggatggaccatccagtggaacggtgactaccaggtggcaggcacaacgttcacttatgccaggcgggggaattgggaaaatctgaccagccccggaccgacaaaggaacctgtgtggattcagcttctttttcaggagagcaacccaggagtgcactacgaatacactattcacagagaagctgggggacacgatgaggtccccccgcctgtgttctcatggcattacggcccttggacaaagtgtacggtgacatgtggacggggcgtacagcgccaaaacgtttactgcctcgagaggcaggccgggcccgttgatgaagaacactgtgaccctttaggaaggcccgacgaccagcagcgtaagtgcagcgagcagccatgtcccgctaggtggtgggccggagagtggcagctttgctccagctcctgcggccctgggggtctaagccgtagggctgttctttgcataagatctgtgggcctagacgagcagagcgctttggagccccctgcctgcgaacatctgccccggccccctaccgaaaccccctgcaatcgacacgttccttgtccggcgacatgggctgtagggaactggtctcagtgtagcgtgacatgtggagaagggacgcagcgtcgcaacgtgctttgcacgaacgacaccggtgtgccatgtgatgaggctcagcagcccgcatcagaggttacctgttcccttccactctgccgatggcccctgggaaccctgggccctgaaggcagcggtagtggatcctcctcccatgaactgttcaacgaagctgattttattccccatcacctggctcctcgccccagtccggccagctccccaaagcccggcaccatgggtaacgccattgaggaagaggctccggaactcgacctgccaggccctgtctttgttgacgacttttattatgattataactttattaacttccatgaagacctcagttatggcccctcagaggagcctgacctggacctggccgggacaggggatcgcacccctccccctcacagccatcccgctgcacctagcaccgggtctccagtcccagcaactgagccaccagccgccaaggaggaaggagttctcggtccctggtctccctctccatggcccagccaggcgggaaggagtccgcctcctccttcagagcaaaccccaggtaacccattgattaatttcctacccgaagaggacaccccaattggcgcccctgacctgggcttgccttctctgtcttggccacgggtctctacagacggcctgcagaccccagcaaccccggagtcccagaatgattttcccgttggcaaggactcccagtcacagctcccaccgccctggagggaccgtactaacgaagtctttaaggatgatgaagaacccaagggaaggggtgctcctcacctccctcctcggccatccagtactctgcccccactgtctcctgttggatctacacactcctccccatccccagacgttgctgagctgtggacagggggaactgtggcttgggagcccgcacttgagggaggcctcggacccgtggatagcgaactgtggccaaccgtcggggtggcttctctcttgcctccccccatagccccccttcctgagatgaaagttagggatagctccctggaacctgggacacctagtttccccactcctggccctggcagctgggatttgcagaccgttgctgtatggggcacttttctccctacaactctgaccggtctggggcatatgcctgagcctgcactgaatcctggtcctaaggggcagcccgaatccctctcgccggaagttccactcagcagtaggctcctgagtactccagcatgggattctcccgcgaactcacaccgggtgccagagacccagcctctggcacccagtcttgctgaggccggcccccccgccgaccctctagtggttcgcaacgcaggttggcaggccgggaactggagtgagtgttctacgacgtgcggcctgggtgccgtgtggaggcctgtccgctgttcgtctggaagggatgaggactgtgcccccgccggtcgccctcagcccgctcggaggtgccaccttaggccatgtgctacatggcactccggaaactggagcaagtgcagtagaagttgcggcgggggtagctccgttcgcgatgtgcagtgtgtcgatactagagatcttaggccgttacgtccgttccattgtcaacctgggccagccaaacctccggctcataggccctgtggcgcacaaccttgtctgagctggtatacatcctcgtggagggaatgctctgaggcctgcgggggaggcgaacagcagcgcctggtgacatgtcccgaaccaggactctgcgaagaggctttgagacccaacacaactagaccctgtaacacgcatccctgtacacaatgggtggtgggaccgtggggacagtgcagcgggccttgtggaggcggcgtacagcgccggctcgtcaagtgcgtcaatacccagacggggctgcccgaagaggacagtgaccaatgcggacacgaagcctggccggagtcatccagaccgtgcggcactgaggattgtgaacctgtagaacccccacgatgcgaacgagaccgtttaagtttcgggttctgtgagacactgcggcttctaggacggtgccaacttcccactataagaacacagtgctgccggagttgcagcccgccttctcacggcgccccctctcggggccaccagagagtcgccagaagatag

SEQ ID NO: 178059 - DNA, 1383 bp, synthetic construct
  misc_feature 1..1383: note = Description of Artificial Sequence: Synthetic coding sequence
  source 1..1383: mol_type = other DNA
atgcccggcggccccagcccccggagccccgcccccctgctgcggcctctcctactgctcctttgcgctctcgctcccggtgcgcccggccccgcccccggtcgagccacggaggggagagctgccttagatatcgtgcacccagttcgggtcgacgcaggaggaagctttctctcgtacgagctttggccccgtgcccttcggaaaagagatgtcagcgttcgtagggatgcacccgccttttatgaactccagtaccgcggtagagaactgagatttaacctgaccgcaaaccagcatctgctggcccctgggtttgtgtccgaaacacgtagaaggggaggcctgggtcgagctcacatcagggctcacaccccagcctgtcacctcctgggagaggtgcaggaccctgaattggaaggcggcctggccgctatttctgcttgcgatgggctcaagggcgtctttcagctgtccaacgaggattattttatcgaaccattagactctgcaccagctcgtccggggcacgcccagccccacgttgtctataagcgacaggcccctgagaggctagcccagcgaggggacagctcggcgccctctacttgtggtgtgcaggtgtaccccgaactcgaatctaggcgcgaacgttgggaacagcgacaacaatggcgccgtccacggttgcggcgcctgcaccagaggtctgtttctaaagagaagtgggtcgaaacactggtcgtggccgatgcgaaaatggtagaatatcatgggcagccccaggtggaaagctacgtcttgaccattatgaacatggtagccggcctgtttcacgacccttcaatcggcaaccccattcatatcacaatagtaaggttagttttattagaagacgaagaagaggacctgaaaatcactcatcatgccgataataccctgaaatctttttgtaagtggcagaaaagcattaacatgaagggcgacgcacatccgctccaccatgacacagccatcttgctgactcggaaggatctctgcgcagctatgaatcggccctgtgagacacttggtcttagtcacgtcgcgggaatgtgccagccacacagatcctgttccattaacgaagacaccggcctccccctggccttcaccgtggcccatgagctcgggcacagcagctgtactacccccctgccatcccctggacccgccgcagcagcgtcaattagcccaggctctctaagcgttcagcggcagaacgtgtactgtctggaacgccaggcgggtcccgtagatgaggagcactgcgatcctttgggccgtccggacgaccagcagagaaagtgtagcgaacagccatgcccagcttcggctcagtag

SEQ ID NO: 178060 - DNA, 2670 bp, synthetic construct
  misc_feature 1..2670: note = Description of Artificial Sequence: Synthetic coding sequence
  source 1..2670: mol_type = other DNA
atgctgcccgcccccgccgccccccggtggccccccctgctgctgcttttgctcttgcttctgcctttggcacggggtgcccccgcgagaccggccgctgggggtcaagcgagtgaattagtggtgcccacccgattgcccggttctgcaggcgaactcgcactgcacctgagcgctttcggcaaggggttcgtgctgcgccttgcccctgacgacagtttccttgcaccagagttcaaaattgagagactgggcgggtctgggcgggcgaccgggggcgagaggggattgagggggtgctttttctccggcacagttaacggagaaccagagtctctcgccgccgtgtcactttgcaggggcctttctggctcgtttctactcgacggtgaagaattcaccatccagcctcaaggggcaggtgggtccttggctcaacctcaccgtctccagagatggggccccgccggggccaggccgctgcctcgcggcccagagtgggaggtggaaaccggcgaaggacagaggcaggagaggggggatcatcaggaggattctgaggaggaaagccaagaagaggaggcagaaggagcctctgaacccccccctcccctgggggccaccagtagaactaaacgatttgttagcgaggctaggttcgtggaaacactactggtcgcggatgcgtccatggccgcattctatggagctgatcttcaaaatcacatactgacacttatgtcggttgccgctaggatttacaaacacccgtctattaaaaactccatcaatctgatggtggtgaaggttcttatcgtagaggacgagaagtgggggcccgaggtgagcgacaacggaggcctgaccctgcgaaacttctgcaattggcagcgaagatttaatcagccctccgataggcatccagaacactacgacacagctatcttacttacacgacaaaatttttgcggtcaagagggcctgtgcgatacactcggtgtggcagatatcggcacaatctgcgatcctaacaaaagctgttctgtcattgaggatgaagggctgcaggccgctcacaccttagctcatgaactgggacatgtgctttccatgccacacgatgatagtaagccttgcacccgactcttcggaccaatgggcaagcatcatgtgatggcccctctgttcgtgcacttaaaccaaactctcccttggagcccatgttccgcaatgtatctcacagaactgttagatgggggccacggagactgtcttctggatgcgccggcagctgcactccccctacctaccggcctgcccggcagaatggctctgtaccaattagatcagcaatgcaggcagatctttggcccggacttcagacactgccctaataccagcgcacaggacgtgtgtgctcagctgtggtgtcacaccgacggcgccgaaccactgtgccataccaagaacggaagcctgccgtgggcagatggaaccccctgcggccccggccacttgtgctccgagggctcctgtttgccagaggaagaagtggaacgacctaagcccgtggctgacgggggatgggccccctggggaccatggggagaatgttcacgaacctgtggtggcggcgtccagttcagtcatcgtgagtgcaaagatcccgaacctcagaatgggggccgctactgtctagggagaagagcaaaatatcagtcatgccatacggaagagtgccctcccgacggcaaatctttcagagaacagcagtgcgagaagtacaacgcctacaactacaccgacatggacggcaacttgctccagtgggttcccaagtatgcaggtgtcagccccagagatcgatgcaagctgttctgccgcgccaggggacgttccgaatttaaggtgtttgaagccaaagtcattgacggtactctctgcgggccggagaccctggcgatttgtgtgcgaggccaatgtgtgaaagctggttgtgaccacgttgtggattctccccggaagcttgataagtgcggcgtgtgcgggggtaaaggaaatagctgtagaaaggtgagcggctcactcaccccaaccaattacgggtataacgatatagtcaccattccagctggcgccaccaatatcgatgtgaaacagagatcacaccccggtgttcagaatgatggtaactacctggctctgaaaactgcagatggacagtatctgttgaacgggaatctcgcgatttctgctatagaacaggatatactcgtgaaaggaactatcttgaagtacagcgggtcaattgccacattagagagactgcaaagcttccgccccctccctgagccactgaccgttcagctgctaaccgtccccggagaggtgtttccgcctaaagtgaaatatacattctttgtcccgaacgatgttgacttctctatgcaatcgtcaaaagaacgggcaacgaccaatatcatccaacctttacttcatgcccagtgggttttgggggactggagcgagtgttcttctacctgcggagcaggatggcagcgaaggaccgtggaatgtagagaccccagtggacaggctagtgcaacatgtaacaaggcattgaaaccggaagacgcaaagccatgcgagtctcaactatgtcccctgtag

SEQ ID NO: 178061 - DNA, 2757 bp, synthetic construct
  misc_feature 1..2757: note = Description of Artificial Sequence: Synthetic coding sequence
  source 1..2757: mol_type = other DNA
gccgcccgggcccggctgggcggcggcggcgccggcggcgccggctgtgcatctcagagagggagaagaggtagtgctccagctgcaggcccccgtggcccaagcagaccctgcacacggctgatacccctcttcctcgagagagcagcagggccgaggtctgggagacagcacctgcctgccccaggcggtttactcccatcccccgcgaggtcacataggcggtctccacacgcccctaggccacgccggcctccagtggcctcagccccagcggccgcagctgccgcagcagcggctggaccccgtagaccagggcctgcacgaagccgtggagccgggctcggggccggaggggcacatgctgttgctagacttcgcggatgtttcttcagtggcacagtgaacggcgaacccgaatccttagccgccgtaagtctgtgtcggggactttcaggttcgttcctgctggacggtgaggagtttaccatacagccacagggcgctggtggttctctcgcccagccccaccggttacagcggtggggtcctgccggcgccagacctctgcctcgaggacctgagtgggaggtggagaccggagaggggcaacgccaggaacgaggcgaccaccaggaggactcagaagaagaaagccaggaggaagaggctgaaggtgcctccgaacccccaccacctctaggggccacgtcacggaccaaaaggtttgtcagtgaagcgcgcttcgttgagacattgttggtggccgacgcctctatggcagcattttatggtgccgatttgcaaaaccacatcttgacccttatgtcggtagccgctagaatttataagcacccctcaatcaagaattcgatcaacttgatggtcgtgaaggtcctcattgtggaggatgagaagtgggggccagaagtgagcgacaatgggggattaaccttgcgcaacttttgcaactggcagcggaggttcaaccagccttctgacaggcatcctgagcactatgacacggccatcctcctgacccgacagaatttttgcggtcaagagggactgtgtgatacgttaggggtggccgatattggcaccatatgcgatccaaataagtcttgttccgtcattgaggatgagggccttcaagcagctcatacactcgctcatgaacttggacacgtgttatccatgcctcatgatgactccaagccttgcactagactgttcggtccaatgggcaagcaccatgtaatggccccactgtttgtccacctgaaccagacccttccctggtccccatgttccgccatgtacctgactgaactgctggacggcggacatggagattgtctgctcgacgccccagcggcagcactacccttacctactggactgcctgggcggatggccctctaccagcttgaccagcagtgtaggcagatattcggccccgacttcaggcattgtcccaatacaagcgcacaggacgtgtgcgcccaactgtggtgccatacagatggagccgagcccttatgtcacaccaaaaatggttcgctcccatgggcagacggcaccccttgcggccctggccacctatgttcagaggggtcatgccttccagaggaggaagtcgagcgccctaagccagtagccgacggcggatgggccccgtggggcccctggggcgaatgtagtcgcacttgcggcgggggcgttcagtttagccacagggaatgtaaggacccagaacctcagaatggcgggagatattgcctgggaaggcgtgctaagtaccagtcatgtcacaccgaagaatgcccaccagatgggaaatccttccgcgagcagcagtgcgagaagtataacgcctataattatactgatatggacggaaatctcctccagtgggttcccaaatatgccggagtatcgccacgggatcgctgtaagctcttctgccgggcgcgcggacggtcggaattcaaagtctttgaggctaaggttatagatggaactctttgtggtcccgagaccttagccatctgtgtgagagggcaatgcgtcaaagctggctgtgaccacgtagtagacagtccccggaagctcgacaagtgtggagtgtgcggtggtaaaggcaactcttgtcgaaaggttagcgggagcttaacgccaacaaactacggatataacgacatcgtgaccattccggccggggctaccaacattgacgtgaaacagcggtcacaccctggggtgcagaatgatgggaattatttggctctcaaaacagcggatggacaatacctccttaatggtaatttggccataagtgctatcgagcaggatatcctggtgaagggaacaatcctgaagtattccggcagtattgccactctggaaagactgcagtcattccgccccctacccgagcctttgacagtccaattattgactgttcctggcgaggtttttccccccaaagtgaagtataccttctttgttccaaacgatgtcgatttttctatgcaatccagcaaggaaagagccacaacaaacataatccagccccttctgcatgcacagtgggtgctgggggattggagcgaatgcagcagtacctgtggagccgggtggcagcgacgtacagtcgagtgccgcgacccaagcgggcaggctagcgcaacatgcaacaaggccctaaagccggaggatgcaaaaccttgtgaaagccagctgtgccccctttag

SEQ ID NO: 178062 - DNA, 5724 bp, synthetic construct
  misc_feature 1..5724: note = Description of Artificial Sequence: Synthetic coding sequence
  source 1..5724: mol_type = other DNA
atgcagttcgtgagctgggccaccctgctgaccctgctggtgcgggacctggccgagatggggtcgcctgacgccgcagccgccgttcggaaagaccgactacacccgagacaggttaaacttctggagacattgagcgagtatgagattgtgagtccaattcgtgttaacgcacttggtgaacctttccctacaaacgttcactttaagagaactaggcggtccatcaacagcgccaccgatccgtggccggctttcgcttcatcttcttcatcatcaacaagctcacaagcccactaccgcctgtccgctttcggacaacaatttctattcaacctgactgctaacgcgggatttatcgccccattatttacggtgaccctcctcgggaccccaggggtgaaccagacaaagttctactcagaggaagaggcagagctcaaacattgtttttacaagggctacgttaacacaaattcagagcataccgcagtgatttccctgtgctctggaatgttgggaacatttcgttcccatgatggcgattatttcattgaacctcttcagtctatggacgaacaagaggatgaagaggagcagaacaaaccccatatcatctatcgtagaagcgctccccagcgggaaccttctaccggtcgccatgcatgtgacacttctgagcacaagaaccgacacagtaaagataaaaagaaaacgcgggcgagaaagtggggcgaacgtattaatctggcaggcgatgtggccgcacttaactccggcctggccacagaagccttctctgcatacggcaacaagacggataacactagggagaagcgcacacatcgtcgcaccaaacgcttcctctcttacccccggttcgtggaagttctggtggtcgccgataacagaatggtgtcttaccacggtgagaacttgcagcactatatcctcactctgatgtcaattgacgggccaagcataagcttcaacgcccagacaacactgaagaacttctgtcagtggcagcactctaaaaactcccccgggggcatccatcacgataccgctgtgctgttaacacggcaggatatttgcagagcacacgataagtgtgatacgctcggattggccgagctcggcacaatctgcgacccataccggtcctgttccatcagcgaggattcgggcttgagcaccgcctttactattgcccatgagttgggccacgtgttcaacatgccacacgatgacaacaataaatgtaaagaagagggcgttaagtctccacaacacgtgatggccccaacactgaacttctacaccaacccttggatgtggtccaagtgctctaggaagtatatcaccgagtttttggataccggctatggggagtgcctgttaaacgaacccgagagtagaccatatcctctgcccgttcaactccctggcatcctgtacaatgtgaataagcaatgtgagctaatatttggccctggctctcaagtgtgcccctatatgatgcaatgccgcaggctgtggtgtaacaatgtaaatggcgtccacaagggatgcaggacacaacacactccatgggctgatggcacagagtgcgaacccggaaaacattgtaagtacgggttctgtgtcccgaaggagatggatgtgccagtgaccgatggtagctggggaagctggtcccctttcgggacgtgctcgagaacctgcgggggtggaatcaagacagcaattcgggaatgcaaccgacctgagccaaagaatggcgggaaatattgcgttgggcgtcggatgaagtttaagagctgtaatacggagccatgcctaaagcagaaaagagactttcgggacgagcagtgcgctcattttgacggcaaacattttaatataaacggcctcctgccaaatgtcaggtgggttccgaaatactctggaatcctgatgaaagatagatgcaagctgttctgtcgggtggcagggaacaccgcgtattaccagcttagagatagagtgatcgacggtaccccatgtgggcaagataccaacgatatctgcgttcagggcctgtgccggcaggccggatgcgaccatgttctgaacagcaaagccagaagggacaagtgtggagtctgtggcggcgataacagtagctgcaaaacagtcgcggggacctttaataccgtgcattacggatataacacggtcgtgcggataccagctggagccacaaacatcgatgtgagacagcacagtttctccggagagacagacgacgacaattaccttgctttgagctcatcaaagggagagtttcttctgaacggtaatttcgtggtgacaatggctaaaagagaaattagaatcggtaacgctgtcgtggagtattcaggcagcgagactgccgtggaacgaattaattccactgaccgaatcgaacaagagttgctgctgcaggtcctctctgtgggcaaactctataatcctgacgtgcgatacagcttcaatatcccaatagaggataaacctcagcagttctattggaactcacatggtccttggcaggcctgctcgaagccatgccagggggaaagaaaaagaaagctggtctgtacacgtgaatctgaccaactgactgtctccgatcagaggtgcgaccgtctcccacaacctggccacatcaccgagccttgtggaaccgactgcgatcttagatggcatgtggcttcccggtccgagtgcagcgctcaatgcgggctgggctacaggactctcgacatctactgcgcgaagtactcgcggttggatggtaagaccgagaaagtggacgacggcttctgctctagccatcctaagccaagtaacagggaaaagtgtagcggagaatgcaacactgggggatggagatactccgcctggaccgagtgtagcaagtcctgtgacggggggactcaacgacgccgtgccatctgtgtaaatacccgaaatgatgtactggatgatagcaaatgcacccatcaagagaaagtcactatccagagatgctccgagttcccgtgcccccagtggaaaagcggagactggtcagaatgtctcgtcacttgtggcaagggacataagcaccggcaagtctggtgccaatttggagaagaccggctgaatgatcgcatgtgtgacccggagaccaagcccacttccatgcagacttgccaacagcccgaatgtgcaagctggcaagctggaccttggggacaatgcagcgtaacctgcgggcaagggtaccaactgcgtgccgtcaagtgcatcattggcacatatatgagtgtggtcgatgataacgactgcaacgctgcaactcgaccaactgatacacaagattgtgagctcccttcgtgccacccaccccctgctgcccccgaaaccagaagaagcacgtattcagctccgcgcactcagtggcgtttcgggtcttggacaccgtgttcagcgacatgtggtaagggcacccggatgcgttacgtttcctgccgggatgaaaatggtagcgtggccgacgaatctgcatgcgctacacttccgcgcccggtcgcaaaagaagagtgcagtgtcactccatgcggccaatggaaagccctggactggtcgagttgttctgttacttgtggacaggggcgggccaccagacaggtgatgtgtgttaattatagcgatcacgtgattgacagatccgagtgtgaccaagattacattcccgagacggatcaagactgctcgatgtccccttgcccccagaggactcccgatagcgggctggctcagcatccatttcagaacgaagattataggccccggtctgccagccctagcaggacacatgtcttaggcggaaaccagtggcgcacgggcccatggggtgcatgcagctcaacgtgcgccggcggttcccagcgccgggtcgtcgtctgtcaggatgagaatggctatacagccaatgattgcgtcgaacggataaagcctgacgaacagcgagcctgtgaaagcggcccgtgccctcagtgggcctacggcaactggggggagtgtaccaaactgtgtggagggggaattcgcacacgactcgtagtctgtcagcgtagcaacggtgagagatttcctgatctgagctgtgaaattctggataagcccccagatcgcgagcagtgcaacacacacgcctgcccccacgacgccgcttggagtaccggtccctggagctcttgtagcgtatcgtgcgggaggggacacaagcagaggaacgtgtactgcatggcgaaagacggaagccacttggagtctgactattgtaagcacctggctaagccccacggacacaggaaatgccgcggcggacggtgcccaaaatggaaagccggagcatggtcccaatgtagtgtgtcttgtggtcgcggggttcagcagagacacgtgggctgtcagattgggacacataaaatcgcgagagaaacggaatgcaacccatacacacggccagaatccgagagggattgccaaggaccccgctgtcccctgtatacgtggcgcgctgaagaatggcaagagtgcaccaagacatgcggggagggctcgcgatatcgcaaggtggtgtgcgtagacgacaataagaacgaagtccatggagctcgatgcgacgtgagcaagaggccggtcgatagagagtcatgttccctccagccatgcgagtacgtatggatcactggcgagtggtccgagtgctctgtcacttgcggcaaaggatataaacagcggctggtatcctgctctgaaatctatactgggaaggagaactacgagtactcttaccagaccacaataaattgtcctgggacgcagccgccttcggtccatccttgttacctgcgagactgtcccgtcagcgccacgtggcgtgtgggcaactggggcagctgctccgtatcttgtggcgtgggagtgatgcagcgctccgtgcaatgtctcacaaatgaagaccagccctcccacctctgccacacagatctaaaacctgaggagaggaaaacctgtcgcaatgtgtacaactgtgagctcccccagaattgcaaagaggtgaagagacttaaaggcgccagtgaggacggggagtacttcctcatgattcgggggaaactgctaaagattttctgcgccggcatgcattctgatcacccaaaggaatatgttactctggtgcacggagactccgagaatttctctgaggtctatggccaccggctgcataacccaaccgaatgcccatacaacggcagccgtagggatgattgccagtgtcgcaaggactacaccgccgcgggcttctcctctttccagaaaatacggatcgacctcactagcatgcaaatcatcacaacggatctgcagtttgcccgcacaagcgaaggccaccccgtgccttttgctacggcgggtgactgctacagcgcggcaaaatgtccgcagggccggttctcaattaacctgtacggtactggtctaagtttaacggaaagcgccagatggattagccagggaaactacgcagtgagcgacataaagaaaagccccgatgggaccagagtcgtaggcaaatgcgggggctactgtggaaagtgcacccccagctccgggacaggtctggaagtccgcgtactatag

SEQ ID NO: 178063 - DNA, 2976 bp, synthetic construct
  misc_feature 1..2976: note = Description of Artificial Sequence: Synthetic coding sequence
  source 1..2976: mol_type = other DNA
tgagagtgcagcgcccagtgcggcctgggctaccggaccctggacatatattgtgcaaagtactccagacttgatgggaagaccgaaaaggtggatgacggcttttgcagcagtcacccaaagccaagtaatagagaaaaatgttccggcgagtgtaatacaggcgggtggcgctattcagcctggaccgagtgcagtaagagctgtgatggcggcacacaaagaagacgagctatatgtgtgaatacacgaaacgatgtgttggacgacagtaaatgtactcaccaggagaaggtgaccatccagcggtgcagcgaatttccctgccctcagtggaagtctggggactggagcgagtgtttggtaacatgtggtaagggtcacaagcaccggcaggtgtggtgccaatttggagaggatcggcttaacgatcggatgtgtgatcctgaaaccaagcctacatctatgcaaacatgtcagcaaccggagtgtgcatcatggcaagcgggtccctggggacagtgctccgtcacatgtggtcagggataccagctgagagctgtgaagtgcattatcggcacgtacatgagtgtcgtggacgacaatgactgcaatgcagctactagaccaaccgacacgcaggattgcgagctcccgtcgtgtcacccgccaccggccgctccagagacgaggcgctctacttatagcgcacctcggacgcagtggcggtttggtagttggaccccgtgctccgctacctgcggtaagggcactcgaatgagatatgtcagctgcagagacgagaacggatctgttgccgacgagagtgcttgcgcgactcttcccagacctgtggctaaagaggaatgttctgttactccctgtggacagtggaaagcattggattggtctagttgtagtgtgacatgtggccagggacgcgctactcggcaggtaatgtgtgtgaactactcagaccacgtcatagataggtcagagtgtgaccaagactacatccccgagaccgaccaggactgcagcatgtctccttgcccacagcgaactcctgatagtggacttgctcaacacccttttcagaacgaagactatcgccccagaagcgcaagtcctagcaggacacacgtgctaggtgggaaccagtggcgcacaggaccctggggagcctgctcgtcaacgtgcgctggcgggtcacagaggcgggtggtggtgtgccaggacgagaacgggtataccgccaacgactgtgtggagagaatcaagcctgatgagcagcgcgcctgtgagagcgggccctgtccgcagtgggcttacgggaactggggcgagtgtaccaagctgtgtgggggcggaatcaggactcggctggtggtgtgccaacggtcaaatggtgagagattccccgatctgagttgcgagatcctggataaacctcccgatcgagagcaatgtaatacccacgcttgcccacatgacgcagcgtggagcaccgggccctggtcttcttgtagcgtttcctgcggcagaggacataaacagcggaatgtgtactgcatggcaaaggatgggtcccatctggaaagtgactattgcaaacacctcgccaaaccgcacggacaccggaaatgtcgagggggacgatgcccgaagtggaaggccggtgcctggagtcagtgtagtgtcagctgtggcaggggtgttcagcagcgacacgtgggctgccagatcggcacacacaagatagcaagagagacagagtgcaatccttatacacgccccgaatcagagcgtgattgtcaaggcccacggtgccctctttacacctggcgagctgaggagtggcaggagtgcaccaagacatgcggggagggtagccgctatcggaaagttgtgtgcgtggacgataacaaaaatgaggtgcacggggccagatgcgatgtttcgaagcgccccgtggaccgagaatcctgcagtctccagccatgtgagtacgtgtggatcactggggagtggagtgagtgtagcgtcacttgtgggaaaggttataaacaacgcctcgtaagttgctctgagatatataccggcaaagaaaactatgaatatagctaccagaccacaatcaactgccctggtacccagccgccctctgtgcacccatgttatctgcgcgattgccccgtcagtgccacatggcgtgtgggcaactggggctcatgtagtgtgagctgcggagtaggagtgatgcagagatcagttcagtgcctgactaatgaagatcaacccagtcacttatgccataccgaccttaagccagaagaacggaagacatgccgcaatgtgtacaactgtgagctgccccagaactgcaaggaggtgaaaaggctcaaaggagcctcagaggatggtgaatacttcctgatgattcgcgggaagctgttgaaaatcttctgtgccggtatgcactcggaccaccctaaggagtatgtaactcttgtccatggggacagtgagaacttcagtgaagtatacggtcaccgactccacaaccctaccgaatgcccctacaacggtagtaggagggacgactgccagtgcagaaaggattacactgctgctggcttcagcagtttccagaagattcgtatcgacttgacgtcaatgcagattatcaccacagatttacagttcgccaggacttctgaaggccaccccgtacctttcgcaactgcaggggattgctatagcgccgcaaaatgtccccagggcagattttccattaacctgtacgggaccggcttgtcgctgactgagagcgccagatggattagccaaggcaactacgcagtcagtgacattaagaaaagcccagatggcacccgggtggtgggtaagtgtggtggatattgcggaaagtgtacgccatcctctggtacagggctcgaagtcagagtgttatag

SEQ ID NO: 178064 - DNA, 5808 bp, synthetic construct
  misc_feature 1..5808: note = Description of Artificial Sequence: Synthetic coding sequence
  source 1..5808: mol_type = other DNA
atgcagttcgtgagctgggccaccctgctgaccctgctggtgcgggatctagcggaaatgggcagccctgacgcggcggccgcggttcggaaagaccggctccaccctagacaagtgaaattattggagaccttatcagagtacgaaattgtgtcccctattagggtgaatgctctgggagagcccttcccaacgaatgtccacttcaaaagaactaggcggagtattaatagtgcaaccgatccatggccggccttcgcgtcttcctcctcctcaagcacatcctctcaggcacattatcgactgtcagcgtttgggcagcagttcctgttcaacttgacagccaacgcgggtttcatcgctcctctgtttacagtgactctgcttggaaccccaggggtaaaccagaccaagttttattctgaagaggaggcggagctgaaacactgtttctataagggatatgtgaacacaaactccgagcacaccgccgtgattagcctgtgctccggcatgttgggcacctttagatctcatgacggcgactacttcatcgagcctttacagtccatggatgaacaggaagatgaagaagaacagaataagccacatattatctaccgacgctctgctccccagcgagaaccttcaaccgggcgtcatgcctgcgatacctcagaacataagaacagacattcaaaagacaagaagaaaacccgcgccaggaaatggggcgagcggataaatctggccggggatgtggcagcccttaactccgggctggcgactgaggcattcagcgcctatggtaataagactgacaacaccagagagaaacggacccaccgtcggactaaaaggttcctgtcctatcccagatttgttgaagtgctggttgtggctgataaccgaatggtttcataccatggtgagaatctgcaacactatatcctgactctgatgtccatcgtcgcttcaatttataaagaccctagtattggaaacctgattaacattgttattgttaatctgatagtcattcacaatgaacaggacgggccatccatctccttcaacgcccagactaccctgaagaacttttgccagtggcagcacagtaaaaactccccaggtggaatccaccatgatacggctgtcctcctcaccaggcaggatatatgccgcgcccatgataaatgtgacacgttaggactggccgaactgggcaccatttgtgatccctaccgctcttgtagtatcagtgaagactctgggttgagtacggcttttacaatcgcacatgagctgggacatgtgttcaacatgccacatgatgataacaataaatgtaaggaagagggcgtgaagtctccccagcatgtgatggcgcccacactgaacttctacacaaacccctggatgtggtctaagtgcagccgaaaatatatcaccgagttcctggacaccggctatggagaatgtttgctgaacgagcctgaaagccggccctaccctctgccagtgcaattgccaggtatcctgtataatgtgaataaacaatgcgagttgatttttggacccgggtcacaggtttgcccatacatgatgcaatgccgacgcctgtggtgtaataatgtcaatggggtccacaaaggatgccgaacacagcacacaccgtgggcagacggcactgagtgtgaaccgggcaagcattgtaagtacggcttttgtgttccgaaagagatggatgtccctgttaccgatgggtcctggggctcatggagccctttcggaacttgctcgcggacctgcggaggaggcataaagactgctatacgcgagtgtaacaggcccgagccaaaaaatggcggcaagtattgtgttggccggagaatgaagttcaagtcctgtaacacagaaccatgcctgaaacagaagcgcgatttcagggacgaacagtgcgcccattttgacggcaaacattttaacatcaatggcctgctccctaatgtgcggtgggtgcccaagtactctggcattctgatgaaggaccggtgtaagctgttctgccgggtggccgggaataccgcttactatcagctgagagacagagtgattgatgggacaccctgcggacaggacactaacgacatctgcgtgcagggtctttgtcgccaggccggctgcgaccacgtcctgaactccaaggcacgacgcgataaatgtggcgtgtgtggtggggataactcctcatgtaagacagttgctggcaccttcaatacagtccactacgggtataatactgttgtcagaattcccgctggggccacgaatatcgatgtgcgccaacactcattctccggtgaaacagatgatgataattacttagccctgtctagctcaaagggcgaatttctgttgaacggaaatttcgtggtaaccatggccaaacgagagatccgcatcgggaacgctgtggtggagtactccggaagcgaaaccgccgtcgagagaattaacagcaccgaccggattgagcaggaactgctactgcaggtactgtccgtgggaaaactgtataaccctgatgtccggtacagctttaacatcccaattgaagacaaacctcaacaattttattggaactctcacggcccctggcaggcgtgctccaaaccgtgccaaggcgaaaggaagcggaagttggtgtgtactcgggagtcggaccagttaacagtgtccgaccagaggtgcgatcgactgccacaaccaggacacattacagagccctgcggcaccgattgtgacctccgttggcacgtagctagtcgaagcgagtgctctgcccagtgtgggcttggctatcgtactcttgatatatactgcgctaagtattcccgtctcgacggcaagactgaaaaggtggatgacggtttttgctcaagtcaccctaaaccaagtaaccgcgagaagtgctctggcgagtgcaacacagggggctggagatattcggcttggaccgaatgcagcaaatcttgtgatggaggcactcaaagacggagggccatttgcgttaacaccaggaacgacgttctcgatgattccaagtgtacccaccaggaaaaagtaacaatccagcgatgctccgaattcccttgtccccagtggaagtctggtgattggagcgaatgtttggtgacctgcggaaagggtcacaagcaccgccaggtgtggtgccagtttggcgaggaccggttaaacgaccgcatgtgtgacccagagaccaaacccacaagtatgcagacttgccagcagccagagtgcgcgtcctggcaggccgggccatggggtcagtgtagcgtaacatgtgggcagggttaccagctaagggccgtcaaatgtatcataggaacctacatgtctgtcgtcgacgacaacgactgcaatgccgctacaaggcctacggacactcaggattgtgagctaccctcatgccacccgcctcccgcggctcccgagacacgccgatctacctacagcgctcccaggacccagtggaggtttgggagctggacgccttgtagcgctacctgtggtaaggggacaaggatgcggtacgtgagttgtagagatgaaaacggcagcgtggccgacgaatctgcttgcgccacactccccaggcctgtggccaaggaagagtgctccgtcacgccttgtggccagtggaaggccctggactggtcatcgtgtagtgtgacttgcggacaagggcgggccactcgtcaagtcatgtgtgttaattatagtgatcatgtaatagatcggtccgaatgcgaccaagattatattccagagaccgaccaggactgttccatgagtccgtgtccccagagaactccggacagcgggctggcccagcacccatttcagaacgaagactacagacccaggagtgcttccccctcacggactcatgtgcttggcggcaatcagtggcgcacaggaccctggggtgcttgttcttccacttgcgctggagggagccagcgtagagttgtcgtctgccaggatgagaacgggtataccgcaaacgactgcgtagagcgtatcaaaccagatgaacagcgggcttgcgaaagtggtccttgcccacagtgggcttatggcaattggggtgagtgcacgaaactgtgtggcggggggattagaacacggctcgttgtgtgtcagaggagtaacggggaaaggttccccgacctcagttgcgagatactggataaacctcccgaccgagagcaatgcaatactcatgcctgtccacacgatgcagcctggtcgacggggccgtggtcttcctgcagtgtttcttgtggcaggggccacaaacagcgaaatgtgtactgtatggcgaaggatggctctcacctggagtccgactattgcaagcaccttgccaaacctcatggccacagaaagtgtagaggcggaagatgtcccaaatggaaggcgggggcttggtcccagtgctcagtctcctgtggacggggcgtgcagcagcgacacgtgggttgtcagattggcacccacaaaatagctagagaaactgagtgcaatccgtacaccaggccggagtcagaacgggactgtcagggaccccggtgtccactatatacctggcgcgcagaggaatggcaggagtgtaccaaaacctgcggggaaggctctcgctatcgcaaagtggtctgcgtggacgataataaaaacgaagtgcacggcgccaggtgcgacgtaagcaagagaccagtggatcgcgagagttgtagcctgcagccatgtgagtacgtttggattactggcgaatggagcgagtgctccgtgacctgtgggaagggctataaacagagactcgtttcttgcagtgaaatttacactggcaaagaaaactatgagtattcatatcaaaccactatcaattgtccaggcacccagcctccatcggtacacccttgctacctgcgtgattgccccgtgtctgctacctggcgagtcgggaactggggatcttgctctgtatcctgtggcgttggagtgatgcagcgatccgtgcaatgcttaactaacgaggaccagccctctcatttgtgtcatactgacctcaagcctgaagagcgcaagacatgtcgcaatgtatacaattgtgaactgccccagaattgtaaggaggttaaacgattaaagggtgcttccgaggatggcgagtactttttgatgatccggggcaagcttttaaagatattctgcgctggcatgcatagcgatcacccaaaggagtacgtgacgctcgtccatggggattctgaaaacttttcagaggtctatggacacaggctgcataatccaaccgaatgcccttacaacgggagtcgtcgcgatgattgccagtgccgaaaagactacacggcagctggatttagtagttttcaaaagattcggatagatctgacgtctatgcagatcattactacagacttgcagtttgcaaggaccagcgagggacatccagtacccttcgcaacagctggcgattgctacagcgcagcaaagtgtccacagggtcgcttctccattaatttatacggaactggactaagtcttacggagtccgccaggtggatctcccaagggaactacgctgtcagtgacatcaagaagtcgcctgacggtacaagagtggttgggaaatgtgggggctattgcggaaaatgcacgccttcgtcagggacaggactcgaagtgcgggtgctctag

SEQ ID NO: 178065 - DNA, 1176 bp, synthetic construct
  misc_feature 1..1176: note = Description of Artificial Sequence: Synthetic coding sequence
  source 1..1176: mol_type = other DNA
atgatcctgaacggcgaggagatcatcctgagcctgcagaagaccaaacacctgctgggcccagactatactgaaaccctgtacagtccaagaggagaagagattacaactaaacctgaaaacatggaacattgttactacaagggcaatattcttaacgaaaagaacagcgtggccagcatctccacgtgcgatgggttgcgcggctactttacccaccaccatcagcgataccagattaagcccctgaagtctacggacgaaaaagagcatgcggttttcacctccaaccaagaggaacaggaccctgcaaatcacacctgcggcgtgaaatccacagacggcaaacaaggccccatccgtatatcgcgatcgctgaaatcacccgaaaaagaagatttcctgcgagcccagaagtatattgatctttatctggttctggacaatgcattttataagaactataatgagaacctaacactcatccgaagctttgtctttgatgtgatgaatctgctgaatgtcatatacaacactattgacgttcaggtggcactggttggaatggaaatctggagtgatggcgacaaaatcaaggttgtgcccagcgcgtcgacaactttcgataatttcctcaggtggcactcctccaatctgggaaaaaaaatacatgaccacgcacaactgctctctggcatctctttcaataatagaagagtgggtttagctgcttctaacagtctttgttctccctcctccgtcgctgtcattgaagctaagaaaaagaacaatgtggccctcgtgggagtgatgtcccacgagctgggtcatgtgttaggaatgcctgacgtcccctttaataccaagtgcccaagtggatcgtgcgtaatgaatcagtacctgtctagcaagtttccaaaagactttagcacctcatgtagagcccattttgagagatacctgctttcacagaaaccaaagtgcctgctgcaggcacctattccaaccaatatcatgactactccggtgtgcggaaatcacctgctggaggttggagaggattgtgattgtggaagtcctaaagaatgcacgaacctctgttgtgaagcccttacctgtaagctaaagcctggaaccgactgcggaggggacgctccaaaccacacaaccgagtag

SEQ ID NO: 178066 - DNA, 1413 bp, synthetic construct
  misc_feature 1..1413: note = Description of Artificial Sequence: Synthetic coding sequence
  source 1..1413: mol_type = other DNA
atgctgcggggcatcagccagctgcccgccgtggccaccatgagctgggtcctcctacccgtgttgtggcttattgtgcagacccaggcaattgctattaagcaaacgccagaactgactctgcatgagatcgtgtgtcccaaaaagctgcacattctccataaaagagagattaagaacaaccagaccgagaagcacggtaaagaggaaagatatgaacctgaagtgcagtaccagatgatcttgaacggcgaggagatcattctgagcctgcagaagactaagcatttgcttggacccgactatacagagacgctgtattctcctcggggggaggagattacaactaagccagaaaatatggagcactgctattataagggtaatatcctgaatgagaaaaatagcgtggccagtatctccacttgcgacggcttgcggggctatttcacccaccaccatcaaagataccagattaaacctctgaagtcaaccgatgaaaaagagcacgcggtgtttacttctaaccaggaagaacaggaccccgccaaccacacctgtggcgtcaaaagtacagatgggaaacaggggcctattaggatctccaggtctctaaaatctcccgagaaagaagattttctgcgcgcacagaagtacatcgacttgtacctggttctggataacgccttctataagaactataacgagaatctgactctgattcgatcatttgtctttgacgtaatgaatctgttgaacgtgatctacaatacgattgatgtacaggtcgctctggtgggcatggagatctggagcgacggcgacaaaataaaagttgtgccttctgcatctaccacttttgataatttcctgcgatggcactccagcaacctcggaaaaaaaatccacgaccacgcacagctactgagcggaatctccttcaacaaccgacgggtcgggttggcggcgagcaactcattgtgcagcccatcatcagtggcagtcattgaggccaagaagaagaacaatgtggccctcgtgggcgtgatgagccacgagctgggccatgtgcttggtatgcctgacgtgccctttaacactaaatgtccctccggatcctgcgtcatgaatcagtacctttcctctaaattccctaaggacttcagcaccagctgccgcgctcactttgagagatacctgctgtcccagaagccaaaatgtctgctgcaagccccaatccccaccaatatcatgaccactcctgtctgtggcaatcacctcctcgaagtgggcgaagattgcgactgcggatcccctaaagaatgcaccaacctatgttgcgaggccctgacttgcaagctcaagcccgggactgactgcgggggagacgcccctaaccacaccactgaatag

SEQ ID NO: 178067 - DNA, 1176 bp, synthetic construct
  misc_feature 1..1176: note = Description of Artificial Sequence: Synthetic coding sequence
  source 1..1176: mol_type = other DNA
atgatcctgaacggcgaggagatcatcctgagcctgcagaagaccaaacacctgctcgggccggattacaccgagacactgtattcccctaggggtgaagaaattaccaccaagccggaaaacatggagcactgctactataaagggaacattctcaatgagaaaaacagtgttgcctctataagtacatgtgacggactacgggggtattttacccatcaccatcaaaggtatcagattaaacccttaaagagtaccgatgagaaggagcacgcagtctttacgtcgaaccaggaggagcaagacccggctaatcatacatgcggtgtgaaatcaactgacggaaagcagggaccaatccgcatcagtcgtagtcttaaatcacccgagaaagaggactttcttcgagcccagaaatacatcgacctgtatcttgttctggacaacgctttttacaagaactacaatgagaatcttaccttgatacggagcttcgtgtttgacgttatgaacctcctgaacgttatttataatacgatcgatgtgcaagttgcgttagtgggtatggaaatatggagcgatggcgataagatcaaagttgtgcctagtgccagcaccacgtttgacaactttctgagatggcactcctcgaatttaggcaagaagatacacgatcatgcccagctgctatcgggcattagcttcaataaccgacgcgtgggtctcgctgcgagcaattccctgtgtagtccaagcagcgtcgctgtcatcgaggccaaaaaaaaaaataacgtggcactagttggcgtgatgagccacgagctgggacacgtactcggaatgcctgatgttccatttaacacaaagtgcccctctggatcttgcgtgatgaatcaatatttgtcctcaaaattccccaaggacttcagcacctcctgccgggctcacttcgaacggtatcttctctcccagaagccaaagtgtctgctgcaagctccgatccccactaacatcatgactacccctgtctgcggcaaccacctcctggaggtgggggaggactgcgattgcggcagccccaaggaatgcacaaatctatgctgtgaggctctgacttgcaaattaaagcctggaactgactgtggcggtgacgctcctaaccatacaacagaatag

SEQ ID NO: 178068 - DNA, 2052 bp, synthetic construct
  misc_feature 1..2052: note = Description of Artificial Sequence: Synthetic coding sequence
  source 1..2052: mol_type = other DNA
atggagtgctgccggcgggccacccccggcaccctgctgctgttcctggctttcctccttttgtcctcccgaactgccaggtccgaggaggatcgtgacgggttatgggatgcttggggaccttggagcgagtgcagccgaacctgcggaggaggagctagctacagtcttaggcggtgtctgtcctcaaagagctgcgaaggccgcaatatcagatataggacatgctctaatgttgactgtccacccgaagcgggggactttcgagcccaacaatgttccgcacacaatgacgtaaagcatcatgggcagttttacgagtggctacctgtgtctaatgatcctgacaatccttgctccctcaagtgtcaggcaaagggaactaccctggttgtcgagctcgcacccaaagttctcgacggcacaaggtgttacacggagtccctcgatatgtgcatctccggtttatgccaaattgtgggttgcgaccatcaactaggaagcactgtaaaagaggacaattgtggggtctgtaacggagacggctcaacctgcagactcgttagaggccagtataaatcacagctgtcggcgacaaaaagcgacgacacagtggtggcaattccctacggctctcgacacatcaggctggtgttgaagggtcctgaccatctgtatctggagacaaaaacattgcagggcacaaaaggcgagaattctctttcctctaccggaactttcctggtggataattctagcgttgacttccaaaagttcccagacaaggagattttaaggatggctggccccctaacagccgactttatcgttaagatccgcaattcagggtctgcagatagtactgttcaattcattttctaccaacccatcatccacagatggagggagactgactttttcccctgtagcgcaacctgcggcggcggctaccaactgacaagcgctgagtgttacgacttgcgcagtaatagggtagtggcagatcagtactgccactactatcctgaaaatatcaagcccaagccaaaactccaggagtgtaacctggacccttgccccgcttcagatggttataaacagattatgccatacgacctataccaccctctgccacggtgggaagcgactccctggaccgcttgtagcagttcctgcgggggggggatccaatcacgggccgtgtcatgtgtagaggaagatatccagggacacgtgacctctgtggaggagtggaagtgcatgtacaccccaaagatgcctattgctcaaccatgcaatattttcgactgtcccaaatggctggcacaggaatggagcccatgtacagtgacttgtggccagggcctcagatacagggtagtgctgtgtatcgaccatcggggcatgcatacgggcggctgtagccccaaaaccaaaccacacatcaaagaggagtgcatcgttccgactccctgctacaagcctaaagaaaagctgcccgtggaggcaaaacttccttggttcaagcaggcccaggagctggaagagggagccgccgtgtcagaggaaccaagctttatccccgaagcctggtcggcctgcacagtgacatgtggagtcggtacgcaggtccggatcgtgcgctgccaggttctcctctccttctcccagtcggtcgcagatcttcctattgacgagtgtgagggaccgaagcctgcttctcagagggcctgctacgccggcccttgctcgggtgaaatccctgagttcaatcctgacgagacggacggactgttcggcgggctacaggattttgatgaactgtatgactgggaatacgagggattcacaaaatgtagtgagagctgtggcggcggtgtgcaggaagccgtagtctcttgtctaaacaaacagacccgagagcctgccgaggagaacctctgcgtgacctcccggcggcccccccagctcctgaagagttgtaatctagacccttgcccggcaagatcgagcatcgactccgcttggaacgcctgtaatgttttgtgttag

SEQ ID NO: 178069 - DNA, 1401 bp, synthetic construct
  misc_feature 1..1401: note = Description of Artificial Sequence: Synthetic coding sequence
  source 1..1401: mol_type = other DNA
atgtgcctgaccgacgagtggggcttcttcttcttcttcttcctgggagtgccggaggctgaagtgacttggttccggaataagtctaagctgggcagcccacaccatctgcacgagggatccctactgttaacaaacgtgtcctcttcagaccagggactgtacagttgtcgagctgctaacctgcacggggagcttactgagagcacccagctgttaattctggaccccccccaagtccccactcagctggaagacatccgagccctcctggccgctactggtcctaacctcccaagcgttttgactagtccattggggacacagttagtgctggaccccggaaattcagcgctcctcggctgccccataaaaggtcacccggtgcccaatatcacctggttccacggcggtcagccaattgtgacagctaccggcttgacgcatcatattcttgccgccggtcaaatcctgcaagtggccaatctgagcggcgggtcccagggcgaattctcatgcttggcacagaacgaggctggggtattgatgcagaaggctagtctagtgatacaggattactggtggtccgtagatcgcctcgccacctgttccgcaagctgcgggaacaggggtgttcagcagcccaggcttaggtgcctcctgaattcgacagaagtgaatcctgcacactgtgccgggaaagttcggcctgcagtgcagcctatagcttgtaacagacgtgactgccccagccgttggatggtgacttcgtggtccgcttgcactcgaagctgtggcggtggtgttcaaacacgacgcgtgacctgccagaagctgaaagcctccggcatttccaccccagtctcaaacgatatgtgtacacaggtagccaaaagacccgttgatacacaagcctgtaaccagcagttgtgcgtagagtgggcctttagcagctgggggcagtgcaacggcccatgtatcggcccccatctggcagtccagcaccgccaggttttctgtcagacaagagacggaatcacgctgcctagtgagcaatgttcagcccttcctagacccgtcagtactcaaaactgctggagcgaagcctgcagtgtgcattggagagttagtctctggaccttgtgtaccgcgacgtgtggtaactacggtttccagtccagacgggtcgagtgtgttcacgctagaaccaataaggcagtgcctgagcacctgtgctcttggggcccccgacccgccaattggcagcggtgtaacatcaccccctgcgaaaacatggagtgtcgagacaccactcggtactgcgagaaggtgaaacagctgaagttgtgtcagcttagccagtttaaatcacgttgctgcggaacttgcggaaaagcatag

SEQ ID NO: 178070 - DNA, 1578 bp, synthetic construct
  misc_feature 1..1578: note = Description of Artificial Sequence: Synthetic coding sequence
  source 1..1578: mol_type = other DNA
atggagtgctgccggcgggccacccccggcaccctgctgctgttcctggcctttctgctcttaagttctcgaaccgcccgcagcgaagaggatagagatggcctgtgggacgcctggggaccatggtctgaatgttctcgaacatgcggaggaggtgccagttactcactgagaagatgtctgagctccaagagctgcgagggcaggaacatcaggtatcgcacatgtagcaatgtcgattgccctccggaagcaggggacttcagggctcagcagtgcagcgcccataatgacgttaagcaccacggtcagttttacgagtggttaccagtctcaaacgaccctgataacccgtgttctctgaagtgccaggcaaaggggaccaccctggtggtggaacttgctccaaaggtattagatggaacccgctgctataccgagtcactcgacatgtgcatctcgggcctttgtcagattgtgggttgcgaccaccaactcggctcaaccgtcaaggaagataattgtggtgtgtgtaatggggatggctctacctgtaggctcgtgcgaggtcaatacaaatcccagctctccgcaacaaaatccgacgataccgtcgttgccattccctatggcagtcgccacataaggctcgtactgaagggccctgaccatttgtatttggagaccaagacgctgcagggcaccaaaggcgaaaactcactctcaagtactggaacgtttctcgtggacaattcgtctgttgactttcagaaattccccgataaagaaatcctgaggatggccggcccccttacagcagacttcatcgtgaaaatcaggaactccgggtccgctgattcaaccgtccagttcatattctaccagcccattatacaccggtggcgcgagactgatttctttccctgctcagccacgtgtggtgggggctatcaactaacatcagccgagtgttacgacctcagatccaaccgtgtagtcgccgatcagtactgccactattatcctgagaatatcaagccaaaaccaaagctccaggagtgcaatttagatccatgccctgcctcagatggctacaagcaaatcatgccttatgatctctaccacccgctgcccaggtgggaggccacaccctggacagcctgttcttcatcctgcggtggcggcatccagtctagagcagtgtcatgcgtagaagaggacattcagggtcacgtgacaagcgtggaagaatggaagtgcatgtacactcctaagatgcctattgcacaaccttgtaacatcttcgactgcccgaaatggcttgcccaggagtggtcgccatgcacagtgacttgtggtcaaggccttcggtatagggtggtgctttgtatcgatcacaggggaatgcacactggagggtgttcacctaaaactaaaccccatatcaaggaagaatgtattgtgccaacaccgtgctacaagcctaaggaaaagctcccagtggaagccaaactcccatggttcaagcaggcccaggaattagaagagggggctgcggtctccgaagagccaagttag

SEQ ID NO: 178071 - DNA, 786 bp, synthetic construct
  misc_feature 1..786: note = Description of Artificial Sequence: Synthetic coding sequence
  source 1..786: mol_type = other DNA
atgtgcctgaccgacgagtggggcttcttcttcttcttcttcctgggtgtgccagaggctgaggtgacatggttcagaaacaagagtaagctggggtcaccacatcaccttcacgaaggctccttgctgctgacaaatgtgtcctcctccgatcaagggctctacagctgcagagccgccaatctgcacggtgagctgacagagtcaactcagctgctgatacttgacccgccacaggtgcccacccaacttgaggacattcgcgcgctgctggcggctacaggtcctaatttgccctctgtccttacctccccactgggcacacagcttgtactggacccaggtaactccgcactgctcggctgcccaatcaaagggcatcccgtgcccaatatcacatggttccacgggggtcagcctatagttactgccacggggttgacccaccacatcttagcagctggccagatcttgcaggtggccaacctttctggaggtagtcagggagaattcagttgtcttgctcagaacgaagccggtgtgttgatgcagaaggcctcactggtcattcaagactattggtggtcggtcgaccggctcgcaacttgctcagcaagttgtggaaaccgcggcgtccagcagcctagactgcggtgcctgttgaattctaccgaggtgaatcccgcccactgcgccggcaaagtgaggccggctgttcagccaattgcttgcaatcgcagggattgcccaagtcgcgccatgggactggcttctgggttgacatag

SEQ ID NO: 178072 - DNA, 5289 bp, synthetic construct
  misc_feature 1..5289: note = Description of Artificial Sequence: Synthetic coding sequence
  source 1..5289: mol_type = other DNA
atggagtgctgccggcgggccacccccggcaccctgctgctgttcctggcatttctcctgctgagctctcgaaccgctagaagcgaggaagaccgagatggactgtgggatgcttggggaccatggtcagaatgctccaggacctgcggggggggggcttcctactcacttaggagatgtctgagttctaagagctgcgaaggcagaaacattagatatagaacttgcagcaacgtggactgtccacccgaagctggcgatttcagggcgcaacagtgctcggcacacaatgatgtgaagcaccacgggcagttttatgaatggctgcccgtctccaacgacccggacaatccatgctctctgaagtgccaggccaaaggcacaactttagtcgtggagctcgcacccaaggtgctagacggtacaagatgctacactgaatccctcgacatgtgtatcagcgggctgtgtcagatcgttgggtgtgatcaccaacttggtagtaccgtgaaagaagacaattgtggggtatgtaacggcgatggaagtacatgccggttagtaagaggccagtacaaaagccagttatctgctaccaaatccgacgatacggtggtggccattccttacggatctcgccacattcgactggtgttgaagggacccgaccacctgtatctcgagaccaagacactgcaggggactaagggagaaaattctcttagtagcactggaacatttctcgtggacaactcctccgttgattttcaaaagtttccagacaaagagattctgcgcatggccggtcccctgaccgccgactttatcgtcaaaattagaaatagtggtagtgccgacagcacggttcagtttattttctaccagcctatcatccaccgttggcgcgagacggacttttttccatgcagtgcaacttgtggcggtgggtatcaactgacaagcgccgaatgctacgatctgaggtcaaacagggtagtagccgatcagtattgtcactactaccccgagaacatcaaacccaaaccaaagctgcaagaatgcaatctggacccctgtccagcatctgacggctataaacagataatgccctacgatctataccaccctctgccacgctgggaagctaccccctggactgcctgttcctcttcttgtggaggagggatccaatcgcgggcagtgtcttgtgtcgaagaggatatccagggccatgtcacctctgtcgaggaatggaaatgtatgtacacacccaagatgcccatagcccaaccctgtaacatcttcgactgtccaaaatggttggcacaggagtggagcccatgcactgtcacatgcggccagggcttgcgctaccgagttgtgctttgtattgatcaccgcggcatgcacacaggaggatgttcccctaagacaaaacctcacatcaaggaagagtgtattgtccctacaccttgttacaagcccaaagaaaagttacctgtggaggccaaactgccttggttcaagcaagcacaggagctggaggagggagccgctgtctccgaggaaccgagcttcatccccgaagcctggtctgcatgcacagttacctgtggagtcggcacacaggtccggatcgtgcgctgtcaggtcttgttatccttcagtcagtccgtcgctgatcttccgatcgatgaatgtgagggccctaagcctgcttcacagagggcctgctatgccgggccttgcagcggggaaattcccgaatttaacccagacgagacggacggcctgtttgggggtctccaggatttcgacgagttatatgattgggaatacgaggggttcaccaagtgttctgaaagctgcggggggggcgtgcaggaggctgtagtgagttgtctgaacaagcagacgcgcgaaccggctgaagaaaacttgtgcgtgacctcccgccgacctccacagttactcaaaagttgtaatttggatccatgccctgcccgctgggagataggcaaatggagcccttgcagtctcacttgtggtgtcggtctccagacaagagacgtcttttgttcacacctcttgtctagggagatgaatgaaaccgtaatcctggctgatgaactctgccgccaacctaaaccctctactgtccaggcctgtaaccgcttcaactgtccaccagcctggtaccctgcgcaatggcagccttgtagccgcacttgtgggggtggcgtgcagaaacgagaagtgctgtgtaagcagcgaatggcggatggctcctttttggaactcccagaaacattctgttccgcaagcaagccagcctgtcagcaggcttgtaaaaaggacgattgtccatccgaatggctgttatcagattggaccgaatgctccacctcctgcggtgagggcacgcagacccgatcggccatatgtagaaaaatgctgaaaacaggcctgtctacggtggtcaactcaactttatgccccccattgccgttctcctcctctatcagaccctgcatgctggccacctgtgcaagacctggcaggccttctacaaaacactccccacatatagcagccgctagaaaagtgtatattcagacccgcaggcagcgtaaactgcatttcgttgtcgggggattcgcctatctgctgcccaaaactgcagttgttctcagatgtccagcccgccgagtaagaaaacccctaattacatgggagaaggacggtcagcacctgatttcttctacacacgttacagtggccccattcgggtatttgaagattcataggctgaaaccgtcggacgcaggagtctatacgtgtagcgcagggccagcgagggaacactttgtcatcaaacttatcggaggaaaccgaaaactcgtggcacggcccctgagtcctcggagcgaggaggaagtgctggccggacggaaagggggccctaaagaggccctccagacacacaaacaccaaaatggcatcttctctaatggttccaaggctgagaaacgcggactcgccgccaaccccggctcccgctatgacgacctcgtatcccggcttctcgagcagggggggtggcctggtgagcttttggcgagctgggaagcacaagactccgccgaacggaatacaacaagcgaggaggacccaggggcagaacaagtcctgctgcacctacccttcacaatggtcaccgaacagcgacgacttgacgacatccttgggaacctgtcgcagcaacccgaagagttgagggacctgtacagcaaacaccttgtggcccagctcgctcaggagatctttaggagtcatctcgaacaccaggacaccctgcttaagccctccgaacgtcgcaccagccccgtcaccttatcccctcataagcatgtttctggtttttcatcaagtctcagaacatcatcaacgggtgacgccggggggggcagtcgccgcccccacagaaagcccaccattctgaggaagatcagcgctgctcaacagctgtctgccagcgaggtagtgacacacttggggcaaaccgtcgctctggctagcggcaccctgtctgtcttgttacattgtgaggcaatcgggcacccccggcccaccatcagctgggctagaaacggagaagaggtacagttttccgatcggatcttactgcagcccgacgactccctccagattctggcgcccgtggaggccgacgtgggcttttacacctgtaatgcaactaatgccctggggtatgattccgtcagtattgccgtcactcttgcagggaaacctctcgtgaagacgagccggatgacggtgattaacaccgaaaagcccgccgtgactgttgacatcggtagtactattaaaaccgtgcagggggtgaatgttaccatcaactgtcaggtcgcaggggtcccagaggcagaggttacctggttcaggaacaagtccaagctgggcagtccccaccatcttcacgaaggcagtctgctcttgactaacgtctcctcaagcgaccagggcctgtactcatgcagggccgccaatcttcatggcgaactgacggaaagtactcagcttctgatcttggatcctccgcaggtcccaacccagttggaagatattcgcgcactcctcgccgctacggggccaaatcttcctagtgttcttaccagtcccctgggtacccagctcgtcctggatcccgggaattctgccttgctgggctgcccgattaagggacacccagtgcctaacatcacttggtttcacgggggccagcctatcgttacagcaacagggctcacacaccacattttggcagcgggtcagattttacaggtagccaacctttccggcggttcgcaaggcgagttctcgtgtctggcccaaaatgaagctggcgtcttgatgcagaaagccagtctcgtaattcaggactactggtggagtgtcgatagactggcaacatgctctgcatcctgtggaaatcggggtgtacagcagcctcggctccgttgcctgctgaattcgacagaagtcaatcctgcgcactgcgcgggaaaggtcaggcctgccgtccagcccattgcctgcaaccgacgggactgtccgagccgatggatggtgactagctggtctgcttgcactcgcagctgtggtggaggagtccagaccaggagagtgacctgtcagaaactgaaggcatctggaatctccacccccgtgtccaatgatatgtgtacccaagtggctaagcgccccgttgacacacaagcctgtaatcagcagctctgcgttgaatgggcttttagcagctgggggcaatgcaatggcccgtgcatcggccctcacttggcggtgcagcaccgacaggtgttttgccagacacgggatggcataactcttccaagcgagcagtgctctgcattacctcggcccgtgtctacgcaaaactgttggagtgaggcatgcagcgtgcactggcgagttagtttgtggaccctgtgtacagctacctgcggaaactacggcttccaatctcgccgcgtcgagtgtgtccacgcccgcacaaacaaagctgtgcccgagcatctgtgttcatggggaccgcggccagccaattggcagagatgtaacatcacgccctgtgagaatatggagtgccgggataccaccagatactgcgagaaggtcaagcagctcaaactgtgtcagttgtcccaatttaagtctagatgttgcggtacctgtggcaaagcatag

SEQ ID NO: 178073 - DNA, 1320 bp, synthetic construct
  misc_feature 1..1320: note = Description of Artificial Sequence: Synthetic coding sequence
  source 1..1320: mol_type = other DNA
atggagtgctgccggcgggccacccccggcaccctgctgctgttcctggccttcttgctcctctcttccagaactgcgagaagcgaggaagatagggatgggctgtgggacgcgtggggcccttggagcgagtgttcaaggacttgcggtgggggcgcctcatatagcctgcggagatgcctctcctcaaaaagttgcgaagggaggaacattcggtatagaacctgttcaaatgtggactgcccccctgaagcaggtgattttagggcccaacaatgctctgcacacaatgatgtcaaacaccacggtcagttctatgagtggctgcctgtctccaacgatcctgacaacccgtgctctcttaagtgccaagccaagggcactacactggttgtcgagttggctccgaaagtattggatggaacccgctgctataccgagtccttggacatgtgtattagcgggttgtgccagatcgtggggtgtgatcaccaactgggttccactgtaaaggaggataattgcggagtttgcaacggcgacggcagcacctgtaggctggtgcggggacagtataaatcccagctttccgccaccaagagcgatgacactgttgtggctattccctatggcagccgccacatcagactagtcctgaaggggccggatcacctttacctggaaacaaagacattacagggtacgaaaggggaaaacagtctttcaagcactggaaccttcctggtggataatagctcggtagatttccagaagttccccgataaagagatcctaagaatggcaggacctttgaccgccgactttattgtcaagattcggaattctgggagtgctgattccacagtgcagtttatattctaccagcccatcatccataggtggcgggagactgattttttcccttgttctgccacgtgcgggggcggttatcaactgacctccgctgagtgctacgatctccgttccaaccgggtggtggcagaccagtattgtcactattacccggagaatatcaaacctaaacccaagctgcaggagtgtaatctggatccttgcccggctagatgggaggctacaccgtggaccgcttgctctagcagttgcggaggaggtatacaaagccgcgccgtgtcttgtgtagaagaggacatacaaggacatgtgacctcagtcgaggagtggaaatgtatgtatactcccaagatgccaattgcgcagccctgcaacatcttcgattgccccaaatggctggcgcaggagtggtcacctgtcacggtgccgagcttctttgtgcattag

SEQ ID NO: 178074 - DNA, 2856 bp, synthetic construct
  misc_feature 1..2856: note = Description of Artificial Sequence: Synthetic coding sequence
  source 1..2856: mol_type = other DNA
atggacggccggtggcagtgcagctgctgggcctggttcctgctggttctagcagtagtggccggcgacactgtgtctacaggatctacagataattccccaacaagcaacagcctggagggcgggaccgatgcaacagcgttttggtggggggaatggaccaaatggacagcttgcagtcgctcctgtggcgggggcgtaaccagccaggagcgacactgtctgcagcagcgccggaagagcgtgccggggcctggtaaccggacttgcacagggacaagtaagcgctatcagctttgcagagtacaggagtgcccacccgatggcagaagcttccgggaagagcagtgtgtgagctttaatagccacgtatataatggaaggacacaccagtggaaaccgctctaccccgacgattatgtccacatctcaagcaagccttgtgatctgcattgcactactgtggacggtcagcgacaactgatggtccccgcccgcgacggaacttcctgtaagctgacagatctacgtggtgtgtgtgttagtgggaaatgtgagccaatcgggtgtgatggcgtgctcttcagcacccacacactggataagtgcgggatatgccaaggggacgggagctcttgcacacacgtcaccgggaattacaggaagggaaacgcacaccttgggtattccctagtgacacacattcccgccggcgctcgagacatccaaatcgtagaaagaaaaaaatcagccgatgttctggcgctggctgatgaggcgggctactatttctttaacgggaattataaagttgacagccccaagaattttaatatcgccggcaccgtggtgaagtaccggcgacctatggacgtctacgagacaggtattgagtatatcgtggcacaggggcctaccaatcagggtctcaacgtgatggtgtggaatcagaacgggaagagccccagtatcacatttgaatacaccctgctgcaacctcctcatgagtctcgaccccagcctatctactacggcttttctgaatccgcagaaagccaagggttagacggcgccggcctcatggggttcgtgcctcataacgggagtctgtatggacaagcttctagcgagcggctagggctggacaacaggctgttcgggcatcctggcttggatatggaactcggaccctcccagggtcaagaaaccaacgaggtgtgtgagcaggctggcgggggagcctgcgagggccctccaagaggcaaggggttccgcgataggaacgtgacagggacgccactgactggtgataaagacgacgaagaggtagacacccacttcgcctcccaagagttcttttccgcgaacgccatctcggaccagctgcttggtgccggatcagaccttaaagacttcacactaaatgagactgtgaattcgatctttgcacaaggtgccccgaggtcttccctggctgagagtttcttcgttgactatgaagaaaatgaaggagctggtccgtacctgctgaatgggagttacttggagttgagcagcgaccgcgttgcaaacagctcttccgaggcgcctttccccaacgtcagtacatccttattaactagtgccgggaatcgaacacataaagcgagaacgcggcccaaggcccggaagcaaggcgtgagtcctgcggatatgtaccggtggaaactttcttcacacgaaccctgctcagcgacttgcacgaccggggtaatgtcagcttatgccatgtgcgtcagatatgacggcgtggaggtcgatgatagctattgtgacgccctaacccgcccggagcctgtccatgaattctgcgccggccgagagtgccagcctcgttgggagaccagtagctggtctgaatgttccagaacttgtggagaaggatatcagtttcgtgttgtgcgatgctggaagatgctgtctcctgggtttgacagctctgtttatagtgacttgtgcgaagctgccgaggctgttcggcctgaagagcgtaagacttgccgcaacccagcgtgtggtccccagtgggaaatgtccgagtggtccgaatgtaccgccaagtgcggtgaacgaagtgtggtcaccagggatattagatgtagcgaagatgaaaaactgtgtgatccgaataccagacccgtgggcgagaagaattgtaccggccctccttgtgacaggcagtggacagtcagtgattggggaccttgcagcggcagctgcggccagggacgcacaattagacacgtctactgtaagactagcgatggccgagtagtgccagagtcccagtgccagatggagactaagccattggctatccatccttgtggagataaaaattgcccagcacattggctggcgcaggattgggaacggtgcaacactacttgcggaagaggcgtgaagaagcgtctcgtcttgtgcatggagttggctaacggcaagcctcagacgaggtcgggccccgagtgtgggctggccaagaagcctcccgaagagagcacttgttttgaaagaccatgcttcaagtggtacacgtccccttggtctgagtgcacaaagacctgcggtgtgggagtccggatgcgggacgtgaagtgctaccaaggcacggacattgtaaggggatgcgaccctctggtgaagccagtgggtcgacaagcctgcgacctccaaccctgtcctactgaaccacccgacgactcatgccaagaccagccgggaaccaactgcgcactggcaatcaaagtcaatctctgtggacactggtactacagcaaggcctgctgtagaagctgtcgtccaccccacagctag

SEQ ID NO: 178075 - DNA, 2856 bp, synthetic construct
  misc_feature 1..2856: note = Description of Artificial Sequence: Synthetic coding sequence
  source 1..2856: mol_type = other DNA
atggacggccggtggcagtgcagctgctgggcctggttcctgctggtcctggctgtggttgccggggacaccgtctcaaccggcagcaccgacaattctcccacctccaactctctcgagggcggcacggacgcaactgctttttggtggggagagtggaccaagtggacagcatgtagccggtcgtgtggaggtggagtaacgtcccaggagcgtcattgtcttcaacagcggagaaagtcagtacccggcccaggtaacagaacttgcaccggcacctccaagagataccagctgtgtagggttcaggaatgtcccccggacgggaggtcttttcgcgaggagcaatgcgtgtctttcaactcccatgtgtacaatggacgcacacaccagtggaagccactttacccagatgactatgtgcacatctcatccaagccctgcgacctgcactgtaccacagtggatggacaaagacaactgatggtacctgccagggatggcacctcctgcaaactcacagacctgcgaggcgtatgcgtgtctggaaagtgtgagcctatcggttgtgatggggtgttatttagtacccataccctggataaatgcgggatatgccagggtgatggtagcagctgcacacatgtgaccggcaactataggaaaggcaatgcgcatcttggatattcactggtcacccatatcccagccggagcccgtgatatccaaatagtcgagcgcaagaaatctgctgacgttttagctctggccgacgaggcaggctactattttttcaatggcaattacaaagtggattcccccaagaatttcaatattgccggaaccgtggtgaaatacagaaggcctatggacgtatatgagacagggatagagtatatcgtggcacaagggcccactaaccaggggttaaatgtgatggtttggaaccagaacggaaagtctccgtctattaccttcgaatacacgctgctacaaccccctcacgagagcagaccacaaccaatctactatgggttttccgaaagtgcagagagccaaggactggatggcgcaggcctgatgggatttgtaccccacaacgggtctctgtacgggcaggcttcatcagagcgcctcggtctggataatagacttttcgggcacccggggctggatatggagctcgggccaagccagggacaggagacgaacgaagtgtgcgaacaggccggcgggggggcatgcgaggggccgccgcgggggaaaggcttcagggatagaaacgtaacagggactccactgaccggagataaagatgacgaggaagtggatacccactttgcatcccaggagtttttctcggcgaatgccatcagtgatcagctgcttggggccgggagtgacctgaaggatttcacgttgaacgaaaccgttaattctatctttgcacaaggcgccccgcggtcttcactggctgagagctttttcgtggattacgaggaaaatgaaggagccggcccctatcttctgaacggctcctatctagaactcagcagcgatcgggtcgccaatagctcctctgaagccccatttcccaatgtttcaacgtctctgttgacatcagcgggtaatagaacccacaaagctaggacccggcccaaagcgaggaaacagggggttagtccagctgacatgtataggtggaagctgtcctctcacgagccctgttcagctacttgcactacaggagtgatgtcagcctatgcgatgtgcgtaaggtacgacggcgtggaggtagacgactcctattgtgacgccttgactcgcccagaacccgttcatgaattttgtgcgggcagggaatgtcaacctcgatgggagactagtagctggtcggaatgttctagaacctgcggagaggggtatcagttcagggttgtccgctgctggaagatgctatcgccagggttcgatagctcagtgtactcggacctctgcgaggcggctgaagcggtgaggccagaggaaagaaagacttgcagaaaccctgcctgcggcccccagtgggagatgtctgagtggagtgagtgtaccgccaagtgcggcgagcggagcgtcgtcacaagggatatccgttgcagcgaggacgaaaagctgtgtgaccccaatacaagacccgtgggggaaaaaaactgtaccggaccaccttgtgatcggcagtggaccgtgtcagactgggggccatgcagcggatcatgcggccagggccgtacgatcaggcatgtgtattgcaaaacatccgatggacgggtagtgcctgagagccagtgccagatggaaacaaagccccttgccatccacccatgtggagataaaaactgtcctgcccattggctcgcccaggactgggagaggtgtaatactacgtgtgggcgaggagtgaagaagaggctggtgttgtgtatggaactagctaacgggaagccccaaacgagaagtggccctgagtgcgggctcgccaagaaaccacctgaggaatcaacgtgtttcgagaggccgtgtttcaagtggtatacctctccatggtccgaatgtacaaagacttgcggtgtcggtgtgcgaatgcgcgacgttaaatgttatcaggggacagacattgtgcggggatgtgacccactggtcaagccggtaggacggcaggcatgcgaccttcagccatgtcccacagaacctcctgatgactcttgccaggaccagccaggaacgaattgtgctctggccattaaagtaaatctttgtggccattggtactattccaaggcttgttgcagatcgtgtcgacccccccattcctag

SEQ ID NO: 178076 - DNA, 3183 bp, synthetic construct
  misc_feature 1..3183: note = Description of Artificial Sequence: Synthetic coding sequence
  source 1..3183: mol_type = other DNA
atgctgttcgaggtgggcgagggcggcggcgccggcgaggagggcaagggacggggcaggcccggcaggtctttgtgtacacatgccgccccagctcggacagctcacctggctccatccgctctaaggtctgcgagacctttcctttgggaggataatctcctgacccgtagtcagggcttaccggacaaccatgatcaactggtgccagacaatctggaagcatgggccctcgcaggccctagaggccttttccccaaacgcaccctggtgatttggaaaagaatcggggccggactcgtcgttaccgtagcattgctccctagaatggacggcagatggcagtgttcctgttgggcatggtttctcctggtgctggcggtggtggcaggcgatacagtcagtactgggagcactgacaacagtcccacctccaactcactcgagggcgggaccgatgctacagccttttggtggggggagtggactaagtggactgcatgctcacgcagttgtgggggcggcgtgacaagccaagaaaggcactgtcttcagcaacgtcgaaagtccgtacccggccctggaaataggacttgtacagggacatctaagcggtaccaactgtgcagggtgcaggaatgccctccagacggaaggagctttcgagaagagcagtgtgtttctttcaattcccatgtgtataatgggagaacacaccagtggaagccactgtatcccgatgactatgttcacatttccagcaagccctgcgatctgcactgtacaaccgtcgatggccagcggcagctgatggtcccggcaagggatggcacttcatgcaaacttaccgatctgcggggagtgtgcgtgtctgggaagtgcgagcctatcggctgcgacggggtgctcttctccacacataccctggacaagtgcggtatatgccagggggacggttcctcctgtacacacgtcaccggaaattacagaaagggcaatgctcatctgggctattctttggtgactcacatcccagctggggcccgcgatattcagattgtggaaagaaagaaaagcgccgatgttctggccctagctgacgaggccggctattacttttttaacgggaattacaaggtggactcacccaagaattttaacatagcagggaccgtggttaagtacagacgtcctatggatgtctacgagactggcattgaatatattgtggctcagggcccaaccaatcaagggctcaacgtgatggtctggaatcagaacggcaaaagtccatcaataacattcgaatacacacttctccagccccctcacgagagccgcccacagcccatctactacggcttttcggagtcagctgagtcacaggggctggacggcgcagggcttatgggctttgtgcctcacaacggtagcctgtatggccaggcctcatctgaacgactggggcttgataaccggctgtttggccaccccggcctcgatatggagctaggtcccagtcagggacaggagaccaacgaggtctgcgaacaggcaggaggcggagcatgcgaaggaccgccgagagggaagggcttcagggataggaatgtgactggaaccccactcacgggcgataaggacgacgaagaggtcgatacccacttcgcgtcacaagagttcttctcagctaacgccattagcgaccaactgttgggagcgggctccgaccttaaggatttcacacttaatgagacagttaattcgatctttgctcaaggcgccccaaggagcagcctggccgaatctttcttcgtggattatgaagaaaacgagggagccggcccctaccttctaaatggttcatatctcgagttatcgtctgatcgagtagccaactcttccagtgaggctccttttcccaatgtgagcactagcctgctgacatcagccggtaatcggacacacaaggcacgcacgcgtcctaaagccaggaagcagggagtctctcccgctgatatgtataggtggaagctgtcatctcacgagccatgcagtgctacatgtaccactggcgttatgtctgcctacgccatgtgtgtgcggtacgacggcgttgaggtggatgatagctattgtgacgcactaacaaggcccgaacccgtgcacgagttttgcgccggacgcgagtgtcaacccagatgggaaacctcctcctggagcgagtgttctcgtacttgtggtgagggctaccagttcagagtagtcaggtgctggaaaatgttgtcccccggcttcgactctagcgtctattccgatctctgtgaggccgcagaagcagtacgtcctgaagagcgtaaaacctgtcgtaaccctgcatgtgggccccaatgggagatgtccgagtggtccgagtgtaccgccaaatgtggcgaacggtccgtggttactcgcgacattcgttgcagtgaagacgaaaagctttgcgacccaaacacgcggcccgtgggagagaagaactgtactggacccccatgcgatagacagtggacggtttccgactggggcccatgcagtggtagttgcggccaagggaggacaataaggcatgtctattgcaaaacaagtgacggccgtgttgttccagaaagccagtgccagatggagaccaagccactggccatccacccctgtggagacaagaattgtccagctcattggttggcccaggactgggaacgttgtaacacgacctgcggccgcggtgtgaagaagcgcctggtcttgtgcatggagctggctaacggcaagccacagacaaggtcagggccagaatgtggactggcgaaaaagcccccagaagaatctacatgctttgaaagaccttgtttcaagtggtacactagtccctggagcgaatgcaccaaaacgtgtggcgtaggtgtgagaatgcgcgatgtaaagtgctatcaaggcacggatatcgtcaggggctgcgaccccctggtgaagcccgttggccggcaggcttgtgacctgcagccctgtccaactgagccccccgacgacagctgccaggaccagcccggtacaaactgcgccttagcaattaaagtcaacctgtgtggtcactggtattactctaaggcgtgttgtagaagctgtcggccgcctcacagttag

SEQ ID NO: 178077 - DNA, 5076 bp, synthetic construct
  misc_feature 1..5076: note = Description of Artificial Sequence: Synthetic coding sequence
  source 1..5076: mol_type = other DNA
atggccagctggaccagcccctggtgggtgctgatcggcatggtgttcatgcattcgccactgccccaaaccaccgcagagaagagtccaggggcatacttcctaccagagtttgctctgtctcctcagggaagctttttggaggacaccacaggcgaacagttcctgacctaccgatatgacgaccagacatcccggaatactcgctccgacgaagacaaggacggaaattgggatgcatggggcgactggagtgattgctctcgaacctgcgggggcggcgcctcttacagcctgaggcgatgcctgacaggacggaactgtgaaggccaaaatattagatataagacctgtagtaatcatgattgcccaccagatgcggaagactttcgggcgcagcagtgttccgcgtacaacgacgttcagtaccagggccattattatgagtggctgcctcgatacaacgatccagctgccccgtgcgcactcaagtgtcacgctcagggtcaaaacctggtggtggagctagcccccaaagtgctcgatgggacaagatgtaatactgactctctcgacatgtgcatctcaggtatctgccaggcggtgggctgcgataggcaactgggctctaatgctaaagaggataactgcggcgtatgtgctggagacggcagtacttgcagactagtcaggggccagtcaaaatcccatgtctcccccgagaaacgggaggagaatgtcatcgccgtccccctcggctcgcgctccgtgcgcattacagttaaaggacccgctcacctgttcattgaatccaaaacactgcagggctctaaaggagaacacagctttaacagtcctggcgtctttctggttgagaacaccacagtcgagttccaacggggttcagagagacagacttttaagatccctggaccactcatggcagatttcatttttaaaactaggtatactgcagccaaggactcagtcgtccagttctttttttaccagcccatcagccaccagtggcggcagacagacttttttccctgcaccgtgacgtgtgggggcggctaccagctgaacagcgccgagtgcgttgatatccgcctgaagcgggttgtaccggaccattactgtcactactatcctgaaaatgtcaagcctaaaccaaagctcaaggagtgctccatggatccttgcccttctagtgatggattcaaagaaattatgccctacgatcattttcaacctcttccacgttgggaacacaatccatggaccgcctgctcagtcagctgtggcggaggtattcagagacggtcgtttgtctgcgtcgaggagagcatgcacggagagatcttgcaggtggaagagtggaagtgcatgtatgctccaaaaccaaaagtaatgcaaacttgcaacctgtttgactgtcctaagtggattgccatggaatggtctcagtgtactgtgacttgcggccggggcctgcgataccgtgtggtactttgtatcaaccatcgaggcgagcatgtcggaggctgcaacccccagctcaaactccatatcaaagaggagtgcgtaatcccgatcccgtgctacaagccaaaagagaaaagccccgtggaagctaaacttccttggctcaagcaggctcaggaactagaagagaccaggattgccacagaggagccgacatttattccggagccctggagcgcctgtagtacaacttgcgggcccggggtgcaggtcagggaagtgaaatgccgcgtcctgttaacttttacacaaaccgagaccgagcttccagaggaggagtgtgagggccccaaattgccgactgagagaccatgtttactcgaagcttgcgatgagtcccctgctagtcgggagctggacatacccctccctgaagattccgaaaccacatacgattgggaatacgcgggttttacaccgtgtacagctacatgtgtgggaggacatcaggaggcaatcgcggtgtgtttgcacatccagacccaacagacggttaacgacagcctatgcgatatggtacaccgacctccagcaatgagtcaggcctgcaacacagagccttgccctccccgctggcacgttgggagctggggcccctgcagcgctacatgtggagttggtattcagacaagggatgtctactgtctgcaccccggcgagacgccagccccccctgaggagtgtcgggatgagaaaccccacgccttgcaggcctgtaatcagtttgactgcccacctggttggcacatcgaggagtggcaacagtgctcccgaacttgtggcggaggtacgcagaatcggagagttacatgtcgacagctcttaacagatggtagtttcctgaacctaagtgatgagctgtgccaggggccaaaagcgtcaagccacaaatcatgcgcccgcaccgactgtccgcctcacttggctgtgggggattggtcaaagtgtagtgtgtcatgcggggtgggcattcagagaaggaaacaggtgtgtcagaggcttgcagccaaaggtagaagaatcccattgagcgagatgatgtgtcgggacttaccagggttgcctctggtgcgctcttgtcaaatgcccgaatgctccaaaatcaagagcgaaatgaaaaccaagcttggtgaacagggccctcagattctcagcgtgcagagggtgtatattcagacgcgggaagaaaagagaatcaatctgacgatcggctccagggcttacctgctaccaaatacgagcgtcatcataaaatgccctgtcaggcgatttcaaaagtcactcatacaatgggagaaggatggcagatgcctccaaaactccaagcgactcggaataactaagtctgggtccctaaaaatccatggcttggctgcaccagatatcggagtttacaggtgtatcgcaggatctgctcaggagacagtggttctgaaactgatcggcaccgacaaccgtctgatcgctcgacccgctcttagggaaccaatgcgggagtatcccggcatggaccattctgaagcgaattcactgggtgttacctggcacaaaatgcgccagatgtggaacaataaaaatgacctgtatctcgatgacgaccacatcagcaatcagccattcctgagagcactcctgggacattgtagcaattcagctgggagcactaactcttgggaactgaaaaacaagcagttcgaagccgctgtgaagcagggcgcctacagcatggacactgcccagttcgatgagctaatcaggaacatgtcccagttgatggagacgggagaggtaagtgatgacctggcctctcagctgatttatcagttagtggcggagcttgctaaagcccaaccgacccatatgcagtggaggggaatccaggaggaaacccctccggctgcccagctgagaggggagaccggatccgtgtctcagtctagccatgccaaaaatagcggaaaactaacctttaagccaaaaggccccgtgttaatgcggcagtcacagcctccctccatttcttttaataagacaattaattctcgtatcggaaataccgtgtacataacaaagcgaaccgaggtgattaacatcctctgtgacttgataacacccagcgaggccacctatacatggacaaaggacggtaccctgctgcagccatctgtgaaaataatattggatgggacggggaagattcagatccaaaaccctactcggaaggaacagggtatctacgagtgtagtgtcgccaaccatctgggcagcgatgtggagagcagtagcgtgctatacgccgaggcccccgttattttgagtgttgaaaggaatatcaccaagccggagcacaatcatctctccgtcgtcgttgggggcattgttgaggcggcactgggcgcgaacgtgacgattcggtgtcctgttaaaggtgtgccacagccaaatattacgtggttgaagcggggggggtctctttccggaaacgtctccctcctcttcaacggtagtctgctgctgcaaaacgttagtctagaaaatgagggcacgtacgtgtgcatagccaccaacgccctgggaaaagccgtcgcgacttccgtgctccatctcttagaaaggcgttggcctgagagtaggattgtctttctccaaggccataaaaagtatattttgcaggcaaccaacactcgcaccaatagtaacgaccccaccggtgagcccccccctcaggagcccttctgggaacctggaaattggagccattgttccgctacctgtggtcatctgggggctagaattcagagacctcagtgtgtaatggccaacggccaggaggtgtctgaagcactgtgtgatcacctgcagaaaccgctggccggcttcgagccttgtaacatacgcgactgtcccgcccgttggttcacatccgtgtggtcccagtgcagcgtctcctgcggagaaggttatcacagcaggcaggtgacttgcaaaagaactaaggcaaatggtaccgtacaggtcgtgagccccagagcctgtgctccgaaggacagaccactgggacggaagccctgctttgggcacccttgcgtacagtgggagccagggaatcgctgtcctgggagatgtatgggaagggccgtgcggatgcagcagagacacaccgcttgccagcacaactcttcggactccaactgtgacgatcgaaaaagaccgacactcagacgtaactgtacgagcggggcatgcgacgtgtgctggcacaccggaccttggaaaccatgtacagcggcctgcggcagaggttttcagagcagaaaggttgactgcatacacacacgctcctgtaagcctgtagccaagagacactgtgtgcaaaaaaagaagccaatcagctggcggcattgcttgggaccaagctgtgatagagactgcactgataccacgcactactgcatgtttgtgaagcatttgaacctgtgcagcctggataggtacaaacagcggtgctgtcagagttgccaagagggctag

SEQ ID NO: 178078 - DNA, 3225 bp, synthetic construct
  misc_feature 1..3225: note = Description of Artificial Sequence: Synthetic coding sequence
  source 1..3225: mol_type = other DNA
atggagaactggaccggccggccctggctgtacctgctgctgctgttatccctgccacagctctgcctagaccaggaggttctcagcggacactctttgcagacacccaccgaagaaggccaggggcctgaaggcgtatggggaccttgggtacagtgggccagttgctctcaaccttgcggagtgggggtgcaacggcggagccgaacttgtcagctccccaccgtacagttgcacccaagcctcccactgccaccccggccccctcgccaccccgaagccctcttgccacggggacagggacccagaccccagaccagcccagaaactcttcctctctatcgcacccagagtcggggtcggggcggcccgctgagagggccagcttcccacctcggccgtgaggagacacaggagatcagagctgcaagaagaagccgccttagagacccgataaagcctggtatgtttggttacgggcgcgtgccattcgcactccctctgcacaggaatcgaagacatccgcggagtccgccgcgctctgaactcagtctgatctcaagccgcggtgaagaggctatcccctccccaacacccagagccgagcccttctccgcaaacggtagtccacaaacggagctccctccaactgagctgtcggtacatactccttctccacaagcggagcccctgtccccagagaccgcccagacagaggtagccccaagaactagaccggctccactgcgccaccacccccgggcccaggccagtgggacagagccaccaagccccactcacagcctgggagaagggggatttttccgtgccagccctcagccccgtcggccatcatcccagggatgggccagcccccaagtagccgggcggcggcctgaccctttcccctcagtgcctcgtggaaggggccagcagggccagggtccttggggcacaggaggaaccccacacggcccacgattagagcccgatccccagcaccccggggcatggctgcctctgctgtcaaacggacctcatgcgtctagcctgtggtctttgtttgctcctagcagccctatccctcgctgcagtggcgagtcagagcaactgagagcctgcagccaggctccttgcccccccgagcagccagatcctcgcgccctgcagtgtgctgcttttaactcacaggaatttatggggcaactctatcaatgggagccttttaccgaagttcagggttctcagcgttgtgaactcaactgtcggccgcgcggattccgattctacgtgcgtcataccgagaaagtgcaggacggcacactgtgccagcctggagccccagatatttgtgttgcaggcagatgcctaagtcccggctgtgatggcattctggggtctggacgtagacccgatggctgtggcgtgtgtggcggcgatgacagcacctgcagactggtgagcggaaatcttactgacaggggcggtccactagggtaccagaaaattctctggatccctgccggggcactgcggctgcagattgctcagttacgcccttcaagcaattatctggccctcaggggaccagggggacggtccattattaatggaaattgggcggttgaccccccgggctcctaccgggctggagggacagtatttcgctacaacagacctccacgcgaggaagggaaaggggagagcttatcggcagagggtccaacgacacagcccgtggacgtttacatgatttttcaggaagaaaacccaggagttttttaccagtacgtgattagcagccctccacctattctcgagaaccctactccagagccccccgtgcctcagctccagccagagatcctccgagtggagcctcctctcgccccggcccctagaccagcacggacacctggcacccttcagcggcaggtaagaattccacaaatgcctgcgccccctcatcctagaactcctctgggaagtcccgcggcatattggaagcgggtagggcattccgcttgttctgcctcttgcggcaaaggagtctggcgccccattttcctctgcatttctcgtgaatcaggggaggaattggatgaaagatcctgcgcagcgggagctcgacctccagcttcccctgagccatgccatggtacgccatgccctccttactgggaagcgggcgaatggaccagttgtagtcgatcctgcggaccaggcacgcaacacaggcagctgcagtgtcgccaggaattcggaggaggcggctcatcagtcccgccggagcgttgcggacatctccctcggccgaatatcactcagtcttgtcagctgcgtctgtgtggacattgggaagtgggctccccttggagtcaatgtagtgttaggtgcggccgggggcagagatcccgtcaggtacgatgtgtgggaaacaatggagacgaagtctctgagcaagaatgcgcaagtgggccccctcagccaccgagtagagaagcatgtgatatgggtccctgcacaactgcctggttccactcagactggtcatctaagtgcagtgcagagtgcggtacaggcatccaacgaagaagtgtcgtgtgccttggctccggggcagcccttgggcctgggcagggcgaagcaggcgcaggcacgggccagagttgtcccactggctcaaggccccccgatatgagggcatgttccttgggaccctgtgaacggacttggagatggtataccggcccttggggagagtgtagttcagaatgcggatcaggcacccagcgccgagacatcatttgtgttagtaagctgggaacagaattcaatgtgacctccccttcaaattgtagccacttgccgagacctccggctctacagccttgtcagggacaggcctgccaggatcgatggttcagcacgccgtggagcccctgtagtagatcctgccagggcggcactcagactagagaagttcaatgtctcagtacgaatcagacgctttccacaagatgtccccctcagctcaggccgagccgaaagcgaccatgcaatagtcaaccctgctcccagagaccggatgatcagtgcaaggatagtagtccacactgtccacttgtggtccaagcaaggttatgtgtgtacccctactacaccgctacttgttgccgatcttgtgcccatgtactggaacggtcaccccaggatcctagttag

SEQ ID NO: 178079 - DNA, 3225 bp, synthetic construct
  misc_feature 1..3225: note = Description of Artificial Sequence: Synthetic coding sequence
  source 1..3225: mol_type = other DNA
atggagaactggaccggccggccctggctgtacctgctgctgctgctcagcctcccacagctgtgcttggaccaggaggtactgtctggccacagtctgcagacaccaactgaggaaggacagggtcctgaaggcgtttggggcccttgggtccagtgggcctcctgtagccagccttgcggtgtgggcgtccaaaggcgttcaaggacctgtcagctgccaaccgtgcagctgcatcctagcctacccttgcctcccagacctcctcgccatcctgaagccttgctgcctagaggccagggacccaggccccagacctccccagagacccttcctctgtacagaacgcagtctcgcggccgtgggggccccctgcggggcccagcctcccatctcgggagggaggaaacacaggagattcgcgccgcccggcggagcaggttacgcgatcccatcaagcccggaatgttcggctatggaagggtgccgtttgctctgcccctgcaccgcaaccggcggcaccccaggtcccccccccgcagtgagctgtctttgatctcaagtaggggagaggaggcgatcccctctccgaccccgcgcgcagagccctttagtgccaatggcagtccacaaaccgagttaccacccacagagttaagcgtgcacacgcctagcccacaggctgaaccactttctcctgaaacagcccaaacggaggtagccccacggacccgccctgccccccttagacatcatccgagagcccaggcaagtggaacagaacccccgtctcctactcattccctcggcgagggcggcttcttccgcgctagccctcaaccacggcgcccatctagccaggggtgggcgtcacctcaggtcgccggtaggagacctgatccgttcccctctgttccaaggggccgcggccaacagggccaaggaccttgggggacaggcggtactcctcacggcccccggttggagcccgaccctcaacaccccggcgcttggctccctctgctttcgaacggcccacacgccagcagcctgtggtcactgtttgctccctcctcccctatccctcgatgcagcggggagtctgaacagctgcgtgcatgttcacaggcgccatgccctccggaacagcccgaccctagggctttgcagtgcgccgctttcaactcccaggagttcatgggacagctgtaccagtgggagccttttactgaagttcagggcagccaaagatgcgagctgaactgccggccccgaggcttccggttctatgtgcgtcataccgagaaagtccaggatggtacgctttgccagcccggtgcccctgatatttgcgtggcaggaagatgtctgagccccggctgcgatggcatcctggggagcggtcgcagacccgacggttgcggcgtctgcggaggagacgactctacctgtagactggtatctggaaacctcacagacaggggagggcccctgggttaccagaagatcttgtggatacccgccggtgctcttagactgcagattgctcaactacggccctcaagcaactacctcgccttgaggggccccggaggtaggagtattattaacggaaattgggcagtcgaccctccagggagttatagggcaggtggcacggtcttccgctataaccgaccccccagggaggaaggaaagggggagtcactcagcgctgaggggcctaccacccagccagtggacgtttatatgatcttccaagaggaaaaccctggtgtcttctaccagtacgttatctccagcccgcctccaatactggaaaaccctactcccgagcccccagtgcctcaattgcagccggagatcctgcgggtggagccccccttggccccagccccgaggccggcccgtactccaggcaccttgcagcggcaggtgcgtatcccccaaatgccagctcccccccatccacggaccccgcttgggtcacctgcagcttactggaaaagggttggacattcagcctgttcggcttcctgtggcaagggggtctggcgccctatcttcttgtgtatttccagagagtcaggcgaagagttagacgagcgctcttgcgcagctggggcccgtcctccagcctctccggagccctgtcacggcaccccatgtccaccctactgggaggcaggggagtggacctcatgctcacgctcctgcggaccagggacgcaacacagacagctgcagtgtaggcaagagttcgggggcggaggatcgagtgtgccacctgagcgctgcgggcacttacctcgcccaaacattactcagtcatgccagctgcgcctctgcgggcattgggaggtggggtctccgtggagtcagtgcagtgtacggtgcggtcgaggccaaagatctcggcaggtccgctgtgtaggtaacaatggcgatgaggtttctgagcaggaatgcgcctccggtccaccccagcctccttcacgcgaagcatgcgatatgggtccatgtacaaccgcatggttccatagcgattggtctagcaagtgtagtgccgaatgcgggacaggaatccagcgacggagcgtggtgtgcctgggctccggggcggcactcggcccaggccagggggaagcaggagccggtacaggccagagttgtcctaccggttccaggccgcctgatatgagagcctgctccctaggcccatgtgaaagaacttggcgctggtacacgggtccctggggcgagtgcagctcagaatgtggaagtggcacccagcggcgcgatattatttgcgtgtctaagctcggcacagagtttaacgtaacgagcccgtccaattgttcccacttgccacgtccacccgctttgcaaccctgtcagggccaggcttgccaagacaggtggtttagtactccctggtctccctgctcacgcagttgtcaagggggtacacaaacgagagaagtccagtgcttatcaacaaatcaaaccttgtctacacggtgccccccacaacttagaccgagccgcaaaagaccatgtaatagtcagccctgctcacagcggccagacgatcagtgtaaagacagctcgcctcattgtcccctggttgtccaggccagactctgtgtatacccctactatacagcaacttgctgtcgatcctgtgcgcatgtcctggaacgctccccacaggatccatcttag

SEQ ID NO: 178080 - DNA, 3294 bp, synthetic construct
  misc_feature 1..3294: note = Description of Artificial Sequence: Synthetic coding sequence
  source 1..3294: mol_type = other DNA
atggagaactggaccggccggccctggctgtacctgctgctgctgctcagtctcccccagctatgtctcgaccaggaagtgctgagtggccattctctgcagaccccaacagaagagggacagggccctgaaggcgtctggggaccctgggttcaatgggcttcctgttctcagccttgtggtgtgggcgtgcagagacggtctcgcacctgtcaactcccgaccgtgcagctacacccttccctgcccctgccaccacggcctccacgacacccagaggcactgctgccccgggggcaaggcccacggccacagacctcgcctgaaacattgccactgtaccggacacagtctagagggcgaggggggcccctgcgcggacctgcctctcacctcggccgggaggaaacccaggagatcagggcagcccggcgctctcgccttagggatccgatcaagcccgggatgttcggatacgggagagttcctttcgcgctgcccctgcaccggaaccgacgtcatccaaggtcaccccctcgatctgagctctcccttatttcgtctagaggtgaagaagctataccgtctcccaccccgagagctgaacccttctctgctaacggcagtccccagacagaactcccgcctaccgaactctcggtgcacacaccctcaccacaggccgagcccctaagccccgaaaccgcccagacggaagtagctccccgcaccagacccgcacctctccgccaccacccacgcgcccaggccagcggtacagagccgccaagtccgacacacagcctgggcgagggaggattttttcgggcttccccacaaccccgtagacccagcagtcaagggtgggccagcccccaggttgctggccgaagacccgacccttttccttccgtcccccgcggccgcggccagcagggtcagggcccgtggggtacgggcggcaccccccacggcccacggctggagcccgacccacagcatcccggcgcctggctgcctttgttatccaatgggccccatgcctcaagcctgtggagcctctttgctcctagttcacccattccacgatgttccggagaaagcgaacagcttcgggcttgctcccaggcaccatgccccccagagcagcctgaccctcgcgctcttcagtgcgcagcatttaacagtcaagaattcatgggtcaactctaccagtgggaaccatttacagaggccccccttctgcccctcaggcacgcatttttccttctccctggcgctgggtctggcgattccaccggcgtgcagggttctcagcggtgcgagctgaattgccgcccacgaggcttcagattctatgtgcgccacactgagaaggtgcaggatggtacactctgccagcccggggcgcctgacatttgtgttgctggaagatgcctctcacccggttgcgatggaattctgggatccgggcggcgacctgacgggtgtggggtctgtggaggggatgatagcacgtgtaggctcgtgtctggaaacctcacggatcggggtggacctctggggtatcagaagattttatggatcccagccggggcacttagactgcagatcgctcaattacggcctagttctaactacctagctcttcgcggcccaggtggccgctccattattaatgggaattgggccgtggaccccccagggagctaccgcgcaggcggtacagttttcaggtacaaccgcccaccccgagaggagggtaagggggagtcccttagcgccgaaggacccaccactcagccggttgatgtgtacatgatctttcaggaagaaaaccctggcgtgttctatcagtatgtgatctcaagccccccacccattctggagaaccccacccccgaacctcccgttccacaactgcagccggagatcttgagagtggagcccccattagcacccgccccccgccccgccaggacgccaggaacattacaacggcaagtgagaatccctcagatgccagcgcccccgcacccaagaacgccccttggatcaccagctgcctactggaaaagagtgggccactctgcctgcagtgccagttgtggcaagggagtgtggcggccaatctttctttgcatctcacgggagtctggcgaggaattggatgaaaggtcgtgcgccgccggtgcgcgcccacctgcttcgcctgaaccctgccatggtacaccgtgccctccctactgggaggcaggcgagtggacatcatgctcaaggtcctgcggcccggggacccagcaccgacagttgcagtgccgccaggaattcggcggagggggatctagcgtgcctccggagcggtgcggtcacctccctcgcccaaatattacccagtcatgtcaactcagactttgtgggcattgggaagtaggatcgccttggtcccaatgcagtgtgcggtgcggtaggggacagcggagccgacaggtacgatgcgtaggtaacaacggcgacgaagtcagtgagcaggagtgcgcatctgggcctcctcagcctccctctagagaagcatgcgatatgggaccatgcacaacagcatggttccatagtgactggtcttccaagtgctcggccgaatgtggaactggaatccagaggcgatcggtggtttgtcttgggtcaggggcagctcttggcccaggacagggtgaggctggggccgggaccggccagtcatgtccaactggctcccgtccaccagatatgagagcttgttctcttggaccatgtgagcgcacatggcgatggtataccgggccctggggggagtgttcctctgaatgcggaagtgggacacagcgccgggatataatctgtgtctctaagctcggcacagaatttaatgtgacaagcccgtcaaactgcagtcatctgcccagaccccccgcccttcagccatgtcagggacaagcctgccaggaccggtggtttagcactccgtggtctccttgctcaaggtcctgtcagggagggacccagacaagggaagtccaatgcctgagcacaaatcagaccctctctacgagatgtccccctcagctacgcccttcccggaaacgcccatgtaattcacagccatgctcacagcgacccgatgaccagtgcaaggattccagcccccactgcccgctcgtggtgcaagcccgactgtgtgtgtacccctattataccgcaacttgctgccgctcctgtgctcatgtgctcgaacgtagcccccaggatccgagttag

SEQ ID NO: 178081 - DNA, 2634 bp, synthetic construct
  misc_feature 1..2634: note = Description of Artificial Sequence: Synthetic coding sequence
  source 1..2634: mol_type = other DNA
atggagaactggaccggccggccctggctgtacctgctgctgctgctgtccctgccacaactgtgcctggatcaggaggtgctctctggtcattcattgcagacccccacagaagaaggtcaaggccccgaaggagtttggggcccctgggtccagtgggcaagttgcagccagccttgcggcgtaggcgtgcagcgccgctctcgaacatgtcagctgccgacagttcaactccacccaagcctgccactgcccccccgtccaccccgccaccccgaggccctgctccctagaggccagggaccacggccgcagacatctcctgagactctgcctctctacagaacccagagccgcggacggggggggccactgagaggccctgcctctcatctcggccgagaggagactcaagagatcagggcagctagacgctccaggttgcgggaccccataaagcccggcatgtttggctacgggcgagtgcctttcgccctgcctctccatcgaaaccgccggcacccacgatccccacctcggagtgagctcagtctcatatcttcccgtggtgaagaagctataccctcgccaacgcctagagccgagccattttcagctaatggctccccccagaccgaactccccccgacggagttgtccgtccacaccccctcaccgcaggctgagccattgagtccagaaacggcccaaaccgaggtcgctcctcgcactcgtccagccccactgagacaccatccacgcgcacaggcgagcggtactgaaccgccatcacccacccatagcttgggggaggggggtttcttccgtgccagtcctcagccccggaggccctccagccagggctgggctagccctcaggtggcaggcaggcgccctgacccgtttccatctgtgcctcgcgggaggggccaacagggccaaggcccttggggtacaggaggaactccacacggtccccgcctcgaacctgaccctcagcaccctggcgcctggctccctctgctgtcgaacggcccacacgcctccagcctgtggagtctcttcgcaccaagtagtcccatccccaggtgttccggagagtccgagcagctgagggcatgcagtcaggcaccatgcccacccgagcagcctgacccacgggctttacagtgtgcagcattcaactcacaggagttcatgggacagttatatcagtgggaaccctttacagaggtgcagggatcgcagcggtgtgagctaaactgccgtccccgcggatttcggttttacgtaaggcacactgagaaggtccaggacggaacattatgccagccgggcgcaccagacatttgcgtggccggcagatgcctgagtcctgggtgtgacgggattctgggaagcggcaggcggccagacgggtgtggggtgtgcggcggggacgactctacatgcagattggtttcgggcaatttaaccgaccgggggggaccgctgggttaccaaaaaattttgtggattcccgctggtgcactgcggctgcagattgcccagctccggccatcgtctaattacctcgccttacgcggtcctggaggacggagcatcatcaatggcaattgggcggtcgaccccccaggatcatatagagcaggggggaccgtgtttcgctacaacaggcctccccgggaagaaggcaagggagagtctttgtctgcggagggcccaacaactcagcctgtcgatgtgtatatgatctttcaggaagaaaacccgggagtgttctaccagtacgtgattagttcacccccgccaattctggaaaatcctacccccgagcctcctgttccccagctgcaaccagagattttacgagtggaaccacccctggcccccgcaccccgtccagccaggacgccagggactctccagcgtcaggtccggatcccccaaatgcccgcaccgccacatcctagaactccactgggctctccagctgcatactggaagagggtgggccacagcgcttgttccgctagctgcggtaagggtgtgtggaggcccatcttcctgtgtatctcccgtgaatctggggaggagctggacgagagaagctgcgcggccggcgctcgcccacccgcgtccccagagccctgccacggtactccctgcccaccctactgggaggcaggcgaatggacgtcatgctcgcgatcttgtggccccggcacacagcataggcaactgcagtgtcgtcaggaattcggcggaggcggaagcagtgtccctccggaacggtgcggccacctgccaagacccaacataacccagagctgtcaactaagactgtgtggtcactgggaggtaggaagcccatggtcccagtgctcagttagatgcggcaggggccagaggagtcggcaagtcagatgtgtaggtaataacggggacgaggtatctgagcaggagtgcgcctctggtccccctcaacctccctccagagaggcatgtgacatgggaccttgtactaccgcctggtttcacagtgattggtccagcaaggtgagtcctgaacccccagcgatctcttgtatcctgggtaaccatgctcaagacacttccgctttccccgcctag

SEQ ID NO: 178082 - DNA, 1311 bp, synthetic construct
  misc_feature 1..1311: note = Description of Artificial Sequence: Synthetic coding sequence
  source 1..1311: mol_type = other DNA
atgggcagcctggccctggccggcgtgctgatggccgtggagagcgtgggagtcatgattctgccagtggctttgtttaggggaacatccttgaccgagggggccccctgggccattcggagaagctgcggatttcaaagggaaccctgtggaagtaggctgcccagttccggattggctcccacgacatggcacttcgtcgctctgggcaggagtatcatcaacggaaattgggccgtagatcctcctggcagttatcgcgcaggagggaccgttttcaggtataatcggccgccaagggaggaaggcaaaggtgagtctctgtcagcagagggcccaacaacccagccagtggatgtgtacatgatttttcaggaggagaaccccggagtgttttatcagtatgtaataagcagccctccacctatcctggagaaccccaccccagagcccccagtcccccagctgcagcccgaaattttgcgagtggagccgcctctagcgccagcgccgaggccagctcgaaccccaggtacacttcagcgccaggtgagaataccacagatgcccgccccgccacacccaagaacgccacttgggtcccctgcagcgtattggaaacgcgtcgggcactccgcctgctccgcaagctgtggtaagggcgtttggaggccgatctttctgtgtatctctagggaaagcggcgaggaattggacgaaaggtcttgcgccgcaggtgctagaccacccgcctcccccgaaccttgtcatggaaccccctgccctccttattgggaagcaggcgagtggacaagttgttctcgaagctgcggacccggtactcagcataggcagttgcagtgtaggcaggagttcggcgggggcgggtcttccgtgcctcccgagagatgcggtcatttgcccaggcctaatataactcagtcgtgccagctgagactttgcggccattgggaggttggaagcccctggtcacagtgttctgtccgctgcggccgggggcagcgcagcagacaggtccggtgtgtcggcaacaatggggacgaggtctctgaacaggaatgcgctagtggacctcctcagcctccctcccgggaggcttgcgatatgggaccttgtactactgcctggttccacagtgattggagttcaaagtgctcggcggagtgcgggacagggattcagcgccgctccgtggtatgcctggggagcggcgctgcgctcggtcccgggcaaggcgaagccggcgctggaactggacagtcatgtccaactgggtctaggcccccatag

SEQ ID NO: 178083 - DNA, 2130 bp, synthetic construct
  misc_feature 1..2130: note = Description of Artificial Sequence: Synthetic coding sequence
  source 1..2130: mol_type = other DNA
atgcccggcatcgacaagctgcccatcgaggagaccctggaggactcgccccagacgcgatcattgttgggcgtgtttgaggaagatgccaccgccatttccaactatatgaaccagctataccaggccatgcaccgaatttatgatgcccagaacgagctatcagcagcaacacacttaacaagcaagttgctgaaggaatacgagaagcagcggtttccactgggaggcgatgacgaagtaatgtcctcaaccctccaacagttttctaaagtgatcgatgagctgagttcatgtcacgcagtgttatcgacccagctcgcagatgccatgatgttccccattacccagttcaaggagcgggatcttaaggagattttgactttaaaggaagtcttccagattgcctcgaatgaccacgatgctgcgatcaaccggtattcccgtctgtcgaaaaagagagagaacgataaagttaaatacgaagtgaccgaagacgtctacacaagccgcaaaaaacagcatcagactatgatgcactacttctgtgcactcaataccctgcagtacaagaaaaaaatcgcccttctggagcccctgctgggttatatgcaggcgcagatttctttttttaagatggggagcgaaaacctcaacgagcagctggaggagtttcttgccaacatcgggaccagcgtgcagaatgtacgccgcgaaatggatagcgacatagagaccatgcagcagaccattgaggacctcgaggtggccagcgatcccttatacgtccccgacccagatcccaccaaattccctgtgaaccggaacctgaccaggaaagccggatacctcaatgctaggaataagaccggcctcgtgtcatccacctgggatcggcagttctacttcactcaggggggcaacctcatgagccaggcgcggggcgacgtcgcgggagggctggcaatggacattgacaactgctcggtgatggcagtcgattgcgaggatcgccggtactgcttccagatcacgagcttcgatggcaagaaaagtagcattctacaggctgaaagtaagaaggatcatgaagagtggatttgcactatcaacaatatttccaaacagatttatctatcagagaatcccgaagaaacggccgccagagtgaaccagtccgcactggaagctgtgacaccaagcccctcctttcagcagcgacatgaatcattgcgaccggctgccggccagtctcgtcctcccacagcccgcacctcatcatctggaagcctcggctctgagtccactaacctggctgccttgtccctagacagtctggtagctcctgacacacccattcaattcgacatcatttcccctgtctgtgaggatcagcccgggcaggcgaaagctttcggacagggggggcgtcggaccaatccatttggcgaaagcgggggtagtactaaatctgagacagaggatagtatcctccatcaattattcattgtgcgcttcttgggctctatggaggtgaaatcggatgatcatcctgatgttgtctatgaaacaatgaggcagatattggctgcccgcgccatccacaatatctttcgtatgacagagagtcatctactggtcacatgcgattgtctgaagctaatcgacccacaaacgcaagtgacgcgcctgacattcccgctcccatgtgtggtcctgtacgctacacatcaagagaataagagactgtttgggttcgtcttgagaacatccagcggccggtctgaatccaatctctctagcgtgtgctacatctttgaaagcaacaacgagggggaaaagatttgtgatagcgtggggctggccaaacaaatcgcgcttcatgccgagttggacaggcgtgcctctgagaaacagaaagagatcgaacgggttaaagagaaacaacagaaggagctgaacaagcagaagcagatagagaaggacctggaggagcagagccggctgatcgcggcttccagtcgccctaatcaggcctcctccgagggtcagtttgtggttctatcctctagtcagtcggaagaatcagacctgggtgagggcgggaagaaaagagaatcggaggcatag

SEQ ID NO: 178084 - DNA, 1995 bp, synthetic construct
  misc_feature 1..1995: note = Description of Artificial Sequence: Synthetic coding sequence
  source 1..1995: mol_type = other DNA
atgcccgccgtggacaagctgctgctggaggaggccctgcaggactctccacagacccgcagtctgctgtcagtgttcgaagaagatgccgggactttgaccgactacacgaaccagcttcttcaggctatgcagagggtatacggcgcacagaatgagatgtgcttggcaactcagcagctcagcaagcagcttcttgcttacgagaaacaaaactttgctctcggcaagggtgacgaagaagtaatttctacacttcattatttttcgaaggtggtcgacgaattaaatttgcttcataccgaactcgctaagcagctggccgacaccatggtcctgcctattattcagttccgggagaaggacctaacagaggtaagtacgctaaaagatcttttcggtcttgcgtcaaatgagcacgatctctccatggcaaaatactcccggcttcctaagaaaaaggaaaacgaaaaagtgaagactgaggtagggaaggaagtcgcggcagccagacgcaagcagcatcttagctcactccagtattattgtgctctaaacgcattgcagtaccggaaacagatggcaatgatggagccaatgatcggcttcgcacacgggcagatcaacttctttaagaaaggggccgaaatgttttcaaagagaatggattcattcctttcgtccgtggcagacatggtgcagagcattcaggtggaacttgaagcagaggctgagaagatgcgggtttcacaacaagagttgctgtcggtagacgagtccgtgtatacaccagacagcgatgtggctgcccctcaaatcaacaggaacctcattcaaaaagccgggtacctgaatctcagaaataaaaccggcctagtgacaacaacgtgggagcggttatattttttcacccagggggggaatctaatgtgccagcccaggggggccgtggcagggggcctgatccaagatctggataattgttcagtcatggctgtggattgtgaagatcgaaggtactgtttccagattaccacccccaacggaaaaagcggcatcattctgcaggcagagtctcggaaggaaaacgaagagtggatttgcgccatcaataatatctctcgtcagatctacctcactgataatccggaagccgtggccatcaaactcaaccagacagccttgcaggcagtgactcctatcacttcctttggcaagaagcaggagtcttcctgtccgagtcagaacttgaaaaatagcgagatggagaacgagaacgacaagattgtgcctaaggccacggcaagcctccccgaggccgaagagttgatagcacctggaaccccaattcagttcgatatagtgctgcccgcaactgaattcttggaccagaacaggggatcccgcaggacaaatccctttggagagactgaggatgaatcttttccagaggcagaggatagcttgctgcaacagatgttcatcgtgaggtttctgggtagtatggcagtcaagacagattctaccactgaagtgatttacgaggctatgaggcaggtgctggctgcccgcgccatacacaatattttccgaatgacagagtctcatcttatggttacatcccagtccctgcggttaatcgacccccaaactcaagtcagccgcgctaattttgaacttacctcggtgactcagttcgccgctcatcaggagaataagcgcctcgtaggtttcgtcatcagggtgccggaaagcacaggagaagagagcctgtcaacttacatttttgaatccaacagcgagggcgagaaaatctgctatgcaatcaatctgggcaaggagattatcgaggtgcagaaggatcccgaagccttggcccagctgatgctgtccatccctctaacgaatgacggtaagtacgtactactgaatgaccaacccgacgacgatgacgggaacccaaatgagcatagaggggcagagtcagaagcttag

SEQ ID NO: 178085 - DNA, 2013 bp, synthetic construct
  misc_feature 1..2013: note = Description of Artificial Sequence: Synthetic coding sequence
  source 1..2013: mol_type = other DNA
atgcccgccgtggacaagctgctgctggaggaggccctgcaggactctccacagacacggtccctgctgagcgtctttgaagaagatgccgggacactgacagactacacgaaccaacttctgcaagcaatgcaacgggtatacggtgcccaaaacgagatgtgtctggctacacagcaactgtccaagcagttgcttgcctacgagaagcagaacttcgccctgggcaagggggatgaagaggtcatcagcacattgcattacttcagcaaagtggtggatgagctgaacttgctgcacaccgaattggcgaaacagcttgcagataccatggtcctgcctatcattcagttcagggaaaaagatcttaccgaggtctccaccctgaaggatctgttcggtttagcgtctaacgacgtgtgcctgtttcttgagcatgatctgagtatggctaaatactcccgcttgcctaagaaaaaagaaaacgaaaaggtgaaaaccgaggtaggaaaagaggtcgcagctgccaggagaaaacagcacctatcaagtctacagtattattgtgctttaaatgctctgcagtatagaaaacaaatggccatgatggagccaatgatcggcttcgcacacgggcagatcaatttcttcaagaaaggtgccgaaatgttttctaaaaggatggattccttcttgtcatctgtggccgatatggtgcagtctatccaggtggagctagaggccgaggcagaaaaaatgagggtgtctcagcaggaacttctctcagtggacgaaagtgtgtacactcctgattcggatgtggccgctcctcagatcaaccgaaatcttattcaaaaagccggttatcttaatttgcgcaataaaactggacttgtgactaccacatgggaaaggctgtatttttttacccagggcggaaatctcatgtgccagcctaggggggccgtggccggaggattgatacaggacctggataattgttctgtcatggctgtggattgcgaggaccgtaggtattgttttcagatcacaacccccaacggcaaaagcggcattattctgcaggccgaatctcggaaggagaacgaggagtggatttgtgcaatcaacaacatatcgcggcagatttacctgacagacaatccagaggctgtggcaataaagttgaaccagaccgcactccaagccgtgacacccattactagtttcggtaagaagcaagaatcctcatgtcccagccaaaacttaaaaaactcagaaatggagaatgagaatgacaagatcgtccctaaggctacagcctctttgcctgaggcagaagaactgatcgccccaggaactccaatccaattcgatattgtactgcctgctacagagtttctggaccagaataggggctcgagaaggactaatcctttcggtgaaactgaagacgagagtttcccagaggccgaagacagtttgttacagcaaatgttcattgtgcgcttcctggggtctatggccgttaaaacagacagcaccacagaggtgatatacgaggctatgaggcaggtgctggccgccagggcgattcacaacatcttccggatgactgagtcccacctgatggtcacctctcagtcattgcggttgatcgaccctcagacacaagtcagcagagccaactttgagctgacgtctgtgacacagttcgccgcacaccaggaaaacaaaaggcttgtcggttttgttatccgcgtgccggagagcacaggcgaagagagcctgtccacctatatctttgagtccaactctgagggagaaaagatctgttatgctatcaacctgggtaaagagattatcgaggtgcagaaagatccagaagcgcttgctcaattaatgctatccatccctctaacgaatgatgggaaatacgtgctcctcaacgatcaaccggatgatgacgacggaaatcctaacgagcacagaggcgcggagtccgaggcttag

SEQ ID NO: 178086 - DNA, 2760 bp, synthetic construct
  misc_feature 1..2760: note = Description of Artificial Sequence: Synthetic coding sequence
  source 1..2760: mol_type = other DNA
atgaccgacagcaagtacttcaccaccaccaagaagggcgagatctttgagcttaaagctgagttgaattcagacaagaaggagaaaaaaaaggaagccgtcaagaaagtgatcgcaagtatgaccgtgggcaaggatgtgtcagccttgttccccgacgtcgtgaactgtatgcagacagacaatttggaactgaaaaaattggtgtacctgtacctcatgaactacgccaaaagtcagcctgacatggctatcatggccgtgaatactttcgtgaaagactgcgaagatcccaaccctctgatccgggctctggccgttcgcactatgggctgcattcgagtggacaaaatcacagaatatctgtgtgagcctctccggaagtgcttaaaggacgaggacccctatgtgcggaaaaccgcggcagtttgtgttgccaaactgcacgacatcaatgctcagctggttgaggaccaggggttcctggacacgttgaaggacctcatcagtgactccaaccccatggtcgtggcgaacgcagtggccgctctgtctgaaattgctgaatcccacccatctagcaatctactggatctgaatccccaatcaattaataaactgttaacagccctgaatgaatgcaccgagtggggtcagatatttatcctcgactgcctggctaactacatgccaaaggacgacagagaggctcagagcatttgcgaaagggtgacccctaggttatctcacgctaactcggccgtcgttctcagtgccgtaaaggtgcttatgaaattcatggagatgttgtcaaaagatctagattactatggtacgctgcttaaaaaactggccccacctttagtgactctgctaagtgctgagccagagctacagtacgtcgcccttaggaatattaacctcatcgttcagaaacgcccggaaatcttgaaacatgagatgaaagtgttcttcgtcaagtacaatgatccaatttacgttaagctggagaaactggacatcatgattcgcctagcttcccaagccaatatcgcccaagtcctggcagagctgaaagagtacgcaacagaggttgatgtggactttgtgagaaaagccgtcagagctattgggagatgcgccatcaaagtcgagcaatccgcggagcggtgtgtgtcaacacttttagacctgatccaaacaaaggtgaactatgtcgtccaagaggccatcgtcgttattaaggatatattccggaaatacccaaacaagtacgaatctgttatagcaactctgtgtgagaacctggattccctggatgagccagaggcccgggccgcaatgatatggattgttggtgagtatgctgaacggatcgataatgcggatgaactactcgaaagctttcttgagggctttcacgatgagagtacccaggtgcagctccagctgttgaccgccatcgtgaaattattcctcaagaaacctacagaaacacaggaactggtgcagcaggtccttagcctcgcaactcaggatagcgacaatcccgacctcagagacagggggtatatctactggcgattgttgtcaacagatcccgtcgcagccaaggaagtagtgctggccgaaaaacctttaatctcagaagagactgatctgatcgagcctaccctgctggatgaactcatatgttacattggaacgctggcatcagtgtaccataagcctccgagcgctttcgtcgaaggtggtcgcggagtggtccataaaagcctgccacctcgcacggcgagctctgagtccgcggagtctcccgaaaccgctcctaccggtgctcctccaggggagcagcccgatgtgattccggctcagggtgacctcctaggggatctgctcaatctggacctggggccccccgtgagtggtcctcccctggcgacctcttcagtgcagatgggtgccgtggatctcctgggtggcgggctagattctctgatcggcgggactaactttgttgcaccaccaaccgctgcagttccggccaaccttggggcccctatcggatccggattatccgacctgtttgatctcacatcaggggtcggaaccctgagcggctcctatgtggctcctaaggcagtggggagcattagcatggacctgcaacttaccaacaaggcgttgcaagtgatgacagatttcgcaattcagtttaaccgcaatagcttcggccttgctcctgccaccccgctgcaggttcatgcccccctgtctcctaatcagacggtcgaaattagcctgccgctcagcacggttgggtccgtgatgaagatggaacctctgaacaacctgcaggtagcagtgaaaaataatatcgacgtcttctacttcagcactctctacccactgcacatcctgttcgttgaggacggtaagatggatcggcaaatgttcctagctacgtggaaagatattcccaatgagaacgaagcacagttccagattcgcgactgcccattgaacgcagaggccgccagctccaagttgcagagcagcaatatcttcacggtggctaaacggaacgtcgagggccaagatatgttgtatcaatctctgaagctgaccaatggcatctgggttctggccgagctacgcattcagccgggaaatcccagctgtaccttgagcctgaagtgcagagctccagaagtgtcacagcacgtatatcaagcctatgaaactattctcaagaattag

SEQ ID NO: 178087 - DNA, 2829 bp, synthetic construct
  misc_feature 1..2829: note = Description of Artificial Sequence: Synthetic coding sequence
  source 1..2829: mol_type = other DNA
atgaccgacagcaagtacttcaccaccaccaagaagggcgagatctttgagctgaaagcggaattgaattccgacaaaaaagaaaagaagaaagaggcagttaaaaaagtaatagcctccatgacggtgggaaaggacgtgagtgctctgtttccggacgttgtgaattgtatgcagacagataatctcgaacttaaaaaacttgtctacttatatctgatgaattatgccaagtctcagccagacatggccattatggctgtgaataccttcgtgaaggattgcgaagacccgaacccccttatccgcgccctggctgtaagaactatgggctgcatccgcgtcgataaaattacggagtatttgtgtgagcccctgagaaagtgcctgaaggatgaggacccttacgttcgtaagaccgctgctgtgtgcgtcgctaagctgcacgacataaatgcccagctggttgaggaccagggttttctcgacaccctgaaagaccttattagtgatagtaatcccatggtcgttgctaacgctgtagcagccctgagcgaaatcgctgaaagccaccccagtagcaatctgctggacctgaatccccagtcaataaacaaattgctgacagctcttaatgagtgtaccgagtggggacagatcttcattctggactgcctggctaattatatgcccaaagatgatcgagaggcccagtccatctgtgaacgggtcacacctcgcctgtcccacgccaatagcgctgtggtcctttctgccgtcaaggttcttatgaaatttatggagatgctgtcaaaggacttggattactatggcacgttattaaagaaattggccccccctctcgtcaccctcctgagtgccgagccggaactgcaatatgtcgcactgcggaacatcaatttaatcgtacagaagcgcccagagatccttaagcatgagatgaaagttttttttgtaaagtataacgaccctatctacgttaaactggaaaagctcgacatcatgatcaggctcgcatcccaggcaaacatcgcacaggtgctggccgaactgaaggaatatgcaaccgaagtcgatgtggattttgtgagaaaagccgtccgcgccatcgggcgatgcgccattaaggtggagcaaagtgctgagcggtgtgtgtcgactttgctggacctgatccagactaaggtcaactatgtcgtccaggaagcgatcgtggtaataaaggacatttttcgcaagtacccaaacaaatacgagagcgtgatcgctacactatgcgaaaacttggactcactggacgagccagaagccagggcggcgatgatttggatcgtgggcgagtatgcagagcgcattgataacgcagacgagctgttagagagctttctcgagggattccacgatgagagtacacaggtacagctccagctgcttacagccattgtgaaactctttctgaagaagccgactgagactcaggaattggtgcaacaggtgctgagcctggctactcaggactcagacaaccccgacttgcgtgaccggggttacatatactggaggctcttaagcaccgaccccgttgccgccaaagaagtcgtgttggctgagaagcctctgatttccgaggaaacggacctaattgaacctacactgctggatgaactaatctgttatattggcactttagcttccgtctatcacaagcctccatccgccttcgtggagggtggtaggggggtggttcataagtctctccccccaaggacggcctcaagcgaatctgccgagtctcctgaaactgcacctacaggcgcacctcctggagagcagccagacgtgattcccgcgcagggagatctgttgggtgacttgctgaatttggatttgggtccaccggtttctggccccccccttgctacctcctcggtacaaatgggggccgttgatttactgggcggcgggctggatagcttgattggtgggaccaattttgtggccccacctacagccgctgttcctgccaatttaggcgcccctattgggtctggtctgagcgacctgttcgatctcacctccggtgtggggactctgtccggtagctatgtggcacctaaggccgtttggctccctgccatgaaagcaaagggattggagatcagtggcacatttacgagacaagtagggtctatttctatggacctgcagctaacaaacaaggctcttcaggtgatgaccgactttgctatccagttcaacaggaactcattcggtctggcgcctgcaacgcccctgcaggtccacgccccgcttagtccgaaccagacagtggaaatcagccttcccctatctaccgtcggctccgtcatgaaaatggagcccctcaacaatctgcaggtggcagttaagaacaatatcgatgtgttctacttttcaacactgtaccccctccacattctgttcgtggaggacgggaagatggaccgacagatgttcctagccacatggaaagatatccctaacgagaacgaagcccagttccaaatccgtgattgcccacttaacgcagaggcagcctcctccaaactgcagagttcaaatatcttcaccgtcgcaaaacgtaacgtggagggacaggatatgctataccagtccctcaaactaaccaacggtatttgggtgctcgctgagctgcggatccagcctggcaatccgtcttgtacagatctcgaattatcactgaagtgtagggctccggaagtctcacagcacgtgtaccaggcctacgagacgattttgaaaaactag

SEQ ID NO: 178088 - DNA, 2850 bp, synthetic construct
  misc_feature 1..2850: note = Description of Artificial Sequence: Synthetic coding sequence
  source 1..2850: mol_type = other DNA
atgaccgacagcaagtacttcaccaccaccaagaagggcgagatctttgaactcaaagccgaactgaacagcgacaaaaaagaaaagaagaaagaagctgtgaaaaaagtcatcgcctcaatgactgtgggtaaggatgtgtcagcgctgtttccagacgttgttaattgcatgcaaactgataacctcgagctcaaaaaactagtgtatctgtacctgatgaactacgctaaaagccaacctgatatggctattatggctgttaacacctttgttaaggattgcgaagacccaaaccctctgattcgagccctggccgtgaggaccatgggctgcatccgggttgacaagattaccgagtacctgtgcgagccactgcgcaaatgtttgaaggatgaggatccctacgttcgcaagaccgcagccgtatgcgtggctaagttgcacgatataaacgcgcagcttgtcgaagaccagggatttctggatacactgaaagacctaatctccgattccaatccaatggtggtggcaaatgcagtcgccgctctgtctgagatcgccgaaagccatcctagcagcaatcttttggaccttaacccccagagcattaataaactgctaaccgccttaaatgaatgcaccgaatggggtcaaatattcatcctggactgtctagcaaactatatgccaaaggacgatcgcgaggcgcaatccatttgtgagagagtgacccccaggttgtcccacgctaatagtgcagtcgtgttatcagcagtgaaggttctgatgaagttcatggaaatgctgtctaaagacttggattactacggaacccttttgaaaaaactcgcaccaccattggtgactctcttgtccgctgagcccgagctccagtacgtggccctgcggaatatcaacctgatcgtccagaagagaccagagattctcaagcatgagatgaaggtgttcttcgtaaagtacaacgatcctatctacgttaaactggaaaaactcgacataatgattcggcttgcctctcaggcaaacatcgcacaggttctggctgaactgaaggaatacgctaccgaggtcgacgtggatttcgtgagaaaagccgtgagggccatcggccgctgcgcaattaaagttgaacagtctgcagaacggtgcgtcagcaccctgctggatctaattcagacaaaagtcaactatgtcgtccaggaggcaatcgtggtcataaaagatatctttagaaaatatccaaataagtatgagtctgtgatcgccactttgtgtgagaaccttgattctcttgacgagcctgaagcccgcgctgctatgatatggatagtgggcgaatacgccgagcggattgacaatgcggatgaactgttggagtccttcctagagggctttcacgacgaaagcacccaggtccagctccagctgctcactgccatagtcaagcttttcctgaagaagccaactgaaactcaggagcttgtgcagcaggttttatctctcgccactcaggactcagacaaccccgacctgcgggaccgcggttacatttattggagactcctgagtacagatccggtggccgctaaggaggttgttcttgctgagaagcccctgatttccgaggaaaccgacctcatagaaccgactctgttagatgagctgatctgctatatcggtacactagccagcgtgtaccacaagccaccctctgcatttgtggaagggggccgcggggtcgtccacaaaagtctgcctcctagaactgcctcatctgaatccgcagagagccccgagacggcccccaccggtgcccctcctggggagcagcccgacgtgattcctgcccagggtgatttgttgggcgatctgctgaacctagacctggggcctccagtgagcgggcccccacttgcgactagcagcgtgcaaatgggagccgttgatctgctgggaggcggcctggactctctgatgggggatgagcccgaagggattggcggcacgaatttcgtggcccctccaaccgcagcagtgccggctaaccttggcgccccaatcggaagtggcctgtctgatctcttcgacttgacatctggagtggggacccttagcggatcgtacgttgcccccaaggctgtttggctgccagcaatgaaagctaaagggctggagatttcaggaacttttaccagacaagtcggctcaatcagcatggacctacagctgaccaacaaagcactccaagtcatgactgactttgccatccagttcaatcggaattctttcggactcgcccctgcgactcctcttcaagtgcatgcaccattatcccccaatcagaccgtcgagatctcactgcctttgagtacagtaggaagcgtgatgaagatggagcccctgaacaatctgcaggttgcagtcaagaacaacattgatgtattttattttagcaccctgtaccccctgcacatcctctttgttgaggatgggaagatggacaggcagatgttcctggccacctggaaggacatccctaacgagaacgaggctcagttccagattcgagactgtccgttgaatgctgaagccgctagtagtaagttgcagagttccaacattttcacggtcgctaaaagaaatgtggaaggtcaggacatgttgtatcagagcctcaaacttaccaatggaatctgggttctggccgagcttaggattcaacctggaaacccctcctgcactgaccttgagttgtctctgaagtgccgcgctcccgaggttagccagcacgtgtatcaagcctatgagactattcttaagaattag

SEQ ID NO: 178089 - DNA, 2820 bp, synthetic construct
  misc_feature 1..2820: note = Description of Artificial Sequence: Synthetic coding sequence
  source 1..2820: mol_type = other DNA
atgaccgacagcaagtacttcaccaccaccaagaagggcgagatctttgagttgaaggccgagctgaactccgacaagaaggagaagaagaaagaggccgtgaaaaaggtgatcgcctctatgactgttggcaaggacgttagtgctttatttccagatgtggtgaattgcatgcaaaccgacaacttagagctgaagaagttggtttacttatacctgatgaactacgcaaagagtcagccagatatggctatcatggctgtcaacacctttgttaaggactgtgaggacccaaacccgttgattcgggctctggcggtccgcacaatgggatgtatccgcgtggacaaaattaccgaatatttatgtgaaccgctccgtaagtgcctcaaggacgaggatccttatgtcagaaaaacagcggcagtttgcgtggcaaaactgcacgatattaatgcccagctcgttgaagaccaggggtttctggataccctgaaagatctgattagtgacagcaacccaatggtggtggctaacgccgtcgcggccctctcggaaatagctgagtcccacccaagttcaaatctgctcgacctcaatccccaaagcattaacaaactgttgaccgcactgaatgagtgtacagagtgggggcagatcttcattctggactgtctcgccaattatatgccaaaggatgaccgggaggctcaaagtatttgcgagcgggttactcctagactgagccatgcaaattcagcagtcgtgctgagcgccgtgaaggtcctgatgaagttcatggagatgctttccaaagatttagactactacggcactttgctgaagaaactcgcccccccgcttgtgactctactgtcagcagagcccgagctgcagtacgtggctctgcgtaacatcaaccttatcgtgcagaaacgccccgagatactcaaacacgaaatgaaagtgttcttcgtgaaatataacgaccccatatacgttaagctggaaaagctcgatataatgataaggctggcatcccaggcaaatatagcacaagtgcttgccgagttaaaagaatacgcaacagaggtcgatgtggactttgtcagaaaggccgtgagggctatcgggcgatgcgccatcaaagtggaacagtcagccgagaggtgcgtatccacactgctcgacctgatccaaaccaaggtcaactatgtggtccaggaggctatcgtggtcatcaaggatatctttcgaaagtatcctaacaagtatgaatctgtcatcgctacactgtgcgagaatctcgactctttggacgagccagaggcacgtgctgcaatgatttggatcgtaggggaatacgccgagaggatcgataatgccgacgaacttctggagtccttcctcgaagggttccacgacgaatctacgcaagtccaattgcaactcctgacagctatagtcaaactatttcttaagaagccaacagagactcaggagctggtgcaacaggtgctatcacttgcaacccaagatagtgataatccagatctgcgagaccgagggtacatttattggcgtctgctaagcacggaccccgttgcggctaaagaggttgtcctggcagaaaaacctctcattagcgaagagacagacctgattgaacctacactgctcgacgaactgatctgctatatcgggaccttggccagcgtgtaccataagcccccatctgctttcgtggagggaggtcggggcgtggtacataaatctctgcctccacggacggcttcttctgaatccgccgagtcaccagaaactgcacccaccggcgccccccctggggagcagccggacgtcatccctgcccaaggcgacctgcttggggacctgctgaacctcgatctcggacctcccgttagtggaccaccactggctacctccagtgtccaaatgggagcagtggacctgctcgggggcggcctcgactctcttatcggtggaaccaatttcgtcgccccgcccaccgccgccgtccctgccaatcttggcgcccctatcggatccggactatcagatctcttcgacctcacctctggcgtgggtacgctttctggaagctatgttgccccaaaagcggtgtggcttccagcgatgaaggccaaaggtctggagatttctggcacattcacacggcaggtcggatccatctcaatggatttgcaactgaccaataaagccctccaggttatgactgatttcgcgattcagttcaacagaaacagctttggcttggccccagctaccccactgcaagtgcatgctccattaagccccaaccaaacagtggagattagccttcctctctctacagtgggcagcgttatgaagatggaacctctgaacaatcttcaagttgccgtgaaaaataatatcgacgtgttctacttttctacactctatcccttacatatcctcttcgtggaagacggaaagatggacaggcagatgttcctggccacatggaaggatattccaaatgagaacgaagctcagtttcagataagggactgtccactcaacgccgaggcagcgtctagtaagttgcagagctccaatatcttcacggtcgctaaacggaatgtagaaggccaggacatgctttaccagagtttaaagttgactaatggtatatgggtactggctgaattacgtatccagccaggcaatccttcttgcaccctttctctgaagtgcagggcaccagaggtaagccagcatgtttatcaggcctatgagaccatactgaaaaactag

SEQ ID NO: 178090 - DNA, 2850 bp, synthetic construct
  misc_feature 1..2850: note = Description of Artificial Sequence: Synthetic coding sequence
  source 1..2850: mol_type = other DNA
atgaccgacagcaagtacttcaccaccaccaagaagggcgagatcttcgagctcaaagccgaactcaacagcgataaaaaggagaaaaaaaaagaggctgtaaaaaaggtgatagcaagcatgacagttggcaaggacgtgagcgcacttttcccggacgtcgtgaattgtatgcagaccgacaacttagagctgaagaaactggtatatctctacctgatgaattatgctaagtcgcaaccggacatggccattatggccgtcaatacattcgtcaaggattgcgaggatccaaatcctctcatcagggcgctcgctgtccggacaatgggctgtatccgtgtggacaagataaccgaatacttgtgcgaaccattgaggaaatgtctgaaggatgaggacccatatgtgcggaagactgccgcagtgtgcgtggcgaagcttcatgacattaatgcacaactggtcgaggatcaggggttcctggacacgcttaaagacctgatctcggattcaaatcctatggtcgtcgccaacgccgtggcggctctcagtgaaatagccgaatcccacccaagttctaatcttctggatttgaatccccagtctattaataagttgctgactgccctgaatgagtgtaccgaatgggggcagatattcatcctagactgtctggctaattatatgcctaaagacgaccgcgaagcccagtcgatttgcgaacgggttaccccacgattgagtcacgccaactccgctgttgtccttagtgccgtgaaggttttaatgaaatttatggagatgctttcaaaggatctcgactactacggcaccctcctcaagaaactggctccacccctggttacgctactgagcgcagaaccagagctgcagtacgtcgcgctgcgcaacataaacttaattgttcagaaacggccggagatcttgaaacacgagatgaaggtcttcttcgtcaagtataacgatccgatttacgtgaagctggagaagctagacatcatgatcagactcgcctcacaggccaacatcgcccaggtgcttgccgagctcaaagaatacgccacagaggtcgacgtcgatttcgtgaggaaggcagtgcgagccattggtcggtgtgccatcaaagttgaacagtcggcagaacgctgcgtgtcgacccttttagatctgattcaaaccaaggtgaactacgtggtgcaggaagcaattgtggtgataaaggacatcttccggaaatatccaaataagtatgaaagcgttatagcaaccctttgcgagaacctggattccttagacgagccggaggcaagggccgccatgatttggatcgtaggcgaatacgctgaaagaattgataatgctgacgagctgttggagtcatttctggaggggtttcacgatgagagtacacaggtgcagctccagctgcttacagccattgttaaactatttctgaagaagcccacggagacccaggagctggttcagcaggtgctatcgctggccacccaggactcagataaccccgacttgagggatcgggggtacatctactggcggctcttaagtactgacccagtcgcggccaaagaggtggtcctggcagagaagcctctgatttctgaagagacagatcttatagaaccgacactgctcgatgaactcatctgctatattggcaccctggcgtctgtgtaccacaagccccctagtgccttcgtagaagggggaagaggcgtcgttcacaagtccctcccgccccgcaccgctagcagtgagtctgccgagagtcctgaaacagcccctacaggggcccccccaggcgagcagcctgatgtcatacccgcccagggagatctgctgggggacctgctgaacctggacctggggccccctgtgtccggtccccccctcgccacatcatcggtccagatgggtgccgtggatctcctcggaggggggctcgactcactgatgggcgacgagccagagggcatcggtggcaccaactttgtggccccccctaccgcagccgtccccgccaatctcggagcccccataggtagcggccttagcgacctgtttgatctcacctcgggggtagggactctctccggctcttatgtagcgccgaaagccgtttggctccctgccatgaaggccaaagggctggaaatatcgggaacattcacacggcaggtgggatccattagcatggatcttcagctaactaataaggctcttcaggtaatgaccgattttgccatccaatttaatcggaacagctttggtctggcccccgcgacaccactgcaggtccacgctccattaagtcctaatcagaccgtggaaatatctctaccactaagcacagtgggttccgtgatgaagatggagccccttaacaacttacaggtggccgtaaaaaacaatatagacgtgttctatttcagtactctctatcctctgcacattctgttcgtggaggatgggaagatggatcgccagatgttcctggctacatggaaagacattccaaatgagaatgaggcacaattccagatacgcgactgcccactgaacgccgaagcagcatcatcaaagctacagagctcgaacatattcaccgtggcgaaacgcaacgttgaaggacaggacatgctctatcagagcttgaaactgaccaatggtatctgggtgctggcagagcttagaattcaaccaggcaacccttcatgcaccgacctggagttgtcactgaagtgtagagcgccagaggtttctcagcatgtgtatcaggcttacgagactattctcaaaaactag

SEQ ID NO: 178091 - DNA, 2820 bp, synthetic construct
  misc_feature 1..2820: note = Description of Artificial Sequence: Synthetic coding sequence
  source 1..2820: mol_type = other DNA
atgaccgacagcaagtacttcaccaccaccaagaagggcgagatcttcgaactaaaggccgagttgaattctgataaaaaagaaaagaagaaggaagccgtgaagaaggtcatcgcaagtatgacagtgggaaaagacgtcagtgccctgttcccagatgtggtgaactgcatgcagacagacaatctggagctgaagaaactggtgtatctgtatctgatgaactacgctaaaagtcagcccgatatggctatcatggctgttaatacgttcgtcaaggattgtgaggatccgaacccactgatcagggcccttgccgtgcgcaccatgggctgtatacgcgtcgacaagattacagagtatctatgtgaacccctcaggaagtgcttgaaagacgaggatccgtatgtgagaaagaccgctgcagtctgtgtggcaaaactccacgacatcaacgcccaactcgtcgaagatcagggtttcctggacactctcaaggaccttatctctgattccaatcctatggtggtcgcaaatgcagttgccgccctgtctgaaatcgccgaatcacatccctcgagcaaccttctagatctcaacccacagtcaatcaataagttgctaactgccctgaatgaatgcaccgaatggggtcaaatctttattcttgattgtctggcaaattacatgccaaaagacgaccgagaagcacaatccatttgcgagcgcgtaactccaagactgtcacacgccaactcagcggtggtcctgtcggcagtgaaagtcttgatgaaattcatggaaatgctctctaaggaccttgactactatggtacactgcttaagaaactggcacctcccctggtcaccttgttgagcgcggaacccgagctacagtacgtagcactgcgaaatatcaatctgattgtgcagaaaaggccagagattcttaagcatgagatgaaggtgttttttgtgaaatataacgaccccatttacgtcaaactagagaagctcgacattatgatccgcctcgcctcacaggcaaatattgcccaggttctggcagagctcaaagaatatgccacggaggttgatgtggatttcgttagaaaggctgtacgcgctatcgggcggtgcgccatcaaggtcgagcaaagcgcagagagatgcgtatcaacactgctggacctaatccagaccaaggtgaactacgttgttcaggaagctattgtcgtaattaaagatatattcagaaagtatcccaacaagtacgaatccgtcattgccaccctatgcgaaaacttagactcactcgacgaacccgaggctagagccgccatgatctggattgtaggcgaatatgctgaaagaatagacaacgctgatgagcttctagaaagtttcctggagggctttcatgatgaatctacccaggtccagcttcagttgctgacagcaattgtgaagctgtttctgaaaaaacccactgagacacaggagctggtgcagcaagtactgtcattagcaacccaggattcagataatcccgatcttcgggaccgtggttatatctactggcgccttttgagcactgaccctgtggccgctaaagaagttgttctggcagagaagccactgatctctgaggagactgatctgattgaaccaaccctgctggatgagctcatttgctacatcggaacccttgcctctgtgtatcataaaccaccctcagctttcgtagaaggtggacgcggtgtggtgcacaaatcgctcccacctaggaccgcgagctctgaaagtgcggagagccccgagaccgctcccaccggggcaccacctggtgagcagccggatgtgattcctgcccaaggtgatctgcttggagacttgctaaatctggatctgggcccccccgtcagcggtccccctctggccaccagcagcgtgcagatgggagcagtggatctcctgggaggcggtctcgactcacttatcggcgggaccaacttcgtcgcccctcccactgccgctgtccccgccaatctcggagcacctatcggtagcggcttaagcgatctgttcgacctgacatctggcgttggtaccctgtccgggtcctacgtggcgcccaaagcggtgtggctgccagcaatgaaggccaagggtcttgagatttccggaacattcactaggcaggtgggaagcatctctatggacctgcagttgacaaataaggccttgcaggttatgacagactttgcaatacaattcaatagaaacagctttgggttagcccctgcaacaccgctccaggtgcatgcgcctctgtcccccaaccagacggtagaaataagcctcccactttcgacagtgggtagcgtcatgaaaatggagcctctgaataatctccaggtcgcagtcaagaataatatcgacgttttttattttagtacgctgtatccacttcacatcctgtttgtggaagacggcaaaatggatcgacagatgtttctagctacatggaaggacattcctaatgaaaatgaagcccagttccagattagggattgccctctgaacgcagaagccgctagctccaaactccaaagttctaacatctttactgtcgcaaaacggaatgtggagggacaggacatgttatatcagtctctgaaactgactaacggtatctgggttctggctgaactcaggatacagcccggaaatccctcatgtaccctgtcacttaagtgtagggcccctgaggtgtcacagcacgtataccaggcctacgaaacaattttgaagaattag

SEQ ID NO: 178092 - DNA, 1737 bp, synthetic construct
  misc_feature 1..1737: note = Description of Artificial Sequence: Synthetic coding sequence
  source 1..1737: mol_type = other DNA
atgaccgacagcaagtacttcaccaccaccaagaagggcgagatcttcgagcttaaggcggaattgaatagtgacaagaaggaaaaaaaaaaagaagcagttaagaaggtgattgctagcatgacggtgggtaaagacgtcagcgccctgttccctgacgtggtgaattgtatgcagaccgataacctggagctgaaaaaacttgtgtacctgtatcttatgaactatgctaagagtcagccggacatggctatcatggcagttaataccttcgtcaaggattgtgaggatcctaatccactgattcgggctctggccgtccgcacaatgggctgtatccgtgttgacaaaataaccgagtacttgtgtgaaccacttcggaaatgcttgaaagatgaagatccttacgtaaggaagacagcagccgtgtgtgttgcaaaactgcacgatattaatgcccaactagtcgaagaccaggggtttcttgacaccctcaaagaccttatcagtgatagcaatccaatggtagtggctaacgccgttgccgcgctttccgaaatcgccgagtctcatccatcatcaaatttattagatctcaatcctcaaagtattaataagctgctcacggcattgaatgagtgcactgaatggggccaaatctttatcctggattgccttgctaactacatgccaaaggacgatagggaggcacagtccatttgcgagcgtgtgaccccaaggctttctcacgccaactcagccgttgttctctcagccgtgaaggtgctcatgaaattcatggaaatgctctcaaaagatctggattactatgggacgctgctgaagaagctggctcccccgctggtcacactgctctccgccgaaccggaacttcaatacgttgcccttcggaatataaatctgatcgtgcagaagcgacccgaaatccttaaacatgaaatgaaggtgtttttcgttaaatacaacgatcctatttacgtgaagctggaaaaactggacatcatgatcagactcgccagccaggctaatatcgcgcaagttctcgcggagctgaaagagtacgccaccgaagtagacgtggactttgtgcgcaaggcagtgagggccatcggaaggtgcgccataaaggtagaacagagcgctgaacggtgtgtgagcaccctgctcgacttaattcaaacaaaggtgaactatgtggttcaggaagctatcgtggtgatcaaggatatttttcgcaagtatcctaacaaatacgagagtgtcatcgccacgttgtgcgaaaatctggacagcctggacgaaccagaggcgcgcgccgcaatgatctggattgtgggcgagtacgccgagcgcatcgacaatgccgacgagctgctcgagtctttcttggaaggattccatgatgaaagcacccaggtacaactgcaactgctgaccgctatcgtgaagctgttcttgaaaaagcccacagaaacgcaagagctagtacaacaggtcctgtctctggccacgcaggattctgacaaccccgacttgcgcgacagagggtacatttactggcgcctgctgtcaaccgatcccgtggctgcaaaggaagttgtattggccgagaaacccctcatcagtgaggaaactgacctaatagaacctacacttttggacgaattaatttgttatataggtacactggcatcagtctaccataagcctccttag

SEQ ID NO: 178093 - DNA, 2820 bp, synthetic construct
  misc_feature 1..2820: note = Description of Artificial Sequence: Synthetic coding sequence
  source 1..2820: mol_type = other DNA
atgaccgacagcaagtacttcaccaccaccaagaagggcgagatctttgagctgaaagctgagcttaattccgacaagaaggaaaagaagaaggaagcagtgaagaaggtgattgctagtatgacagtggggaaagacgtcagtgccctttttccagatgttgtaaactgcatgcagaccgacaacctcgagctgaagaaactggtttacctttaccttatgaactacgcgaaaagccagcctgatatggccatcatggctgttaatacctttgtcaaggattgcgaagaccccaatccacttattcgggcactcgcagtgcggaccatgggctgtattcgtgtagataagatcaccgaatacctctgcgagcccctgcggaagtgcttgaaggatgaagatccatacgtccgcaaaaccgcagccgtgtgtgtggccaaactgcacgacataaatgcccagctggtcgaggaccaaggatttctggacacgcttaaggacctgatttcagacagcaatcccatggtggttgccaacgccgtagctgctctaagcgaaattgccgagtcgcaccccagtagtaatctcctggatctcaacccacagtcgatcaacaagctcctgaccgctctcaacgagtgtaccgagtgggggcagatctttatccttgactgccttgcaaattacatgccaaaggacgacagagaagctcaatccatatgtgaaagagtcacaccccgtctaagccacgcgaacagcgccgtcgtcctgtccgcagtaaaggttctaatgaaattcatggaaatgctctcaaaagatttggattattacggcacccttctaaagaaacttgcacccccccttgttacgctgctcagcgcggagccagaactgcagtacgttgctttaagaaacataaacctgatcgttcagaagaggcccgaaatcctgaagcacgaaatgaaggtatttttcgtgaagtacaacgatccaatttatgtaaagttagagaaactggatattatgatcagactcgcgtctcaggccaatatcgcgcaagtgcttgctgagctaaaggaatatgccacggaggttgatgtggactttgtgcggaaggcagtgcgggcgattggtagatgtgctataaaggtggagcaatccgcagaacgatgtgtttctacactcttagacctcatccaaaccaaagttaattacgtggtccaggaagccatagttgtgatcaaggacattttcagaaaatatccgaacaaatacgagagcgtaatcgcgactttgtgtgagaacctcgactctctagatgagcctgaggcacgcgccgcaatgatctggatcgttggcgaatacgcggagagaattgacaacgctgatgagctgctggaaagctttctggagggcttccacgacgagagcacccaggttcagctgcagttattgaccgccatagtcaaactttttctaaaaaaacccacagaaactcaggaactggtgcaacaggtgcttagcctggcgacacaggattccgacaacccagacctgcgagaccgcggttacatatattggagacttttaagcacagatccggtggccgccaaagaggtggtcctcgctgagaaacctctgatctccgaggaaacggatcttattgagccgacactactcgacgagctcatctgttatattgggactctagcgagtgtctaccacaagccaccgagcgccttcgttgaaggagggaggggggtggttcacaagagtctgccaccaagaacggcatcctctgaaagcgcagagagccctgagacagctccgaccggcgcacccccgggggagcagcctgacgtgattccagcccagggggacttactgggggacctgctgaacctagacttgggtcccccagtgagcggcccacctttggcaacttccagtgttcagatgggtgccgtggatttgctgggagggggcctggacagtttaatcggggggacgaacttcgtcgccccgcctaccgcggctgtccctgctaatctgggggcaccaataggttcaggactgtccgatctgttcgacctcacctctggagtcggtaccctaagcggttcctatgttgcacccaaagccgtttggctacctgccatgaaggctaaggggctggagattagcggcacattcacacgccaggtcggcagcatctccatggacctgcagcttacaaataaggctctacaagtgatgaccgactttgctatacagtttaaccgaaattccttcgggctggcccctgccactcctctacaagttcatgccccgctgtcaccaaaccagacagttgagatctcactgccgctgagtacagtcggtagcgtcatgaagatggagcctctgaataatttgcaggtagcagtaaaaaataacattgacgtgttttactttagtactctttatcccctgcatattctgttcgtggaggatggcaaaatggaccgccaaatgttcctggctacgtggaaagatatacctaatgaaaatgaggcacagttccagatccgcgactgtcccctgaacgctgaggcagctagcagtaagctacagagctctaacatcttcacagttgccaagcggaatgtggaggggcaggacatgttgtaccagtctctgaagttgacaaatggcatctgggtattggccgagttgcgcatccaacctggcaacccttcttgtacactaagccttaagtgcagagccccagaggtgagccaacacgtgtaccaggcttacgaaactatactgaagaactag

SEQ ID NO: 178094 - DNA, 2469 bp, synthetic construct
  misc_feature 1..2469: note = Description of Artificial Sequence: Synthetic coding sequence
  source 1..2469: mol_type = other DNA
atgcccgcccccatccggctgcgggagctgatccggaccatccggacggctcggactcaagctgaagagcgagaaatgattcagaaagagtgtgctgcgataaggtcgagtttccgagaggaggataatacctataggtgtcgaaacgtggcgaaattactgtatatgcacatgctgggatatcccgcacactttggccagctggagtgcctgaaactgatcgcttcccagaaatttacagacaagagaatagggtatctcggcgctatgctgctgttagatgagcggcaggatgtgcacttgcttatgacgaactgtatcaagaatgacctgaaccattccacgcagttcgtgcagggcttggcactctgcacactgggttgtatggggtcttcagagatgtgtagggacttggctggcgaagttgaaaagcttcttaaaacctctaatagttacctaaggaagaaagccgcactgtgtgcggtgcacgtcattcgcaaagttcctgagcttatggaaatgttcctacccgccacgaaaaatttactcaacgagaagaaccacggtgtactacatacatccgtggtacttttaactgaaatgtgtgagcggagtcccgacatgttagcacactttcgcaaacttgtcccgcaactggttagaattctgaaaaatctgattatgtccggctactcgcctgagcacgatgtgtcaggcattagcgatcccttcctgcaggtccggatacttagactccttagaatactgggacgcaacgatgacgactcttcagaagccatgaatgatattctggcacaagtggctacaaacactgaaacatctaagaacgttggtaatgccatactatacgagactgttctgactattatggacataaaatcagaatctggcctgcgggtgttggctattaacatcttagggagattcctgctgaataacgacaagaacattagatatgtggcgcttacatctctgctgaagaccgtgcagaccgatcacaacgccgtgcagagacatcgatctaccattgtggactgtctcaaggacctggatgtcagtattaaacgcagagcgatggaactctcgtttgctctggtcaacggaaataacatcagggggatgatgaaagagcttctatactttttggacagttgcgagccagagtttaaagccgactgcgccagcggcatcttccttgcggccgaaaaatacgcccccagcaaaaggtggcatattgacaccattatgcgtgttctcacaacagccgggagctatgtgcgggatgatgcggttcccaaccttattcaactaatcacgaatagcgtagagatgcatgcatacactgtccaacgactgtataaagctatattgggggactattcccagcagcccttggtccaggtggcagcttggtgtatcggagagtacggcgacctgctggtttccggacagtgcgaggaagaagaaccaatccaggtgactgaggacgaggtgcttgatattttggaatccgtcctgatcagtaacatgtcaacctccgtgacccgtgggtacgccttgacggcgataatgaaattgagcaccagatttacatgcaccgtcaataggattaaaaaagtggtgtccatatatggcagttcgatagacgtggagcttcagcagcgggcggttgagtacaacgccctcttcaagaagtatgaccatatgcgcagtgcactcctggagcgaatgccagtcatggaaaaggtgaccaccaatgggcccacagaaattgtgcagaccaacggggagaccgagcctgcaccactggagacaaagcctccaccttcgggccctcagccaacgagccaggcaaatgatctccttgatttgttgggaggaaacgacattacaccagtcattcccacagcccctacgtccaagccatccagtgcaggcggagagctactggatctactaggtgatattaatctaactggagcaccggcggcagctcctgcgcccgcctctgtgccacagatttcacagcctccttttctgctcgatggcctgagcagccaacccctcttcaatgatatagccgccgggatcccatctataacggcctattccaagaatggactgaagattgagttcacattcgaaagatccaacactaatccgtcagtcacagttatcacaatccaggcctctaactctaccgagcttgatatgactgattttgtatttcaggcagccgtgccgaagactttccagttgcagctcctgtcaccgtcctcttccatagtgccagctttcaatacaggaaccataacccaagtgattaaggtattgaatcctcagaaacagcagcttaggatgcgcatcaaactcacctacaaccacaagggctccgccatgcaggatctggctgaggtgaataacttccccccgcagtcctggcagtag

SEQ ID NO: 178095 - DNA, 2478 bp, synthetic construct
  misc_feature 1..2478: note = Description of Artificial Sequence: Synthetic coding sequence
  source 1..2478: mol_type = other DNA
atgcccgcccccatccggctgcgggagctgatccggaccatccggaccgcacgcacacaggccgaagagcgtgagatgatccaaaaagagtgcgccgcaatccggtccagcttcagagaggaggacaatacatatcgttgtaggaatgtggccaagctcctctacatgcacatgctcggctaccctgcccatttcggacaactcgagtgcctgaaactaatcgcatcccagaagttcaccgacaagcgcatcggttacctgggcgccatgctgctccttgatgagcggcaagacgtgcacctacttatgactaattgcatcaaaaacgacctgaatcattcgacacaattcgtgcaaggcttggccttgtgtaccttgggctgcatgggtagtagcgagatgtgccgcgatcttgctggagaagtggaaaaactgctgaagacctctaactcctatctgcggaagaaagctgcactgtgcgcggtgcacgtgattaggaaggtgcctgagctgatggagatgtttctgcctgctactaagaatctgttgaacgagaagaatcacggagtcttgcacacaagcgttgtactgctgaccgaaatgtgcgaacggagccccgatatgctggcccattttaggaaaaatgaaaaattggtaccgcagctggtccggattcttaaaaatttaatcatgagcggatactcaccagaacacgatgtgtctggcatctctgacccctttctgcaggtaagaatactgcgcctgctgcgtatcctgggaagaaatgatgatgactcctcagaagccatgaatgacatcttggcgcaggtggcgaccaacacagaaaccagcaaaaacgtcggtaacgctattctgtatgaaaccgttctgaccatcatggacattaagagtgagtccggcctccgagtgctggccataaatattctgggccggttcctcttaaataatgacaaaaacatccgctacgttgctctgacttctctgctgaaaacagtccaaaccgatcataatgcagttcaacgacatagatccaccatcgttgactgcctgaaagacctggatgtgtctatcaagcggagagccatggaattgtcattcgccctcgtgaacgggaataacatacgaggcatgatgaaagagcttctttactttttagatagttgtgagcccgaatttaaagccgattgcgcctctgggattttcctggccgccgagaaatacgccccatcaaagcggtggcacatagacaccataatgagagtgctgaccactgccggtagctacgtgcgggatgatgcagttccaaacctgattcagctcatcactaactctgtggagatgcacgcttatacagtccaacgtctgtataaggccattttaggcgactactcccaacagccccttgtccaagtagccgcttggtgcatcggggaatacggcgatctgctggtgagcggacaatgcgaagaagaagagcctatacaggttacagaagatgaggtactggatattctcgaatcggtcctcattagtaatatgtcaacgtcagtgacccgggggtacgccttgaccgctattatgaaactctccaccaggttcacatgtaccgttaaccgaatcaagaaggtcgtgagtatttatggttccagcatcgacgtcgaacttcagcaacgggccgtggaatacaatgcgctgtttaagaagtatgatcacatgcgctcagcactattagaaagaatgcccgtgatggaaaaggtgaccaccaacggtcctactgaaattgttcaaaccaacggagagactgaaccagcccctctggagacaaaacccccaccttctggccctcagccgaccagccaggccaacgacctgctagatctgttgggcgggaatgacataaccccagtgattcccactgccccaacgagcaaaccgtcttctgccggtggcgaacttctagatctattaggggatattaacctaactggcgcccctgcagctgcccctgccccggccagtgtccctcagatcagtcagccaccgtttttactggatggattgagtagtcaacctcttttcaacgatatcgcagcgggcatcccatctattactgcttattcaaagaacggcctgaaaatcgagtttacctttgaaaggtctaacacaaacccatctgttacagtgataacgatccaagcatccaattcaacggagctggatatgactgactttgtgtttcaggcggcggtacctaaaacctttcagctgcaattgctgtctcccagttcttcaattgtgcctgcttttaatacaggaaccattacacaagtgatcaaagtacttaatccacagaagcaacaattgcgcatgcgtattaaattaacctacaaccataagggcagtgctatgcaggatttggctgaagtgaataacttcccccctcagagctggcagtag

SEQ ID NO: 178096 - DNA, 2478 bp, synthetic construct
  misc_feature 1..2478: note = Description of Artificial Sequence: Synthetic coding sequence
  source 1..2478: mol_type = other DNA
atgcccgcccccatccggctgcgggagctgatccggaccatccggaccgccaggacccaggctgaagagagggaaatgatccaaaaggaatgcgcagccatcagatcaagctttagggaggaggataacacttaccgatgtcgcaacgtcgctaagctcttgtacatgcacatgttgggctacccggcccacttcggccagctggagtgtctgaaactcatagcttcacagaagttcacagacaaacgcatcgggtatttaggggcaatgcttttgctggatgagcgccaagacgttcacctgttgatgactaactgcatcaaaaacgatctaaatcattcaacccagtttgtgcaaggactggctctgtgcacgctgggctgcatgggcagctctgagatgtgtagggatttggcaggcgaagtagaaaagttgcttaaaacaagcaattcatatctacggaagaaggcggccctttgcgccgttcatgtgatacgaaaagtcccagaactcatggaaatgttcttgccagcaacaaaaaatctcctgaatgagaagaatcatggggtgcttcacacgtccgtggtcctcctcaccgaaatgtgtgaacgaagccccgacatgctagcccattttaggaaagaatcgaaactcgtacctcagctggtgaggatcctcaaaaacctaattatgagcggctattccccagagcacgatgtatctgggatctcggacccattcttgcaagtgcgcattctaagactacttcgtatcctcggtcgaaacgacgatgattcatccgaagccatgaacgacattctagcccaggtcgccactaataccgagacgagtaagaatgtggggaatgcaatcctgtatgaaaccgttcttactattatggatattaaaagcgagtctggccttcgcgtgcttgcgatcaacattctgggtaggtttctgctgaacaacgacaagaacattcgttacgtggctctgacgtccctgcttaaaacggttcaaaccgatcataacgctgtgcaacgacatcggtccaccattgtagactgcctgaaggacctcgacgtgtctattaagcgccgggccatggaattgagctttgctctggtaaacggcaataatattcggggcatgatgaaagagctgttgtacttcctggatagttgtgaaccggagttcaaggctgattgcgcttcaggaattttcttggccgccgagaaatacgctccctcgaagcggtggcacattgataccatcatgcgcgtcttaacaactgctggttcttacgtgcgtgacgatgcagttcctaaccttattcagctgataacaaactcagttgagatgcacgcttacacggtgcaacgactttataaagccattctgggagattattcacaacagccactggtccaggtggcagcctggtgtattggagaatacggggaccttctggtgtcaggccagtgtgaagaagaagagccaattcaagtcaccgaagatgaggtacttgacatcctggaaagtgtgctcatctctaatatgtctacttctgtgacccgcggttacgccttgaccgctatcatgaagctgtccaccagattcacatgcacagtcaatcgcattaagaaggtggtgagcatttatggctcgtccatagatgtggaacttcagcaacgtgcagtggaatataatgccttgtttaaaaagtatgaccacatgcgcagtgctctcctggagcgcatgcctgtgatggaaaaagtgacaaccaatggaccgacagagattgttcagactaacggcgagactgagcctgcgccactggagaccaagccgccaccctccggaccccagccaacctctcaggctaatgacctgctggaccttttgggagggaacgatattacgcccgtcattcctacagcccccacctcaaaaccatccagcgcgggcggtgagctcctagacttgctgggggatataaacctgactggtgctccagccgctgcaccggcaccagctagtgtgccacagatctcccagcccccttttcttctggacggcctaagtagccaaccactttttaacgacattgcggccggcatcccgtcgataacagcctattccaagaacggcttgaaaatcgagttcaccttcgaaaggtcaaataccaacccaagtgtgaccgtcataaccattcaggccagcaatagtactgagctcgatatgacggattttgtgttccaggctgcagtgccaaaaacttttcaacttcagcttctgagtccttcttctagtatcgtaccggcctttaacactggaaccatcacgcaggtcattaaagtgctgaatcctcaaaaacagcagctaaggatgagaattaagttgacatataatcacaagggctcggccatgcaggatctggccgaggtgaacaattttcccccacagtcttggcaatag

SEQ ID NO: 178097 - DNA, 1698 bp, synthetic construct
  misc_feature 1..1698: note = Description of Artificial Sequence: Synthetic coding sequence
  source 1..1698: mol_type = other DNA
atgttcggcagctgctgccactgctgccggcggccccggagctgctggttccattctaggttcagagccgttagcggtgtacagtcacaggctgttggagtggagaagcggagacagcgctcctgggcccggaggggaagagaacctcaaggattattgagacttctggagggtcggcctcggggcctcggaccgggcggcagtgcacggcgaggggtgccttgctgcggggtggcaccacctcggatgcccgcacccattagattaagggagctcatccgaaccatcagaaccgcccgaacacaggcagaggagagggagatgattcagaaagaatgcgctgccataaggagctcctttcgggaggaagataatacttataggtgcagaaatgtggctaaactcctgtacatgcacatgctcggttaccccgcacattttggccagctggagtgcctgaagttgatagcttcacaaaagtttacagataaaagaattgggtacctgggggcaatgttgttactcgacgaacgacaggacgtgcaccttctgatgactaattgtatcaagaacgatctcaaccactctacccagtttgtgcagggactggccctctgtacactgggatgcatgggtagctctgaaatgtgtagggaccttgccggagaggtcgagaaattgctgaagactagcaactcatatctgaggaaaaaagccgctctttgtgccgtgcacgtaataagaaaggtgcccgagctgatggagatgttcctgcctgctaccaagaatctgctgaatgagaagaaccatggcgtcctgcatacctcagtagttttgcttactgagatgtgcgagagaagtcccgacatgctggctcatttccgcaaagaaagcaaactggttccccagctggttcgcatcctgaagaacctcatcatgagcggatatagcccagaacatgatgtctcaggtattagcgatcccttcttgcaggtgcgaatcctccgattactgcgtatcttaggacggaatgacgacgactcttcagaagccatgaatgatattttggcgcaggtagcaactaataccgaaacctccaaaaatgtgggcaatgcaattctgtacgaaaccgttttgaccataatggacatcaagagcgaaagtggactgcgggtgcttgccatcaacatcctgggacggtttttgctgaataatgacaagaacattcggtacgtcgcccttacgagcctgcttaagactgtccagacagatcataacgccgttcagcggcacaggagcacaattgtcgattgtctgaaggatctggacgttagtatcaaacggcgtgcgatggagttgtcattcgctttggtgaacgggaataacatacgcggcatgatgaaggagctgctttattttctagatagttgtgagcctgagttcaaagccgattgcgcctcaggcatatttttagccgcagagaagtatgcaccatccaagcgctggcatatcgatacaatcatgagggttctgacaactgccggcagctacgtgagagacgatgccgttcccaaccttattcaactgattactaacagcgttgaaatgcatgcttacacggtgcagaggctttataaggcgatcctgggtgattacagtcccacatttggcacttccggctgcatggtttatagatag

SEQ ID NO: 178098 - DNA, 2538 bp, synthetic construct
  misc_feature 1..2538: note = Description of Artificial Sequence: Synthetic coding sequence
  source 1..2538: mol_type = other DNA
atggagaagaacatcaacctgcggaactgccagaccctgaacacctatgttatgctgactcacctgaggatgccggctcctatcagactccgcgagctcattcgtaccattagaacagcaaggacccaggcagaagagcgcgagatgattcaaaaagaatgcgccgcaatcaggagttcattcagggaagaagataatacatacaggtgtagaaacgtcgctaaactcctgtacatgcatatgctgggatatcccgcacattttgggcagcttgagtgtctgaaactgatcgctagtcagaaatttacggacaagcgtattggctatctaggcgccatgcttttgttggacgagaggcaggacgtccacctattaatgaccaactgtatcaaaaacgatttgaaccactctacacagttcgtccagggactggccctgtgcaccctaggctgcatgggttcttctgaaatgtgccgtgatcttgccggggaagtggaaaaactcctgaaaacctccaacagctatctgagaaaaaaagctgccctgtgtgccgtacatgtgattcggaaagtgccagaactgatggaaatgttcctgcccgcgacaaagaatttgctgaatgagaaaaatcatggcgtgctgcacacctccgtggtactgctcacggaaatgtgcgaaaggagcccagatatgttagctcacttccgcaaactcgtgcctcagctagtgcgaattctgaagaatttaattatgtccgggtactccccagagcacgatgtaagcggcataagcgatcctttcctgcaagttcggatcctgcggctacttaggattctcggccgaaacgacgacgacagcagcgaggccatgaacgacattctcgcacaggtggcgaccaacaccgaaacaagtaagaatgtcggaaatgccatcctgtacgagacggttctgaccatcatggatatcaaatcagaaagtgggttgcgggtactggccattaacatcctgggccggtttttgttgaataatgacaaaaacatccgctacgtcgcactgacctcccttctcaagacagtgcagaccgatcacaacgcagtacagaggcaccgaagcacaatagtcgattgcctgaaagatttggatgtgagtatcaagcgcagggccatggagctgtcatttgcccttgtgaacgggaataacattcgcgggatgatgaaagagctgttgtatttcttagactcatgcgagcccgagttcaaagcggattgtgcctccggtatctttctagccgcagagaaatacgccccctcgaagcgatggcacatagataccataatgcgagtcctgacaacagcaggatcttacgtgagagatgatgccgtgcccaatctgatccagctgatcaccaactcagtggagatgcacgcgtataccgttcaaagactttacaaggccatcctgggtgattactctcaacagccgttggttcaggtggccgcctggtgcataggggaatacggagacctactcgtcagcggacaatgtgaagaggaggaaccaatccaagtgaccgaagacgaagttttggatattctcgagtccgtactgatctcgaacatgtctacctccgtgacacgaggatacgcactcacagccattatgaagcttagcacccgcttcacgtgtactgttaatcgaatcaagaaggtggtgtctatttatggatcttcaatcgatgtggaactccagcagcgagccgtggagtataacgcccttttcaagaagtacgaccacatgagaagcgccttactagagcgtatgcctgtcatggaaaaggtcacaacaaatggccccacagagattgtccagactaacggcgaaaccgaacccgccccactggaaactaagccccccccatccggtccccaacctacctcacaggccaatgatttgcttgaccttctggggggcaacgatataacacctgttattccaactgcccctacgagtaagccctcctctgctggcggcgaactgctagacctgctgggagatatcaatttgaccggcgcacccgcagccgcacctgccccagccagtgtgccgcagatttcgcagccaccatttctactcgacggcttaagcagccagcctcttttcaacgacatcgctgccggcattccttccatcaccgcgtatagcaaaaatgggctgaaaattgaattcaccttcgagcggagtaacacaaatccatccgtgacagtaatcacaatccaggcctccaattccactgagctcgacatgacagatttcgtatttcaagcagcagtgccgaaaactttccagctccaactactgtctcccagttcaagcattgtcccagccttcaacaccggtactataacgcaggtgatcaaggtgctgaacccacaaaagcaacagttgaggatgagaataaaattaacctataaccataaggggtccgcaatgcaagatttggctgaggttaacaactttcctccacaatcgtggcagtag

SEQ ID NO: 178099 - DNA, 531 bp, synthetic construct
  misc_feature 1..531: note = Description of Artificial Sequence: Synthetic coding sequence
  source 1..531: mol_type = other DNA
atgcccgcccccatccggctgcgggagctgatccggaccatccggacagcccgcacacaagctgaagaacgagaaatgattcagaaggaatgtgccgcgatcagatcctctttccgagaagaagacaatacataccgctgtcgtaatgtcgctaagcttctgtatatgcatatgctcggctaccccgcccattttggtcaattagagtgtcttaagttgatagccagccagaaatttactgacaagcgcataggttacttaggggcaatgcttctgcttgacgagaggcaggatgttcacctgcttatgactaattgtatcaaaaacgatcttaatcactctactcagttcgttcaggggctggctttgtgtaccctaggctgcatgggcagcagcgaaatgtgcagggacctggcaggagaagtggagaagcttctcaagacatccaactcctatctacggaaaaaggaaatgatttataagcagacaaatgtgaccggctatatccttggcggcattccaaattcatag

SEQ ID NO: 178100 - DNA, 1047 bp, synthetic construct
  misc_feature 1..1047: note = Description of Artificial Sequence: Synthetic coding sequence
  source 1..1047: mol_type = other DNA
atgaaggacaagatgtgccgggacctggccggcgaggtggagaagctgctaaagacatctaatagttatctccgaaagaaagctgcactgtgtgccgttcacgtgatccgaaaagtgccagaactcatggagatgttcctgcctgctacaaaaaatcttttgaacgaaaagaaccacggcgttctgcacacctcagtggtgctgctgaccgagatgtgtgaaaggagccccgatatgttggcccatttcaggaaactcgtgcctcagttggtgagaattttaaagaatctgatcatgagcgggtacagtcccgagcatgacgtgagcgggatttccgatccttttctgcaggtcaggatcctaaggctcctccgaatcctgggcaggaacgacgatgactcgagtgaggccatgaacgacatactggctcaggtcgccactaataccgaaacctctaagaacgtgggaaacgcaattctgtatgaaactgtcttaactattatggatattaaatcagagtctggcttgcgagtactggcaatcaatatcttaggaagatttcttctcaacaatgataagaatatccgttatgttgctctgacttccctgctcaaaacagtacagacagaccataatgccgtacagcgccatcgttccacaattgttgattgccttaaggatcttgacgtcagtattaaaaggcgcgcaatggagctatccttcgcgctggttaatggaaacaatattagggggatgatgaaagaactcctgtactttctagactcatgcgaacccgagttcaaggccgattgcgcgtccgggatcttccttgccgctgtccccaagacattccagctgcagttactctccccttctagctcgattgtgccggctttcaacaccgggactatcacacaggtgatcaaagtcctaaatccccagaagcaacagctgcgcatgagaatcaagcttacgtacaatcataagggttccgccatgcaggacctagccgaagtgaacaactttcctccgcagtcttggcaatag

SEQ ID NO: 178101 - DNA, 1272 bp, synthetic construct
  misc_feature 1..1272: note = Description of Artificial Sequence: Synthetic coding sequence
  source 1..1272: mol_type = other DNA
atgagcgccagcgccgtgtacgtgctggacctgaagggcaaggtgttgatctgtaggaattatcggggcgacgtcgatatgtctgaggtggagcattttatgcctatcctgatggaaaaggaagaggagggaatgcttagcccaatcctggcccacgggggtgtcaggtttatgtggatcaagcataataacttgtacctcgtggccacaagtaaaaaaaatgcttgcgtgagcctggtattcagtttcctgtacaaagtggtccaggtgttctctgagtacttcaaagagctggaggaggagtctatcagggataattttgtgattatttacgagctcctcgacgaactcatggacttcggatacccacagaccaccgacagcaagatattgcaggaatatataacacaggagggccataaactcgagacaggtgcccctaggccaccagccacagtgaccaatgcggtgagctggagatctgagggtatcaagtaccggaagaatgaagtgttcctggacgtgatcgagtctgtcaatctactggtgagcgctaatgggaatgtcctgcgatctgagattgtgggcagcatcaaaatgagggtgtttttatcaggcatgccggaattgaggttagggctcaacgataaagtgctcttcgataatactgggcgggggaaatctaagtctgtcgagcttgaggacgtgaagtttcaccagtgcgtccgcctgtcccggttcgaaaacgaccgcactattagcttcatccccccagatggagagtttgagcttatgtcctaccgtcttaatacacacgtcaagcccctcatctggattgagtcagttatcgaaaaacatagccattcccggattgagtacatgataaaagccaaatctcagtttaaacgccgcagcaccgcaaataacgttgaaattcacattccagtgcccaacgacgccgattctccaaaattcaagacgaccgtgggatcagtcaagtgggtgcccgagaacagtgaaatcgtctggagtataaagagctttcccgggggcaaggagtacctgatgcgggcccacttcggcttgcccagcgtggaggccgaggacaaagaaggcaaacctcccatctcagtcaaattcgagataccctacttcacaacatccggaatccaagtgcgataccttaagattattgagaagtccggctatcaggccctaccctgggtgcggtacatcacacagaacggagactaccagctgaggacgcagtag

SEQ ID NO: 178102 - DNA, 1113 bp, synthetic construct
  misc_feature 1..1113: note = Description of Artificial Sequence: Synthetic coding sequence
  source 1..1113: mol_type = other DNA
atgagcgccagcgccgtgtacgtgctggacctgaagggcaaggtgttaatttgtcgaaactaccgtggagacgttgacatgtccgaggtcgaacacttcatgcctatcttgatggaaaaggaagaggaaggtatgttgagccctatccttgcacatggcggcgtgcgttttatgtggattaaacataataatttgtatctggtggctacaagcaagaaaaacgcctgcgtatcactggttttctcatttttatacaaagtcgtccaggtgtttagtgaatatttcaaagagcttgaggaggagtctattcgcgacaatttcgtgattatttacgaattattggatgagctgatggatttcggctatccacaaaccactgacagtaaaatattacaagaatatattactcaggaaggccacaagctagagaccggcgctccacggccaccggccaccgtgactaatgcagttagttggcgcagtgaggggattaaataccggaagaacgaagtgttcctcgacgtgatcgagagcgtgaatctgctcgtgtcagccaatggaaacgtgctaaggtctgagatcgttgggtcaattaaaatgcgagtctttcttagtggcatgcccgaactccgtctgggactgaatgacaaagttcttttcgataataccggaagaggcaagtccaagtctgttgaactcgaggacgtgaagttccaccagtgtgtgagattaagtcggttcgagaacgatcggacaatctctttcattccccctgacggagagttcgagctaatgagttataggctaaatacccacgtgaagccattaatttggattgagagcgttatcgagaagcatagccactccaggattgagtatatgatcaagggcggaaaggaatacttgatgcgcgcccattttggattgccctccgtagaggcagaggataaggaggggaagcctccgatttcagtgaaatttgagatcccatattttaccacgtctggaatccaggttagatatcttaaaatcatcgagaagagcggctatcaggcccttccgtgggtccggtatatcacccagaatggtgattatcagttgaggactcagtag

SEQ ID NO: 178103 - DNA, 1308 bp, synthetic construct
  misc_feature 1..1308: note = Description of Artificial Sequence: Synthetic coding sequence
  source 1..1308: mol_type = other DNA
atgagcgccagcgccgtgtacgtgctggacctgaagggcaaggtgctgatctgtaggaattaccggggagacgtcgacatgtcagaagtcgagcacttcatgccaattctaatggaaaaggaagaggaaggcatgttgtccccaatactggcccatgggggcgtgaggtttatgtggatcaaacacaataacctttacctcgttgccacatcgaaaaagaacgcgtgtgtcagcctggtattttccttcttgtacaaagtggtgcaagtcttctccgaatactttaaagagctcgaagaggagtcgataagggataacttcgtgatcatatacgagctgctcgacgagctaatggatttcggatacccacagaccacagattccaagattctgcaagagtatatcacccaggaaggtcacaagctcgaaacaggagcccctagaccccctgctaccgtgacaaacgcggtgagctggcgttccgagggaatcaaatacaggaaaaacgaggtcttcctggacgttatcgagagtgtcaatctgctgggtaaataccctggagttgggtggctcgggcacacggtatccgctaacggtaatgtgctgaggtctgagattgtgggttctattaaaatgagagttttcttgtcagggatgccagagctcaggctagggctgaatgataaagttttgtttgacaacaccggccggggaaaaagcaagtcggtcgagcttgaggacgtcaagtttcaccagtgcgtccggctctctcgattcgagaatgatcggacaatcagttttattcccccagatggcgaatttgagttgatgtcctatagactgaatactcatgtcaaacccttgatctggatcgaatccgttatagagaagcacagtcattctcgcatcgaatacatgatcaaagctaagagtcaattcaaaagaaggagcaccgccaacaatgtggaaatccacatccctgtcccaaacgacgcagatagccctaaattcaagactaccgtggggtccgtaaagtgggtgccagagaactctgagatagtgtggtcaattaaaagcttcccaggtggtaaagagtatctgatgcgcgcccacttcggcttaccgagcgtagaggccgaggacaaggagggcaagcccccaatttccgttaagtttgagattccgtacttcaccacatccgggatacaggtccgatacctgaaaatcattgagaaaagcggctatcaggcgcttccatgggtgcggtatattactcagaacggcgactatcagctccgcacccaatag

SEQ ID NO: 178104 - DNA, 1056 bp, synthetic construct
  misc_feature 1..1056: note = Description of Artificial Sequence: Synthetic coding sequence
  source 1..1056: mol_type = other DNA
atgagcgccagcgccgtgtacgtgctggacctgaagggcaaggtggtccaggtgttttccgagtacttcaaggaactcgaggaggagtccatccgagataatttcgtgatcatttacgagctcttagacgagctgatggatttcggatatccacagacaacggactctaagattctgcaggagtacatcactcaggagggccacaagctcgagaccggggctcctcgcccccctgccaccgtgaccaatgccgtttcgtggaggtctgaaggcataaaatacaggaagaatgaagtgttcctagatgtgattgaatctgtcaacctgctcgtctcagctaacggcaacgtgctgaggagcgagatagtcggctctattaagatgagggtctttctgtctgggatgccggagctccgcctcggactcaacgataaggtgcttttcgacaacacaggcagaggaaaatcgaagagcgtcgagcttgaggacgttaagttccaccagtgtgtacggctctcaagatttgaaaacgacagaacaatttccttcattccccccgatggcgaattcgaacttatgagctataggctaaacacccatgtgaagcctctcatctggatcgagtctgttatcgagaagcacagccacagtcgcatagagtacatgataaaggcaaagtcgcagtttaagcgtcgatctactgctaataacgtggaaatccacatccctgtgccaaacgatgccgactcacccaaattcaagaccacggttggaagcgtcaagtgggttcccgaaaactctgaaatcgtttggtcaattaagagtttccctgggggcaaagaatatttaatgcgtgcacactttggactgcctagcgtcgaggcagaggacaaggaagggaagccacctatcagcgtaaagttcgagatcccctacttcacaacctccggaatccaggtaagatacttaaagattatcgagaaatctggataccaggccctgccatgggtgcggtacattacgcaaaacggagattatcagctgagaacacagtag

SEQ ID NO: 178105 - DNA, 1272 bp, synthetic construct
  misc_feature 1..1272: note = Description of Artificial Sequence: Synthetic coding sequence
  source 1..1272: mol_type = other DNA
atgagcgccagcgccgtgttcatcctggacgtgaagggcaagcccttgatcagtcgcaactataagggggatgttgcaatgtccaaaatcgaacactttatgccacttcttgtgcaacgtgaagaagagggggctctggctccactcttgtctcacggccaagtccacttcttatggattaaacactcaaatctctacctcgtggccaccacctcaaaaaacgctaatgcctctctggtttactcattcctgtacaagacaattgaagtgttctgtgagtacttcaaagaactcgaggaagaaagcatccgcgacaactttgtcattgtgtatgaactgttggatgagctcatggatttcgggttcccccagacaacggactcgaaaatccttcaggaatatattacacagcaaagtaataaactcgagactggaaaaagccgagtccctccaaccgtgaccaacgccgtgagctggcggtcagaagggatcaaatacaagaagaatgaggttttcattgacgtcatcgaaagcgtgaacctcctggtgaacgcaaatggatcagtcctcttgagcgagatcgttggcacgattaagctgaaagtttttctctccggaatgcccgagttgcggctcggacttaatgatagagtgttgtttgagctcacgggacgctcgaaaaataagtctgttgagctagaggacgttaaattccaccaatgcgtgcggctgagtagatttgacaatgatcgaacaatctcctttatacctccagatggagactttgagctgatgtcttatcgcctttcaacccaggttaagccactgatttggatagagagtgtcattgaaaagttcagccatagtcgcgtcgaaatcatggtcaaggccaagggccaattcaagaaacagagcgttgctaatggcgtggagatctctgtcccggtcccatcagatgccgactcccctagattcaaaacctcagtgggcagcgcaaaatacgtacctgagaggaacgtcgtgatctggtcgatcaagagtttcccgggtggcaaagaatatttaatgagggcccattttggtctgccatccgtcgaaaaagaggaagtggaggggcgcccgcctatcggagtaaaattcgaaatcccctatttcacagtttctggcattcaagtaaggtacatgaagatcatcgaaaagagtgggtaccaagctctgccatgggtgagatatatcactcagtcaggggattatcagttgcggaccagctag

SEQ ID NO: 178106 - DNA, 477 bp, synthetic construct
  misc_feature 1..477: note = Description of Artificial Sequence: Synthetic coding sequence
  source 1..477: mol_type = other DNA
atgatgcggttcatgctgctgttcagccggcagggcaagctgcggctgcagaagtggtatcttgctacctccgacaaagagagaaagaagatggtccgcgagcttatgcaagtagtgctcgcccggaagcctaaaatgtgttccttcctggagtggagagatcttaaggtcgtttacaaaagatatgcttccctgtacttctgttgcgccatagagggccaggacaatgaattgattacactcgaactgattcaccggtacgttgagctcttagacaaatacttcggcagcgtttgtgaactggatatcatttttaattttgaaaaggcctacttcattctcgacgaatttctcatggggggagacgtgcaggatacaagcaagaaaagcgttcttaaggccatagaacaggccgacctcctacaagaggaggacgaatcaccaaggtcagtcctggaggagatgggactggcctag

SEQ ID NO: 178107 - DNA, 477 bp, synthetic construct
  misc_feature 1..477: note = Description of Artificial Sequence: Synthetic coding sequence
  source 1..477: mol_type = other DNA
atgatgcggttcatgctgctgttcagccggcagggcaagctgcggcttcagaaatggtacttggccacttcagataaagaacgcaagaagatggtgagggagctcatgcaggtcgtactggccaggaagcccaagatgtgctcattcctggagtggcgtgaccttaaggtcgtgtacaaacggtatgccagtctatatttttgttgcgccattgaggggcaggataacgagcttatcactctggagcttattcatcggtacgtcgaactgctcgacaagtactttgggagcgtgtgcgaactggacataatatttaacttcgagaaggcttacttcattctggatgagtttttgatgggtggcgatgtgcaggacacctcaaagaagagtgtccttaaggctattgaacaagccgatctcttacaggaggaggacgaaagtccccgtagcgtgcttgaggaaatgggactggcttag

SEQ ID NO: 178108 - DNA, 474 bp, synthetic construct
  misc_feature 1..474: note = Description of Artificial Sequence: Synthetic coding sequence
  source 1..474: mol_type = other DNA
atgcagttcatgctgctgttcagccggcagggcaagctgcggctgcagaagtggtatgtgcctctctccgataaagagaagaagaagatcacgcgcgaactggtgcagaccgtgctggcacgtaagcccaagatgtgtagttttttggagtggagagacctgaaaatcgtgtacaagagatacgcctccctttatttctgttgcgccatagaagatcaagataatgagcttatcacactcgaaatcattcatagatatgttgagcttctggacaagtactttggcagcgtgtgcgagttggacataatcttcaactttgaaaaggcctactttattctggacgaatttctgttaggaggggaagtgcaggagacatctaagaaaaacgtgctgaaggcgattgagcaggcagatttgctgcaagaggaagccgagaccccgaggtcagttctggaggagattgggttgacatag

SEQ ID NO: 178109 - DNA, 462 bp, synthetic construct
  misc_feature 1..462: note = Description of Artificial Sequence: Synthetic coding sequence
  source 1..462: mol_type = other DNA
atgctgctgttcagccggcagggcaagctgcggctgcagaagtggtatgttccgttgtccgataaagagaaaaagaagattacccgggagctggttcagacagtccttgcgagaaaaccaaagatgtgttctttcttagagtggcgcgaccttaagatcgtgtacaaacgctacgcttccctgtacttctgttgtgccatcgaggatcaggacaatgaactcatcactctggagattattcaccgctatgtggagttgctagataaatattttgggtccgtctgtgaactggacattatctttaactttgaaaaggcctactttattcttgatgaatttctgctgggcggtgaggtgcaggagactagtaaaaagaatgtcttgaaagctatcgaacaggcggacttgctccaagaatcccagaatgaggaatggggcgggttgtccgaggatatactgtag

SEQ ID NO: 178110 - DNA, 483 bp, synthetic construct
  misc_feature 1..483: note = Description of Artificial Sequence: Synthetic coding sequence
  source 1..483: mol_type = other DNA
atgcagttcatgctgctgttcagccggcagggcaagctgcggctgcagaagtggtatgtccccctgtccgacaaggaaaaaaagaaaatcactagggagttggtgcagaccgtcctggcaaggaagccaaaaatgtgctcatttctcgagtggcgggacctcaagatcgtgtacaagagatatgcctctctgtacttctgctgcgctatcgaggatcaggacaacgagctgatcacattagagattatccatagatatgtcgaactgctcgacaaatactttgggtcagtctgcgaactcgatataattttcaattttgagaaggcctattttatacttgatgaattcctgttggggggcgaggtccaggaaacctcaaagaagaacgtgctcaaggctattgagcaggccgatctgctgcaggagaaaaccgagacaatgtaccactccaagagcttcattggattcaaaaaggcctattag

SEQ ID NO: 178111 - DNA, 609 bp, synthetic construct
  misc_feature 1..609: note = Description of Artificial Sequence: Synthetic coding sequence
  source 1..609: mol_type = other DNA
atgcccgccggctgccccccccacagcaccaccgccagcctgccccagcatggcgaccgcggattcccattcgccgccgccgcggcagccggacaggcccccccccgtccgagacccgcggcagccatgcagttcatgctcctcttttcccggcagggtaaactgcggcttcagaagtggtacgttcctttgtcagataaggagaaaaaaaagatcacccgggaacttgtccagaccgtccttgctagaaagccaaagatgtgcagtttcctggagtggcgggacctcaagatagtatataaaaggtacgcctctttatatttttgctgtgcaatcgaagaccaggacaacgaacttatcacgctcgagattatacaccggtacgtggagttactggacaaatattttgggagcgtttgcgaattggatattatcttcaactttgagaaggcttattttatcctggacgagttccttctaggaggagaagtgcaggaaacaagcaagaagaacgtgttaaaagctatcgagcaggccgatctgctccaagagaaaaccgagaccatgtaccattcgaagagctttatcggcttcaaaaaggcgtactag

SEQ ID NO: 178112 - DNA, 441 bp, synthetic construct
  misc_feature 1..441: note = Description of Artificial Sequence: Synthetic coding sequence
  source 1..441: mol_type = other DNA
tgacggcagggcaagctgcggctgcagaagtggtacgtgcccctgtccgataaagaaaaaaaaaagatcacaagggagctcgtgcaaaccgttttggcccgcaaaccgaagatgtgcagtttcctggaatggcgggatcttaagattgtgtacaagcgctacgcatccctctacttttgttgtgctattgaggaccaggataacgagctgatcacgctggagattatccacaggtacgtagagctgctagacaagtatttcgggtcagtgtgcgagctcgatattatcttcaacttcgagaaggcatactttatccttgatgaattcctgcttggaggtgaagttcaggagaccagtaaaaagaacgtcctaaaagcaatagaacaggcagacctactccaggagccccgacacgagtatttcaatgtccccgtctactag

SEQ ID NO: 178113 - DNA, 462 bp, synthetic construct
  misc_feature 1..462: note = Description of Artificial Sequence: Synthetic coding sequence
  source 1..462: mol_type = other DNA
tgactgctgttcagccggcagggcaagctgcggctgcagaagtggtacgtgccactgtccgataaggagaaaaagaaaattacaagagagctagtgcagaccgtattggctcgaaaaccaaagatgtgttcctttcttgagtggcgagacctaaagatcgtatacaagaggtacgcctctttgtatttctgttgtgcaatcgaagaccaagacaacgagttgatcacactggaaattatacaccgctacgttgaactgcttgacaaatacttcggttccgtgtgtgagttagacatcatatttaacttcgagaaggcgtacttcatactagatgaattcctactaggcggtgaggtccaggaaacgtctaaaaaaaacgtactgaaggccatcgagcaggccgatttactgcaggagtcccaaaatgaagaatggggaggattgagcgaggacatactgtag

SEQ ID NO: 178114 - DNA, 588 bp, synthetic construct
  misc_feature 1..588: note = Description of Artificial Sequence: Synthetic coding sequence
  source 1..588: mol_type = other DNA
atgcccgccggctgccccccccacagcaccaccgccagcctgccccagcacggggatcgggggttcccctttgccgctgcagcggccgccgggcaggctcccccgcgcccccgtcctgccgccgccatgcagttcatgcttctgttctctaggcagggaaagcttcgcttgcagaaatggtatgtgcccctgtccgataaagagaagaaaaagatcacgagagaactagtgcagacagttttggcccgaaaacctaagatgtgctctttcttagaatggcgggatctcaaaatcgtttacaagcgatacgcctcactctacttttgttgcgcaattgaagaccaggacaatgagctaatcactttggagatcatccaccgctacgtggaattgctggacaaatattttggcagcgtttgtgaattggacataatcttcaacttcgaaaaggcttacttcatactagatgagttcctcttggggggtgaagtgcaggagacctccaagaagaacgtgttaaaggccattgaacaggcagatctcctgcaggagcctcgacacgagtatttcaacgtaccggtatattag

SEQ ID NO: 178115 - DNA, 315 bp, synthetic construct
  misc_feature 1..315: note = Description of Artificial Sequence: Synthetic coding sequence
  source 1..315: mol_type = other DNA
atgatccggttcatcctgatccagaaccgggccggcaagacccggttggccaagtggtatatgcaatttgatgacgacgagaaacagaaactaattgaggaggtacatgccgtcgtgactgtgagagatgcaaagcacacgaacttcgtggaggtgctgaacgagtacttccacaatgtatgcgaactggacctggtttttaatttctataaagtgtacaccgtggtggacgaaatgtttctggcaggagagataagagagaccagtcagacaaaagtcttgaagcagctgctgatgttgcagagcctcgaatag

SEQ ID NO: 178116 - DNA, 2868 bp, synthetic construct
  misc_feature 1..2868: note = Description of Artificial Sequence: Synthetic coding sequence
  source 1..2868: mol_type = other DNA
atgcccgccgtgagcaagggcgacggcatgcggggcctggccgtgtttatttctgacattcgcaactgcaaaagtaaggaggctgaaatcaagagaattaataaagagcttgccaacattaggtcaaaattcaaaggagacaaggccctggatggatactccaaaaagaagtacgtgtgcaagcttctgttcatattcctgcttggacatgacattgatttcggtcacatggaagcagttaacctcctgtcctctaacaagtatactgaaaagcagattggttatcttttcattagcgtgcttgtgaacagtaatagtgaattgatacgactgatcaataacgcaatcaagaatgatctcgctagcagaaaccctacctttatgtgcctcgcactgcattgcatcgccaatgtgggctctcgagaaatgggggaagcatttgcagcagatattccacgaattctggtagctggggatagcatggatagtgttaagcagtccgcagctctttgtctcctgcggctgtacaaagcttccccggatctcgtcccgatgggcgagtggacggcccgtgtcgtgcatctgctgaacgaccagcatatgggggtggtcacagccgccgtgtcccttattacctgcctgtgtaagaagaatcctgacgatttcaaaacatgcgtatctctcgccgtaagccgcttgtccaggatcgtgtccagcgctagtacggacctacaggactacacgtattacttcgtcccagctccatggctgtctgtcaaattgttaagattgttacagtgctatccaccacctgaggacgccgcagtgaaaggacgcctggtggagtgccttgagaccgtccttaacaaggcccaggaaccaccaaagtccaagaaggtgcagcattcaaatgccaagaacgcaatactattcgagactatcagtcttatcatccactatgactctgagccaaacttgctagtccgtgcttgcaatcagcttggccaattcctccagcacagggaaaccaatctacgctatttagccctggaatctatgtgcacactcgccagttccgaattttcccacgaggccgtcaagacccatatcgataccgttatcaatgctttgaagaccgaacgcgatgtcagcgtaaggcagcgggcagccgaccttctttacgccatgtgcgacaggtctaatgctaagcaaattgtatctgagatgctccgctatctggaaacagcagactatgctatccgggaggagatcgtgctgaaagttgccatcttggcagagaaatatgcagtggattacagctggtatgtggacaccatcctgaaccttattcggatcgccggtgattatgttagcgaagaggtgtggtacagagtgctgcagattgttacgaaccgggacgacgtgcagggttatgctgccaagacggtgttcgaagctctccaggccccggcttgtcacgagaacatggtcaaggtcggaggatatatcctgggagagtttggaaatcttatcgccggggatcccagaagcagcccccccgtccagttctctttgctccacagtaagtttcacctatgttctgtggccacccgcgcgctactgctgtccacctacattaagttcatcaatttatttcctgagacaaaggctactattcagggtgtgctgagagcagggagccaactcaggaacgccgacgtggagcttcagcaaagggcagtggaatacttgaccctgtcaagtgtcgcctcaacggatgttctggccaccgtgctggaagagatgccacctttcccggaaagagagtcatcgatccttgccaagttgaaaaggaagaagggccccggggcgggctcagccctcgacgacggacgccgggatccaagctctaacgatatcaatgggggcatggagcctacccctagtacagtttccactcctagtccaagcgcagacctgctggggctcagagcagcacctcctcctgccgcccctcctgcctccgcaggcgctggcaacctgcttgtcgacgtgtttgatggtcccgctgcgcaacccagcctgggacctactccagaagaggccttcttgtcaccaggccccgaagacatcgggccacccatcccagaggccgacgaactgcttaataaatttgtgtgtaaaaataacggcgttctttttgagaatcagctcttacagattggtgtgaaatcagaattccgtcaaaacctagggcggatgtaccttttctacgggaacaagacctcagtgcaattccagaacttcagcccaacagtggtgcatcccggcgacctgcagacccagcttgcggtgcagaccaagcgggtagctgctcaggtcgatggtggggcccaagttcagcaggtgctcaacatagaatgcctgagagattttctgacacctcctttgcttagcgtcaggtttcgttacggcggggccccacaggccctgaccctgaagctcccggtcactatcaataaattcttccagcccacagaaatggccgcccaggatttctttcaaagatggaaacagctgagcttgccgcaacaggaggcccagaaaatttttaaagcaaaccaccctatggacgcagaagtgacaaaggccaagctgctcggcttcggttccgccctactagataacgtggacccaaatccggagaattttgtcggggctgggataattcagactaaggcgctgcaggtcgggtgtctgctgcgactagaacccaatgcgcaggctcagatgtaccggttaaccctccgcacctccaaggaaccagtgtcacgacacttgtgtgaactcttggcccagcagttttag

SEQ ID NO: 178117 - DNA, 2934 bp, synthetic construct
  misc_feature 1..2934: note = Description of Artificial Sequence: Synthetic coding sequence
  source 1..2934: mol_type = other DNA
atgcccgccgtgagcaagggcgacggcatgcggggcctggccgtgttcattagtgacatccgaaactgcaagagcaaagaagcggagatcaagagaattaacaaagaattggcgaacattcgctccaaattcaaaggggataaggcccttgatggctactctaagaagaaatacgtctgcaagttgttgtttattttcctcctgggacacgatatcgattttggtcacatggaggcagtgaacctccttagcagtaataaatacacagagaagcagataggttatttatttatcagcgtgttggtgaattccaattcagagcttatccggctgatcaacaacgccatcaaaaacgacctggcctccaggaaccctacattcatgtgcctggcactgcactgtatagccaacgttggcagccgcgagatgggcgaggcctttgccgcggacattcctcgcatcctggtcgccggcgacagcatggattctgttaaacagtccgctgctctgtgtctgctgcgcctgtataaagcatctcctgacttggtccccatgggggaatggaccgcgcgcgtggtgcaccttctcaacgaccagcacatgggtgtggtgactgccgctgtaagcttgataacatgcctttgtaagaaaaatcctgatgacttcaagacatgtgtgtccctagctgtttcccggctctcccggattgtaagttccgcaagcacagatctccaagactatacctattattttgtccctgcaccatggctcagtgttaagctgctgcgtctactgcagtgttacccgccccccgaagatgccgcagtgaagggaaggctggtggaatgcctagagaccgttctcaataaggcccaagaacccccgaagtccaagaaagtccagcattctaatgcaaaaaatgccattctgttcgagactatttccctgattattcactacgactcagaaccaaatttgctagttcgtgcatgcaatcagctgggacagtttctgcagcaccgggagaccaatctgcgatatctggctcttgagtctatgtgcaccttagcgtcctccgaatttagccacgaggcagtaaagacccacattgatacggttatcaacgctctcaaaactgagcgggatgtctcggtgcgccagagagctgctgatctgttgtacgctatgtgcgatcgctcaaatgccaagcaaatcgtgtcggaaatgctgaggtatctcgaaactgctgactacgccatcagggaggagattgttctgaaggtggctatcctggctgaaaagtatgccgtggattattcttggtatgttgatacgatcttgaacctcatcagaatcgccggcgactacgtgtctgaggaagtatggtaccgtgttttgcagatcgttactaaccgagatgatgtacaggggtacgcggccaaaacagtgttcgaggctctgcaggcaccggcctgtcacgagaacatggtcaaagtgggagggtacattttgggtgagttcgggaacttaatcgctggggatccccggagttcacccccggtacagttttctctgctacactcaaagttccacctctgtagcgtggctacacgggcactgctgctatccacttacatcaagttcattaacctgtttcccgaaacgaaggcaaccatacaaggggtcctccgcgccggctcccagctacgcaatgctgacgtcgaactgcagcagcgtgccgttgaatacctgactctgtccagcgttgccagcaccgatgtgctggcgactgttcttgaggagatgcctccgttcccagagcgcgagagtagcatcctggcaaaactaaagaggaaaaaaggccctggcgctggtagtgcgcttgacgatggccggcgtgacccaagcagcaacgatatcaatggcggaatggagcccaccccatctacggtttctacacccagccccagtgctgatctcctgggcttacgcgcagctccaccgccagctgcaccaccggccagcgctggtgctggaaatctcctggtggacgtatttgacgggccggccgctcaaccatctctcgggcccacccccgaagaagcctttctgtctgaactggaaccccccgcacctgagtctccgatggcacttctcgctgaccccgcccctgccgcggaccctggacctgaggacattggccctcccattcccgaggctgatgaactcctcaacaaatttgtgtgcaaaaataacggcgttctgtttgagaaccaattgctgcagatcggcgtgaagtctgagttccgacaaaatctgggccgcatgtatctgttttacgggaacaagacaagtgtgcaatttcagaatttctctcctactgtggttcacccaggtgacttgcagactcaactagcagtccagacaaaacgagtggccgcacaggtggatggcggcgctcaagttcaacaggtgcttaacatagaatgtctgcgcgacttcctcactccacccctgctttcagtgaggttcagatacgggggagctccccaagcgctcactcttaagctgcccgtgaccataaacaagttcttccaaccaaccgaaatggccgctcaggatttctttcagaggtggaaacagctctcactgccacaacaggaggcccagaaaatattcaaggccaaccatccaatggatgccgaagttactaaggcgaaattactgggattcggcagcgcacttctggataatgtcgaccctaatccagagaacttcgttggcgccgggattattcagactaaggcactgcaggtgggctgcttactcagactggaacctaatgcccaggctcagatgtaccgtctcacgctgaggactagtaaggaacctgtatcacggcatttgtgtgagcttctggcccagcagttttag

SEQ ID NO: 178118 - DNA, 1404 bp, synthetic construct
  misc_feature 1..1404: note = Description of Artificial Sequence: Synthetic coding sequence
  source 1..1404: mol_type = other DNA
atgggcctggccctgcactgcatcgccagcgtgggcagccgggagatggcggaagcgttcgccggggaaattccaaaagtattagtggcaggcgataccatggacagcgtcaagcagagcgccgccctttgccttttgcggctatataggacatcaccggatctcgtacctatgggcgattggactagtagagttgtgcacctccttaatgaccagcatctcggcgtggtgacggccgcaacaagtctgattactaccctcgctcagaagaatccagaggagtttaaaacaagcgtgagcttggccgtcagccggctaagtcggattgtaacgagcgccagcactgacctacaggattatacttattacttcgtgccggctccctggctgtctgtgaagttattacgcctcctgcagtgctacccgcccccagaccccgcggtgagaggcaggctgacggagtgtcttgaaactatattaaacaaggctcaggaacctcctaagtctaagaaggttcagcacagcaacgccaagaacgccgtcctcttcgaggctatctctctcataatccaccacgatagtgagcccaatctgctcgtgcgagcctgcaaccagctgggtcagtttctacaacaccgcgagacaaatctgaggtatctggccctggagtctatgtgtacgctggccagcagcgaattctcacatgaagctgttaagactcatattgagacagtgattaatgctctgaagacagaaagggacgtctccgtgctgcctcctactcctcctcgatccttgtgggagcagcaatgccattgcgcctggaggggcctgagcttaggcgtatggccaagctggtggctccacacctggcgtcgacctggacccctgggcggcgcgcagttgacacttgtgttgcttcaatctcagctggactgttttcctcgccaggattttaacctggagtttaggaacatctgcatttgcaacgatttctggcaaaagcatgtctcttggcctgatgttactgtgctgttgtcacagctgctgttcgtgaagggagtgtgttatgctccggccgttgcagaggctctggatgtgcagccaggcgaagaaagacctgccggcccagcgggcccgccggggctgcaaggcaaggtctgggccgggggggctagactgcgcggtgtactcgttagcttcctgtctgagtgggcgtcccctggccatggggcgggcctgagcccctcaacgggacctgtgcagtcctccttagaagggctgtggcgccgggacgccagcgtttggtcaggaagcgaaggagctattggccggatgccgtgcgccacgtgtggcctatgtctgacctgccatttggacagcgctccgcgactccacgtgtag

SEQ ID NO: 178119 - DNA, 2823 bp, synthetic construct
  misc_feature 1..2823: note = Description of Artificial Sequence: Synthetic coding sequence
  source 1..2823: mol_type = other DNA
atgcccgccgtgagcaagggcgacggcatgcggggcctggccgtgttcatttcggatattcgcaattgcaaatccaaagaagccgagataaagcggattaataaggaactggccaacatcagatctaaattcaagggggataaggcccttgacgggtacagcaagaagaagtacgtttgtaaactcttatttatcttcctgttaggccacgatatcgactttgggcatatggaggcagtcaacctgttgtcctccaaccgatataccgagaaacagattggctacctgtttattagcgtgcttgtcaactcaaacagtgagctcatccggcttattaataatgccatcaagaatgaccttgcttcacgcaatcccacctttatggggctagccctgcattgcatcgcgtctgtcggctcccgtgaaatggccgaagcctttgcgggcgaaattcccaaagttttggtggcaggggataccatggactcagtaaaacaatccgcggctctgtgtctgctgcgactttaccgaacaagcccagacctcgtgcccatgggagactggacctcacgagtcgtgcacctgttgaatgatcagcacctcggcgtggttacggccgcaacctctctaattacaacactggctcaaaagaatcctgaagagttcaaaacctccgtgtccttagcagtttcaagactgtctaggatagtcacatccgcctctactgacctgcaagattacacctactactttgtgccagctccttggctgagcgttaagctcttgagactgcttcagtgctatccccctcctgaggaccctgccgtacgtggacggctgaccgaatgcctggagaccatcctcaataaggctcaggagcctcccaagagcaagaaagtccagcattccaatgctaaaaatgcagtgctcttcgaggccattagtctgatcatccaccatgattcagagcctaatctcctggtccgagcctgcaaccagttgggtcagttcctgcaacatcgagagacaaatttaagatacctcgcgctggagtctatgtgcaccctggcaagctctgaattctctcacgaggccgtgaagacccacatagagacggtgattaatgctctgaagacggagagggacgtgagcgttaggcaacgcgctgtcgatctcctgtacgccatgtgtgatcgttcgaatgcaccccagattgttgctgagatgttaagctacttggaaactgctgattactcaatacgggaagagatcgtgcttaaggtcgcaatacttgcggagaaatacgcggtggactacacctggtacgtagacacaatattaaatctgataaggattgctggcgattacgtgagcgaagaggtctggtatagggtcatccagatcgtaataaaccgtgatgacgtccagggctacgctgcgaagacagtgttcgaagccctccaggcccccgcctgccacgaaaacctcgtaaaagtggggggctacatcctgggtgaattcgggaatctgatcgcgggcgaccctagaagcagtcctttaattcaattccacctcttgcattccaagtttcacctgtgtagtgtccccaccagagccttgcttttgtctacttacatcaagttcgtaaatctatttccggaggtgaagcccacgatccaggatgtgctgcgcagtgattcacaactcagaaacgctgacgttgagttgcagcagagggcagtggagtatctgcgactcagcacagtcgcatcaacagacatcttggccacagtactggaggaaatgcccccctttccagagcgggagagctccatcctcgccaaattaaaaaaaaaaaagggcccttccaccgtcaccgacctcgaggatacaaagagagatcggtccgtggatgtcaacgggggaccagaaccagcccctgctagcactagcgccgtttcgacacctagccccagtgcagatttattgggactcggagcagcaccacctgcaccagcgggcccaccgccttcctcgggcggatctggactactggtggatgtcttctctgactccgcgtctgtcgtggcacccttggcacccgggagcgaagacaatttcgcccgattcgtgtgcaaaaataatggggtgctgtttgagaatcagcttctgcaaatcggcctgaaaagcgaatttcgtcagaacctgggaagaatgttcatattttatggaaacaaaacatcaacgcagttcctgaactttacacccacccttatctgctctgacgatctgcagccaaatctgaatttacaaaccaagccagtggatcctaccgtggagggaggagcacaggtgcaacaggttgttaacattgaatgcgtatccgatttcacggaagctcccgtcctaaacatccaatttagatatggtgggaccttccaaaacgtctccgtgcagctcccaattaccctgaataaattcttccagccgaccgaaatggcgagccaggacttcttccagcggtggaaacagctatctaaccctcagcaggaagtgcagaatatttttaaagctaagcatcccatggacactgaagtgacaaaagccaaaatcatcggctttgggtcagccctgctcgaggaagtagatcccaacccagccaacttcgtgggggccggtataatccacaccaaaacgacacagatcggatgtctgcttcgcctcgaacctaatctgcaggcccagatgtaccggctgactctccgcacaagcaaggaggcagtgtcccagcggctgtgcgagctcctgtcagcccaattttag

SEQ ID NO: 178120 - DNA, 1062 bp, synthetic construct
  misc_feature 1..1062: note = Description of Artificial Sequence: Synthetic coding sequence
  source 1..1062: mol_type = other DNA
atgcccgccgtgagcaagggcgacggcatgcggggcctggccgtgtttatctcggacatccgtaactgcaaaagcaaggaagccgagattaagcgcattaataaagagttggccaatatacggtccaagttcaagggcgacaaggccctcgacgggtactccaaaaaaaagtacgtttgcaagcttctttttatttttctgctgggccatgatatagactttgggcatatggaggcagtgaaccttctgagttctaacaggtatacggagaaacaaatcggctacctgtttatctcggtgctggttaactcaaattccgaacttataaggctgatcaataacgctattaagaatgatttagcctcccggaatcctacgtttatgggcctggcgctgcactgtattgcatctgtgggctcgcgggagatggcggaggccttcgcgggggagattccaaaggtgttggtggccggagacacaatggatagcgtgaaacaaagtgcagctctttgtttattgcgtttgtatcgcacatcccctgacttggtcccgatgggcgactggacttcacgggtggttcatttactgaatgaccaacacctgggcgtcgttacagccgcaacgtccctaattacgacattagcccagaagaacccggaggagttcaagacttctgtctcactagctgtgagccgtttgagcaggattgtgacctcagcctctaccgatctacaagactacacttattatttcgtgcccgcaccctggctgagcgtaaagttactccgactgctgcagtgttacccgccccccgatccagccgttcgcggcaggttgacagaatgccttgagaccattctgaataaagcgcaggagccgcctaaatccaaaaaagttcagcacagcaatgctaagaatgccgtgctttttgaggctatcagtttgatcattcatcatgaccgggagccaaatctgcaagctcagatgtacaggctgacactccggacctctaaggaagctgtttcccagcgcctatgtgaacttctatctgcccagttttag

SEQ ID NO: 178121 - DNA, 1971 bp, synthetic construct
  misc_feature 1..1971: note = Description of Artificial Sequence: Synthetic coding sequence
  source 1..1971: mol_type = other DNA
atgcccgccgtgagcaagggcgacggcatgcggggcctggccgtgttcatcagtgacatcaggaactgtaaatcaaaggaagctgaaatcaagcggatcaataaggaactcgccaatattaggtccaaattcaaaggcgataaagcactcgacgggtattccaagaaaaagtatgtgtgcaagttactcttcatttttctgctcggtcacgacatcgacttcgggcacatggaggctgtaaacttgttgtcttccaaccgctacaccgagaagcaaattggctatcttttcatctcggtcctagtaaacagcaactctgagttaattcgactgatcaacaatgcgatcaaaaatgacttggcgagtaggaaccctacttttatggggctggcactccactgcattgcttcggtgggtagccgtgagatggccgaagcatttgccggggaaattcctaaggtactggtggcgggcgatactatggactctgtgaagcaatccgccgcactgtgtctgcttaggctgtatcgcacttcgcctgatctggtgcccatgggggattggacttctcgggtagtacatctgctgaatgatcagcatttgggcgtggtcacagccgctaccagccttatcaccacgcttgctcaaaagaaccctgaggagttcaagacgtctgtctccctggccgtatcaagactgagtcgcatcgtgaccagcgcaagcactgatttgcaagactacacttattattttgtgcccgctccctggttgagcgtgaaactccttcgactcctccaatgctacccccccccggaagaccccgccgttcggggcaggctcaccgagtgccttgagacgattctgaataaagcccaggagccgccaaagagtaaaaaggtgcagcattcaaatgccaaaaacgccgttttgttcgaggctatcagcctgatcatccatcatgactccgaacctaacctcctggtgcgggcgtgtaatcagctgggacaatttcttcagcaccgcgagactaatttgaggtatctcgcacttgagagtatgtgcaccctggcttcaagtgagttcagtcacgaagcagtgaagactcacattgaaacggttatcaatgccctcaagaccgagcgagacgtgagtgtgcgccagcgagcagtcgatctcctgtacgcaatgtgcgataggagcaatgctcctcagatcgtcgcagaaatgctcagttaccttgagactgctgactatagtattcgagaagagatagtcctgaaagttgccatactggctgagaaatacgccgtggactatacatggtatgtggatacaatcctgaatctaattagaatcgccggagattatgtgtctgaagaagtgtggtatagagtgatccaaatagtgataaaccgtgatgatgttcagggatatgctgcaaagacagtattcgaagcattacaagcaccagcctgtcacgaaaacctcgtgaaggtcggtggatacatccttggcgagtttgggaatctaatcgcaggcgatcccaggagcagccctttgatccaatttcatctgctccattctaagttccacctgtgctccgtgcccaccagggccctgttgctatccacttacataaaatttgtaaatctgttccctgaagtgaaacccactatccaggacgttctcagatcagattcacagctgcgaaacgcggatgtggaactgcagcagagagccgtggagtacctgcggctatcaacagttgcatcaactgacatcctcgcaacagttctcgaagagatgccaccctttcctgaacgcgaatccagtattctggccaagctcaagaagaaaaaagggccttcaacagtcaccgacttggaggacaccaaaagggacaggtctgtagacgtcaacggagggcccgagccggcccccgcgagcacttctgccgtgctatgcctctag

SEQ ID NO: 178122 - DNA, 2820 bp, synthetic construct
  misc_feature 1..2820: note = Description of Artificial Sequence: Synthetic coding sequence
  source 1..2820: mol_type = other DNA
atgcccgccgtgagcaagggcgacggcatgcggggcctggccgtgtttatatcagatattagaaactgcaagagtaaagaagccgaaattaaacgtattaataaggaactcgcaaacatccggtccaagttcaagggtgacaaagcgctggacggctactctaagaagaagtacgtgtgtaagttgcttttcattttcctgttgggccatgacattgactttgggcacatggaggcggtgaatttgctgtcttcaaatcgctacaccgagaagcagatcggatatctgttcatttctgtcctggtgaacagcaattccgagctgatacgtctaatcaacaacgcgatcaagaatgatctggccagtagaaatcccactttcatgggtctggctcttcactgtattgcaagtgtagggtcaagggagatggccgaagctttcgccggcgaaataccaaaagtgttggtcgccggggatacgatggactccgttaaacaatctgcagctctgtgtctccttaggctgtatcggacaagccccgacctggtgcctatgggcgactggactagtagggtggtacacctactaaacgaccagcacctcggtgtcgtgactgccgctactagcctcatcacgactctggcccaaaagaaccctgaggaattcaagacttctgtcagcctagccgtctcacgtctgagcaggatcgtcaccagcgccagcactgatctccaagattatacttattacttcgtgcctgccccatggctgtccgtgaagctgctgagacttctccagtgctaccccccgccagatcccgcagtgcggggacgccttacggaatgtctggagacaattttgaacaaagcccaggagccccctaaatctaagaaagtgcagcactcgaatgctaaaaacgcagttttgtttgaagcgatcagcctgatcattcaccacgattctgagcctaacctgctggtcagggcctgcaatcagcttggccagtttctccagcatcgggagactaatcttaggtatctggcgctggagagcatgtgtacactggcaagtagtgaattttctcatgaagccgtgaaaacacacattgaaaccgtaatcaatgcgctgaaaactgaaagggacgtctcggttcgtcagagagcagtagacttgctgtacgcaatgtgcgacagatccaatgctccccagatcgtggctgagatgctgtcctatctggaaacagcagactacagtatacgcgaggaaatcgtgctaaaggtcgcaatactggcagagaaatatgccgtggattatacctggtatgtggataccattcttaacctcattagaatagcaggcgattacgtgtccgaagaagtctggtacagagtgatacagatcgtgatcaatcgggatgatgtacagggctacgccgcaaaaactgtcttcgaggctctccaggcacccgcatgccatgaaaacttagtgaaggttggaggctacatattgggcgagtttggaaacctgatcgctggggatcctagatcctcacctttaattcagttccatttgctgcattctaagttccatctatgctctgtcccaaccagagccctgctcctttctacttacattaaattcgtgaacctgtttccagaggtgaaaccaacaatacaggacgtcttaaggtccgactctcaattgcgcaacgctgatgtggagctgcaacagagggcagtggagtacttaaggctctccaccgtcgcaagtaccgatatcctggctactgtgctcgaggaaatgcctccatttcccgagagggaatcttccatcctggccaaacttaagaagaagaaggggccatctactgtgacagacctggaagatacaaagagagaccggagcgtggacgtcaatggaggcccagaaccggccccagcttcaacttcagcagtatctaccccaagtcctagcgctgatctgcttggattgggtgctgccccaccggcacccgccggtcctccaccttcctccggcggttctgggcttctcgttgacgttttctctgattctgcctcagttgttgctcctctggcccccggctctgaggacaacttcgcgagattcgtgtgcaaaaacaatggcgtgctcttcgaaaatcagctgcttcagataggccttaagtccgaatttcggcagaacttgggccgaatgtttattttctacggcaataagacctcaacacaatttctcaacttcacccccactctgatctgtagcgacgacctgcagcccaacttgaatctacagaccaagcctgtggaccctactgtggaggggggtgcccaggtgcaacaagtggtaaacatcgagtgtgtctcagatttcactgaagccccggtgttgaacattcaatttagatacggaggcacattccaaaatgtgagcgtgcaacttcccattaccctgaacaagttctttcagcccaccgaaatggctagtcaggactttttccaacgctggaaacagctgagcaacccccagcaagaggtgcaaaacattttcaaggcgaagcatcctatggatacggaggtaacaaaggcaaagattatcggctttggaagtgcccttctcgaggaagtggatcccaatcctgcaaattttgtgggcgccgggatcatccatacaaagaccactcagattgggtgtctgctgagactggagccgaatctccaagcccaaatgtataggctgacactgcgcactagtaaggaggctgtgtctcagcggttatgtgagctgctttctgctcagttttag

SEQ ID NO: 178123 - DNA, 2040 bp, synthetic construct
  misc_feature 1..2040: note = Description of Artificial Sequence: Synthetic coding sequence
  source 1..2040: mol_type = other DNA
atgcccgccgtgagcaagggcgacggcatgcggggcctggccgtgtttatatcagacattagaaactgcaagtctaaagaagcagagataaaacgtattaataaagagctcgctaacatccgatccaaattcaaaggtgacaaggcactcgacggctactccaaaaaaaaatacgtgtgtaagctgctcttcatctttttactgggccacgatattgatttcggacacatggaggccgtaaacctcttgagttcaaataggtacactgagaagcagattgggtatctgtttatttccgtcctggtaaattccaattcagagctgattcgattgatcaacaacgcaattaagaccgaaagggacgtatccgtacggcagcgtgccgtggatctcttatacgcgatgtgtgacaggtctaacgcacctcagattgtggctgagatgcttagctacctggaaacagctgattattccatccgagaagagatcgtgttaaaggtggctattctcgcagagaaatatgcagtcgactatacatggtatgtggacacaattctgaatcttatacgaattgcgggcgactacgtgtctgaagaggtctggtacagagtgatccaaattgtgattaacagagatgatgtccaagggtacgcagcaaaaacagtcttcgaggctctccaggcccctgcgtgtcacgaaaatttggtcaaagtggggggatacatcctcggtgagtttgggaacttaatcgccggcgatcctagatcctctcccttaattcagttccacctgttacattcaaaattccatttgtgttctgtgcccacccgcgcgttgctgttgtctacttacattaagttcgtaaatctattccctgaagtgaaaccaaccattcaagacgttttacgatccgacagtcaattgaggaacgccgacgtggagttacagcagcgggctgtggaatacctaaggctgagtacggttgcatcgaccgatattttagcaaccgtgctggaggaaatgccaccttttccggagcgggaaagttccatcctggccaagctaaagaaaaaaaagggcccctccactgtgacagatttggaggacacaaaacgcgacagatccgtggatgttaatggggggccggagcccgcacccgccagtactagcgctgtctcaacaccttccccgtcggcagacctgctgggtctgggcgccgcgcccccggcccccgccgggcctcccccatcgtccggaggatccgggttgcttgtggacgttttttcagattccgctagcgtagtagcacctctcgcaccggggagcgaggataactttgctcgctttgtgtgtaagaataacggcgttctctttgagaatcagctcctgcagattggattgaagtctgagttccgccagaatctcggaagaatgttcatcttctacggcaacaagacctctacccagttcttgaatttcacccccaccctaatctgttccgatgatcttcagcccaacctcaatctgcaaacaaagcctgtggatccaaccgtcgaggggggagctcaagtccagcaggtggtaaacattgagtgcgtatccgacttcaccgaagccccagtgctcaacatccagttccggtacggtggaaccttccaaaacgtttccgttcagctgcccatcactctgaacaaatttttccagcccactgagatggctagccaggatttctttcagagatggaagcaattgagtaacccacaacaagaagttcagaacatattcaaagcgaagcatcctatggataccgaagtcaccaaagccaagataatcggcttcggcagtgctctgctggaggaggtcgaccccaatccggctaactttgtcggggccggaattatccacaccaaaaccacccagatcggatgtctgctcaggctggaaccaaacttgcaggcccaaatgtacagactgacgctcagaacctcaaaggaggccgtctctcaaagactgtgtgaactcctttcagctcaattttag

SEQ ID NO: 178124 - DNA, 2031 bp, synthetic construct
  misc_feature 1..2031: note = Description of Artificial Sequence: Synthetic coding sequence
  source 1..2031: mol_type = other DNA
atgcccgccgtgagcaagggcgacggcatgcggggcctggccgtgttcataagtgacatcaggaattgcaaatcaaaggaggccgaaattaagcgcatcaacaaagagctcgccaatatcagaagcaaatttaagggagataaggctctggatggttacagtaaaaaaaagtacgtgtgcaagcttctcttcatcttcctgttgggtcacgacattgattttggtcatatggaggccgtgaacttgctcagctccaatcgatacacagaaaaacagattggctatctgtttattagcgtgctggttaatagtaactctgagctcatcagactaattaataatactgaacgcgacgtatcagtgcgccaacgtgcagtcgacttgttgtatgctatgtgcgaccggtccaacgccccccagattgttgccgaaatgctgagttacttagagacggccgactatagcattcgcgaggagattgtgctgaaggttgcgattctcgctgaaaagtacgctgtggactacacatggtacgttgatacaatcctgaatctcattcgcattgctggcgactacgttagtgaagaggtgtggtatagggtcatccaaattgtgataaatagagatgacgtgcaaggctacgctgcaaagactgtattcgaagccctccaagcaccggcctgtcacgaaaacctcgtgaaggtggggggctacatcctgggagagtttggcaacctgatcgccggcgaccctagaagtagtcctttgatccagtttcacctgctgcacagcaaattccacctgtgcagcgtgccaactcgtgcacttctgctctccacatatatcaagtttgttaacctgtttccagaggtgaaaccaacaatccaagatgtacttcggtccgatagccagctgcggaatgccgacgtggagcttcagcagcgagcagttgaataccttcgtttaagcaccgtggcaagcaccgacattctggccaccgtgctggaggagatgccaccattcccagaacgggagagcagcatcctcgccaaactgaagaagaaaaaaggcccatctactgtaaccgatctagaagatactaaaagagaccgaagcgtggatgtcaacggtggccccgaaccagcccctgcgagtacttcagccgtttcgactccgtcgccgagcgccgatcttctggggctcggggccgccccacccgccccagcaggaccacctcccagcagcggagggtctggactgcttgtcgatgttttcagcgattctgcttcagtggtagcccccctggccccaggctctgaggacaacttcgcgcgctttgtgtgtaaaaataatggagttttgttcgagaaccaactgttgcagattggcttgaaatccgagttcaggcaaaacctgggccgaatgtttattttctacgggaacaagacttctacccagtttctgaattttacaccaactctgatttgtagcgatgacctccagcccaatcttaaccttcagactaaacctgtcgacccaacagtcgaagggggtgcccaggtacagcaggtggtgaatattgaatgtgtgagcgatttcacggaagctccagttcttaacatccagttccgttatggtggaacatttcagaacgtttcagtgcagctcccaatcaccttgaataaattctttcagccaacagaaatggcatctcaagattttttccaacggtggaaacagctttcaaacccacagcaagaggtgcagaacatttttaaggctaagcatcctatggataccgaggtgacaaaagccaagataatcggattcggctcagcactgctcgaggaggtggatccaaaccctgccaacttcgtaggtgctggaataattcacacaaagacgacccagatcggctgtctcctaaggttagagccaaacctccaggctcagatgtaccggctgactttaagaacatccaaggaagccgtgtctcaacggctctgtgagctgttgtcagcccagttctag

SEQ ID NO: 178125 - DNA, 2814 bp, synthetic construct
  misc_feature 1..2814: note = Description of Artificial Sequence: Synthetic coding sequence
  source 1..2814: mol_type = other DNA
atgaccgacagcaagtacttcaccaccaacaagaagggcgagatctttgaattaaaggccgaattgaacaacgaaaagaaagaaaaacggaaggaggctgttaagaaggtgatcgccgccatgacggtgggaaaagatgttagcagcctgtttccggacgtggttaactgtatgcagaccgataatttggaacttaagaagctcgtgtatctgtaccttatgaattacgcaaaatcccagcctgacatggcgatcatggctgtgaatagtttcgtgaaagactgcgaagatcctaatcccctcatccgcgcactggcagtgagaacgatggggtgtataagagtggacaaaatcacagaatatctctgtgaacctttaagaaagtgccttaaggatgaagacccctacgtgaggaaaacagccgccgtttgcgtcgccaaacttcacgatatcaacgcacagatggtggaagaccagggattcctcgattcattaagagatctgatcgccgattcgaacccaatggtcgtcgcaaatgccgtggccgctctgtccgagatcagcgagtcccatccgaactcaaacctcttggatttaaaccctcagaacatcaacaagctcctcaccgctttgaacgagtgcaccgaatggggtcaaatcttcatcttggattgcctaagcaactacaaccctaaggatgaccgcgaagctcagtcaatctgcgagcgcgtcacccctcggctgtcccatgccaacagcgctgttgtcctgtccgcggtgaaagttctgatgaaatttctggaactgctgcctaaggacagcgattactataacatgttactgaaaaagctggctcctcctctcgtgacactcctgagtggcgaaccagaggttcagtacgtcgcacttcgtaacatcaacctgatcgtgcaaaaacgccccgaaatcctgaagcaagaaattaaggtgttctttgtcaagtacaacgaccccatttatgtgaaactcgagaaactggatattatgatacgactggcatctcaggccaatatagcgcaggtgctagccgaactaaaggagtacgcaactgaagtggacgttgatttcgtgcggaaggccgtcagggccatcggtcggtgtgccatcaaagtggagcagagcgcagagcggtgcgtatcaactttactcgacctcatccagacaaaagtgaactatgttgtccaggaggcaatagtggtgattcgtgatatcttcagaaagtatcccaacaaatatgagagcatcatagccactctgtgcgagaacctggattccttggacgagcctgatgccagggccgccatgatttggatagttggggagtacgcagaacgaatcgacaacgcggatgagctgctggaatctttccttgaaggttttcacgacgaatcaacacaggttcaactcacccttttaactgccattgtgaaactcttcctcaaaaaaccaagcgagacgcaggagctggttcagcaagtgctttcgctagccacccaggattctgacaaccctgatctaagggacagggggtacatttattggcgattgctgagcaccgatccagttacagccaaggaggtggtcctttccgagaaacctttaatatccgaggaaacagatctgatcgaaccaacgctcctggatgaactgatttgccacatcggctccctggcttcagtgtaccacaaacctccgaacgcttttgtcgaggggagtcatgggatacaccgaaagcaccttcctatccaccacggctctacagacgctggggacagccccgttggaacaaccaccgctaccaacctggagcaaccacaagtgataccttcccagggggatcttctgggagacctgttaaacttggatcttggacctcccgtgaatgtaccacaagtatccagcatgcagatgggagcagttgacctccttggtgggggtctggacagcttggttggccagagcttcataccctcttcagttccggcaaccttcgccccctccccaacaccggcagtagtgagcagtggcctaaatgaccttttcgagctaagcaccgggatcgggatggccccaggagggtacgtcgccccaaaggccgtatggttgcccgcagtaaaagccaagggcttggagatctctggaacatttacgcatcgacagggtcacatatacatggaaatgaatttcactaacaaagccctccaacacatgactgatttcgccatccagttcaataaaaactcatttggagtcatcccttctaccccactggccatacacactcccctgatgccaaaccagagcatcgatgtgtccctgcccctgaatacactcggccctgtgatgaagatggaaccgcttaacaacctgcaggtcgcggtgaaaaacaacattgacgttttttactttagttgcctgattccactgaatgtcctctttgtcgaagatggtaagatggaaaggcaagtgttcctggctacatggaaggatattccaaacgagaacgaactccagtttcaaatcaaagaatgtcatctaaacgccgacacggtgagttcgaagcttcagaataacaacgtctacactattgctaagcggaatgtcgaaggtcaggatatgctttatcagagcttgaagctgacaaatgggatctggatcctcgctgagctccgcatccaacctggcaatccaaactacaccctttccctgaaatgcagagcaccagaggtgagccagtacatctaccaggtctacgatagtatcctcaaaaactag

SEQ ID NO: 178126 - DNA, 2856 bp, synthetic construct
  misc_feature 1..2856: note = Description of Artificial Sequence: Synthetic coding sequence
  source 1..2856: mol_type = other DNA
atgaccgacagcaagtacttcaccaccaacaagaagggcgagatcttcgaactgaaagcagagcttaacaatgaaaagaaggagaagaggaaagaagctgtgaagaaggttatcgcagcgatgacagtggggaaagacgtcagctctctcttccccgacgtggtcaactgtatgcaaacggataacctggagctgaagaaattggtctatctgtacctgatgaattatgcaaagtctcagcccgacatggctatcatggccgtgaattcgtttgtcaaagattgcgaggaccctaatcctttgatccgcgcactggctgttagaacaatggggtgcatacgggttgacaaaatcaccgaatacctgtgcgaacctctgcggaaatgtctgaaagatgaggatccatatgtcaggaagacagccgctgtttgcgtcgcaaaactgcatgacattaatgcccagatggtcgaggaccaaggatttctggattccctccgagacctcattgcagactccaaccctatggtggttgcgaatgcagtcgctgccttatctgaaatatcggagtcccaccccaattctaatctactggacctcaatcctcagaatataaataaattgctgaccgctcttaacgaatgcacggagtggggacaaatctttatcctggattgtctgtcgaattataaccctaaggatgaccgggaagctcagagcatctgcgagcgagtgactccccgccttagccatgcaaatagtgcagttgtgctttcagccgttaaggtgctgatgaaattcttagagttacttccaaaagactccgactattacaacatgttgttgaaaaagttagccccacctctggtgaccttactatcaggtgagccagaggtgcagtacgttgctctgaggaatattaacctcatcgtgcagaagaggcctgaaattctcaagcaggagatcaaagtgtttttcgtcaaatacaatgaccctatatatgtgaagctggagaaactggacattatgataaggttagcctctcaagccaacatagcccaggtcttagccgaactcaaggagtatgctaccgaagtggacgtagatttcgtaagaaaggctgtgcgcgcaataggtcgctgtgccattaaggtggaacagtccgcagaacgctgcgtgagtacgctgctggatttaattcagacaaaggtaaactatgtggtgcaggaagcaatcgttgttatacgggatatttttcggaagtaccccaacaaatatgaatctattatcgctaccctttgtgaaaatctggattcccttgatgagccagatgctagggccgccatgatctggattgtgggggaatacgccgagaggatcgacaacgccgatgaactgctggaaagctttcttgaaggctttcacgatgaaagcactcaggttcagctaactctgttaacagccatcgttaagctgttcctgaaaaaaccgagcgaaacccaggaactggttcaacaggtgctaagcttggcgacacaggactcggataatccagacttacgagatcgtggatatatttattggcggctgctttccaccgaccccgtcaccgccaaggaagttgttctgagcgaaaagccgctgatctcagaggagacagatttaatagagcctacactgctcgacgaactcatctgccacattggatccctggcttccgtgtatcacaagcccccaaacgcctttgtggaggggagccatggcattcaccggaaacatctacccattcaccacggttctaccgacgcaggtgactcacccgtgggaaccactaccgccacaaatcttgagcagccccaggtaatcccttcacagggggacttgctgggggatctactgaatctggacctcggaccccctgtcaacgtgccacaggttagttccatgcagatgggagctgtggatcttctaggcggtggccttgactcattgctgggatcggacctggggggtgggatcggcggatcccccgcggtaggccagagtttcattccatcttctgtgccggccacttttgccccttccccaactcccgctgtggtgagcagcggtctgaatgacctgttcgaattatcaaccgggattggcatggcccccggcgggtacgtggccccaaaggcggtctggctcccagccgtcaaagctaagggattggagatatctggaacctttactcataggcaaggccatatatacatggaaatgaacttcactaacaaagctctacagcatatgacggattttgccatccaatttaataagaatagctttggggttattcctagcaccccactggccatacacacccctctaatgcctaaccaaagtatcgatgtgagcttacccctgaacacactgggccccgttatgaagatggagcccttaaataacctgcaggtggccgtgaagaacaatatcgacgttttctactttagctgcctgattccacttaacgtcctgttcgtggaagatgggaaaatggagcggcaagtattcctagccacttggaaagacatccccaacgaaaacgagttgcagtttcagattaaggagtgccacctgaatgctgacacagtgtcatcaaagcttcagaataataacgtatataccattgccaaacgcaatgttgaggggcaggacatgctttatcagtccctcaagctgacaaacggaatatggattctggcagagttaaggatccagccaggcaatcctaattacacactgagtctcaagtgcagagccccggaggtgtcccagtacatatatcaggtttatgatagtatacttaagaactag

SEQ ID NO: 178127 - DNA, 2856 bp, synthetic construct
  misc_feature 1..2856: note = Description of Artificial Sequence: Synthetic coding sequence
  source 1..2856: mol_type = other DNA
atgaccgacagcaagtacttcaccaccaacaagaagggcgagatcttcgagctgaaggctgaacttaacaatgagaagaaagaaaaaaggaaggaagccgtgaagaaggtcatagcggcaatgacagtggggaaagacgtcagctctcttttccccgacgtagtgaattgtatgcagactgacaacctagagctgaagaaactcgtgtacttgtacctcatgaactacgcgaaatcccaaccagacatggccatcatggctgtcaacagtttcgtgaaagattgtgaggaccccaacccgctgatccgggccttagctgtcagaactatgggttgtatccgggtggacaagataacagaatacctgtgcgaacccttgcgcaagtgcctgaaggatgaagacccttacgttcggaaaaccgctgctgtttgcgtcgctaagctgcacgatatcaacgcccagatggtcgaggaccagggctttctcgattccttgcgcgatcttattgccgatagtaatccgatggtggtggccaacgccgtggcagccctcagcgaaatctccgaatcccaccctaattccaatttactggaccttaacccccagaatattaataagctactgacggcgctgaacgaatgcaccgagtggggccagatttttatcctggactgtctcagcaactacaacccgaaggatgacagagaagcccagtctatctgcgagcgggtgacgccgcgcctgtcccacgccaactcggccgttgtgctaagcgctgtgaaagtgttgatgaaatttctggagctgttacctaaagattccgactactacaatatgctcctcaagaagctggctccgccactggtgactctgctgagcggcgagcctgaggtccaatacgtggcccttagaaacataaacttgatcgtacagaaaagacctgaaatcctaaagcaggagatcaaggtgttcttcgtgaagtataatgaccccatatatgtgaagctcgaaaaactggacataatgattcggctggcgtctcaggccaatatagcccaggtgctggctgaacttaaggagtatgcaacggaggtcgacgtggatttcgtgcgcaaggccgtgcgtgctattggtcgttgtgcgatcaaggtggaacagtcagctgaacgctgtgtgtccacgctcctcgatttgatccagaccaaagttaattacgtggttcaggaagcgatcgtcgtaattagggacatatttcgcaagtatcctaataaatacgagagcattattgcaacactctgtgaaaatctggactcactggacgaacctgatgcacgcgcggccatgatatggatcgtgggagagtatgctgaacgaattgataatgccgatgagctcttggagtccttccttgagggcttccacgacgagtccacccaggttcaacttactttattaaccgcgattgttaagctttttctgaagaagccttctgaaacccaggagctcgtacagcaagtgttatcactggcaacccaggactcagataacccagatctacgggaccgtggctatatctattggcgtctgctctccactgaccccgttaccgccaaagaggtcgtgctctcggagaagcccctcatcagtgaagagaccgacctgattgaaccgacactgctagacgagctaatatgtcacatcggaagcttagccagcgtgtaccacaagcccccaaatgcctttgtggagggcagccacggaatccacaggaaacacctgcctatccaccacggatctacggacgccggcgatagccctgtgggtaccacaacagccactaaccttgagcagcctcaggtcattccgagccagggagacttgctcggtgacttgctgaacctggatttgggaccaccagtgaacgtgcctcaggtttcatctatgcagatgggcgctgttgacctgctcggaggaggacttgattctttacttggctccgacctcggaggaggcatcggcggctccccagcggtcggacagagctttatcccaagttctgtcccggccaccttcgccccatccccaactcccgccgtggtttctagtggactaaacgatctgtttgaattgtctacgggcataggaatggcacctggcggttacgtcgcacccaaagctgtgtggctgcctgccgtgaaagctaaagggctagagattagcggaacatttactcacagacagggacacatatatatggaaatgaattttaccaacaaggcgctgcagcatatgaccgattttgctatccagtttaataaaaacagctttggggtgatcccatccacacctcttgccattcacactcctctgatgcccaatcaatctattgacgtctctttgcccctcaataccctcggacccgttatgaaaatggaacccttgaacaatctgcaggtagccgtcaagaacaacattgatgtgttctactttagctgcttgatcccgctgaacgtgctgtttgtggaggatggtaaaatggaaaggcaggtcttcctggccacttggaaagacatccctaatgaaaatgagcttcaatttcagatcaaagaatgccacctaaatgccgataccgtgagcagcaaacttcaaaataataacgtctacaccatcgcaaagagaaacgtagaggggcaagatatgctctatcagagcttaaagctcacgaatggcatatggatcctggccgagctccgtattcaacccgggaatcctaactatactctctccctcaaatgcagggctcccgaggtgagccagtatatctatcaggtctatgactctatcctcaagaactag

SEQ ID NO: 178128 - DNA, 2643 bp, synthetic construct
  misc_feature 1..2643: note = Description of Artificial Sequence: Synthetic coding sequence
  source 1..2643: mol_type = other DNA
atgcagaccgacaacctggagctgaagaagctggtgtacctgtacctgatgaactacgccaagtcccagcccgatatggccattatggccgtaaactccttcgtgaaggactgcgaggacccgaaccctctgatcagagccctggcagtgagaactatgggctgcatacgggtggacaaaataacggagtacctgtgtgagcccctgcgcaagtgtttaaaggatgaagacccctacgttagaaagaccgcagcagtctgcgtagccaagctacatgacatcaacgcacagatggtcgaggaccaaggctttttggattccctgagggatctaatcgccgatagcaaccctatggtagtcgcgaacgcggtcgccgctctgagtgaaattagtgagagccatcccaactccaacctgctcgacctcaatccccaaaacatcaataagttgcttacagctctaaacgaatgtacagaatggggccagatctttatcctcgactgtctcagtaactataaccccaaagatgatcgtgaggcccagtccatctgtgagcgcgtgacaccgaggttgtcccacgcaaactctgccgttgtcctctctgcagtgaaagtactgatgaaatttctggagttactccctaaggatagcgactactacaatatgctgctcaaaaaactcgcgccacccctcgtaaccctcctgtccggtgagcctgaggtacagtacgtagcattgaggaatattaacctgatagtccagaagcggcccgagatattgaagcaggagatcaaagtgttcttcgtgaagtataacgatccgatttacgtaaaactcgaaaagcttgatattatgatcagattagcgagccaggcaaatatcgcgcaggtgttagccgaattaaaggagtatgctactgaggtggacgtggattttgtaaggaaagctgtaagggcaatcgggagatgcgccatcaaagtggagcagtctgctgagcgttgcgtctctactctgttggatctgatacagacaaaagtgaattacgtcgttcaagaagccatagtggtcatcagggatatattcaggaagtaccccaacaagtatgagagcataattgccacactgtgcgagaacctagactccctcgacgaaccagacgcacgggcagccatgatctggattgtcggtgagtacgccgagaggatcgacaatgcagatgaacttttggaatcattccttgaggggtttcatgatgagtctacacaggtgcagctgacattgttgacagccatagtgaagctcttcctgaaaaagcccagtgaaacacaggagctggttcaacaagtgctgtccctcgctacccaggatagtgacaatccagacttgcgcgaccgaggctatatatactggcggcttctctccacagatccagttacagccaaagaggtggtgctgagcgagaaacccctgatctcggaggagacagatttaattgaacccaccctgctggatgagttgatatgccacatcggctcattagcatccgtttatcacaagccccccaatgcctttgtggaaggctctcatgggattcacagaaaacacctgcccattcaccacgggtctacagatgccggtgactcccccgtcggcaccaccacggccaccaacctcgaacagcctcaggtgatccccagccagggcgacttactgggggatctcctgaacctggacctcgggccccctgtcaacgtgccccaggtgtcatccatgcagatgggagccgtcgatctgttaggaggtggcctagactccctggtcggacagtctttcatcccctctagcgtcccagccactttcgcccctagtccaacccctgctgttgtgtcctcagggttgaacgacctgtttgagctctctaccgggattggcatggccccgggcgggtatgtggctccgaaggccgtgtggctgcctgccgtgaaagcaaagggactagagatctccggcacgttcacccacaggcagggccacatctatatggagatgaacttcacgaacaaggcccttcaacatatgactgacttcgctattcagttcaacaagaactcatttggtgtgattccctcgacgcccctcgctatccataccccactgatgccgaaccagtccatagatgtctcattgccacttaatacactggggccggtgatgaagatggagcctctgaacaacctgcaggtcgccgtcaaaaataatattgatgttttctatttctcttgtctcatcccacttaatgtcctattcgtggaagatggcaaaatggagcgacaagtctttctggccacgtggaaggacatcccaaatgaaaacgaacttcaattccagattaaagaatgccatctaaacgccgatacagtgtccagcaaactgcaaaacaacaatgtgtacacgattgccaaacggaatgtggaaggtcaggatatgctgtaccagagccttaagttgacaaacggaatttggattcttgcggaactacgcatccagccgggcaatcccaattacactctgtccctgaagtgtagagctccggaggtcagtcaatacatctatcaagtgtacgacagcatcttaaagaactag

SEQ ID NO: 178129 - DNA, 2067 bp, synthetic construct
  misc_feature 1..2067: note = Description of Artificial Sequence: Synthetic coding sequence
  source 1..2067: mol_type = other DNA
atgaagttcctggagctgctgcccaaggacagcgactactacaacatgttactgaagaagttggccccccctctggttaccctgctctctggagagccggaagttcaatatgtcgctctgcgcaatataaacctgatagtgcagaagagaccagaaatcctgaaacaggaaatcaaggtcttctttgtaaaatacaatgaccccatctatgtcaaacttgaaaagctcgacattatgatccgtctggcttcacaggctaacatcgcgcaagtactggctgagctcaaggaatacgcaactgaggttgatgttgattttgtgcggaaagccgttcgcgccatcgggagatgtgctatcaaagtggaacaaagcgctgaacggtgtgtgtctaccctgcttgacctcattcagaccaaggtgaattatgtggtgcaggaggccattgtggtcataagggacatatttcggaagtatccaaacaagtacgaatccattatcgccacactttgcgaaaatctggactctctggacgaaccagatgcacgcgccgcgatgatttggatcgtgggagaatacgcagagcgtattgacaacgccgatgaattgctcgagtcatttctcgagggtttccatgatgagagcacacaggtacagctgaccctcctgactgcgatcgtaaagttgttcctcaaaaaaccttccgagacacaggagctggtgcagcaggtcctcagcctggccactcaggactcagacaatcctgatctccgggaccgcgggtacatatattggcggttactgagtaccgatccagtgactgcaaaggaggtggtcttgagcgaaaagcccctgatatctgaagagacagatttaattgagcccacactattagatgagctgatctgtcacatcggaagcctcgcctcagtatatcataagccgcctaatgcatttgttgaagggtcccacgggattcacagaaagcacctgcctatccaccacggcagtactgacgccggggactcccccgtcgggacaacaacagctacgaacctggaacagcctcaggtcattcccagccagggcgacctcctcggcgatctgctgaatctcgacctcggtccgccagtcaacgtgcctcaagtgtcttccatgcagatgggggcagtggacttgctgggcggcggcctcgatagtctgctgggttcagacctgggcggtggcatcggcgggtcgccagcagtggggcagagtttcattccatcttctgtgcccgccacctttgcccctagccctacacccgccgtggtgtctagcggcctgaacgatctgttcgagcttagcaccggtattggaatggcccctgggggttacgtagcccctaaagccgtgtggctgccagctgtgaaagcgaaaggcctagagatctctggaacattcacccacagacagggacacatctacatggagatgaacttcaccaacaaagctttacaacacatgactgattttgcaattcagtttaataagaatagtttcggcgtgattccctctacgcctctggcaatccatacccccttgatgcctaaccagtctattgacgttagtctccctctcaacacattgggaccagtgatgaagatggaacctctgaacaatctgcaggtcgctgtgaagaacaatattgacgtgttttatttttcgtgtctgatccctctcaacgtacttttcgtcgaagacgggaagatggagcgccaggtttttctggcaacatggaaagacataccaaacgaaaatgagctgcagtttcagattaaggagtgccatctcaacgccgatacagtttctagtaagctgcagaacaataatgtgtacaccattgcaaagcggaacgtcgagggccaggatatgttataccagtccctgaagctgacaaacggtatctggattttggctgagctgcgaattcagccaggcaacccaaactacactctgtcactgaagtgtagagctcctgaagtcagccagtatatctaccaggtctatgattccatcctgaagaactag

SEQ ID NO: 178130 - DNA, 1308 bp, synthetic construct
  misc_feature 1..1308: note = Description of Artificial Sequence: Synthetic coding sequence
  source 1..1308: mol_type = other DNA
atgatcggcggcctgttcatctacaaccacaagggcgaggtgctgatctcaagggtgtaccgcgacgatataggacggaatgcggtggatgcattcagagtgaacgtcatccacgcccgacagcaggtgaggtctccagtcacaaatatagcacggacatctttcttccacgtgaaaagatccaacatctggcttgccgcagtcaccaagcagaatgtgaatgcagccatggtattcgagtttctttataagatgtgcgacgtcatggcagcctactttgggaagatcagcgaagaaaatatcaagaacaacttcgtactgatttacgagctactcgacgagatcctcgatttcggctatccacagaactccgaaactggggctctgaagacctttataacccagcaggggatcaagtcacagcaccagacgaaagaggaacagagtcaaatcacatcccaagtcacagggcagattggatggcgccgggagggcatcaaataccgcagaaacgagctgttcctggatgtgctcgagtctgttaaccttctgatgtcccctcaaggacaggtgctgtcagcccacgtcagcggccgcgttgtgatgaaaagctacctgagcggaatgcccgagtgcaaatttggcatgaacgacaagatcgtcatcgaaaaacagggcaaagggacagctgatgaaaccagcaaatcaggcaagcagtctatcgccatcgacgattgtacatttcatcaatgtgttagattgtccaaatttgactctgaaagatccatcagctttattccacctgatggcgagttcgagcttatgcgttataggactaccaaagatattatactgccttttcgagtgattcccttggttagagaggttgggcggactaaacttgaagtgaaggtggtgatcaagagtaacttcaagccctctctgctggcacagaaaattgaggtgcgaattcctacaccactgaataccagcggcgttcaggtgatttgtatgaaaggaaaggcgaagtacaaagcatcagaaaatgccattgtgtggaaaattaagcggatggcaggaatgaaagaatcccagatctctgccgaaattgaactgctgcccacaaacgataaaaagaagtgggcccgaccacctataagcatgaatttcgaagtgccctttgccccgtctgggctgaaggtgcggtaccttaaggtctttgaaccgaagctcaattattctgaccacgacgtcattaaatgggtgcgctatatcggacgcagcggtatctatgagactagatgctag

SEQ ID NO: 178131 - DNA, 1302 bp, synthetic construct
  misc_feature 1..1302: note = Description of Artificial Sequence: Synthetic coding sequence
  source 1..1302: mol_type = other DNA
atgatcggcggcctgttcatctacaaccacaagggcgaggtgctgatctctcgtgtgtacagggatgacatcggaaggaatgcagtggatgcttttcgggttaacgtcattcatgccagacaacaagtgcgctctccggtaactaacatcgccaggacctcattttttcatgtcaaaaggtctaatatatggctggctgccgtcacgaagcagaatgtgaatgctgcgatggtgttcgagttcctgtacaagatgtgcgatgtaatggccgcctacttcggcaagatttctgaggagaatattaaaaataattttgtattaatatacgagctgcttgacgagatcctggatttcgggtacccacagaattccgagacaggcgcgttgaagacctttatcacacagcaaggcatcaaatcccagacaaaggaggaacagtcacagattacctcccaggtgacaggtcaaatcgggtggaggcgtgaagggattaaatatcgacggaacgagctgtttctcgacgtgctggaatctgtgaatttactcatgagtcctcaagggcaagtcctgagcgcccatgtctccggccgagtggtgatgaaaagttatttgagtggcatgcccgagtgtaagtttggcatgaacgacaagatcgttattgagaaacagggaaaggggacagccgacgaaacgtctaaatccgggaagcagtctatcgctatcgatgactgtacttttcaccagtgtgtgcgccttagcaaattcgacagcgaacgctccataagtttcatccccccggatggcgagtttgagttaatgcgttaccgcaccactaaggacatcatcctgcccttcagagttattccactagtgcgggaggtgggcagaaccaagctggaggtgaaggttgtcattaagtccaatttcaagccttccctgttagcccagaagatcgaggtccgtatccccacccccctcaacacctccggagttcaagtcatatgcatgaagggcaaggccaagtacaaagcctccgaaaacgcgattgtctggaagatcaagcggatggccgggatgaaggagtcacagattagtgcggagatcgagcttctgcccactaatgataaaaagaagtgggctaggccgcccattagtatgaacttcgaggtgccatttgccccaagtggacttaaggtgcggtacttaaaagtctttgagcccaagctcaactacagcgatcacgatgtgattaaatgggttcggtacatcggtagaagcggaatctatgagacacgctgttag

SEQ ID NO: 178132 - DNA, 1302 bp, synthetic construct
  misc_feature 1..1302: note = Description of Artificial Sequence: Synthetic coding sequence
  source 1..1302: mol_type = other DNA
atgatcggcggcctgttcatctacaaccacaagggcgaggtgctgatcagccgagtgtacagagacgacatcggcagaaatgctgtcgacgcttttcgtgtcaacgtgatacacgcacgacagcaggtcagaagcccagtgacgaatatagcacggacctctttcttccacgtgaaaaggtccaacatctggctggcagcggtaaccaagcagaacgttaatgcagccatggttttcgagttcttgtataaaatgtgtgatgtaatggcagcctacttcggaaagatatccgaggaaaatataaaaaataatttcgtcctcatctacgaattactcgatgaaatcctcgatttcggttacccgcagaatagtgaaactggagcgctgaaaactttcatcacacagcagggcataaagtcacagacgaaagaagagcagtcgcagatcacctcccaggtgaccgggcagattgggtggaggcgcgaagggattaaatataggcgcaacgaattgttcctggacgtcctggagagcgttaacttgttgatgtccccgcagggacaggtcctgagtgcccatgtgagcggccgggtcgtcatgaagtcatacctgtccggtatgccagagtgcaagttcggcatgaacgataagattgtgattgaaaaacaggggaaggggaccgccgatgagacaagtaaaagtggcaaacagtcgatcgccattgatgattgcacattccaccaatgcgttagactttccaaatttgattctgaacgcagtatttccttcattcctcccgacggggagtttgagcttatgaggtacagaaccacaaaggacattatcctgccattccgggttatacccctggtcagagaggtgggcagaacaaaactggaggtgaaggtcgtgatcaagagcaacttcaagccatcgctactcgctcagaagatagaggtgagaatcccgaccccgctgaatacctctggcgtgcaggtgatctgcatgaaagggaaggcaaagtataaggcctccgaaaatgccattgtatggaagattaaaagaatggctggaatgaaagaaagtcagatcagtgcagaaatcgaactgctcccgacaaatgataaaaaaaaatgggcgcggcctcccatctctatgaatttcgaggtaccattcgctccgtcaggacttaaggttcgctaccttaaggtcttcgagcctaaactgaactacagcgatcacgatgtaatcaaatgggtgcgttatattggaaggagcggcatttacgaaacccgctgctag

SEQ ID NO: 178133 - DNA, 342 bp, synthetic construct
  misc_feature 1..342: note = Description of Artificial Sequence: Synthetic coding sequence
  source 1..342: mol_type = other DNA
atgatcggcggcctgttcatctacaaccacaagggcgaggtgctgatcagccgagtgtatcgggacgacattggaaggaatgccgtggacgcatttagggtgaatgtcatacacgcccggcagcaggtgaggtcccccgtcactaacatcgccaggactagcttcttccacgtgaagaggtccaacatctggctggccgctgtgactaagcagaacgtgaatgcagctatggtctttgaattcttatacaagatgtgcgatgttatggccgcctactttggaaagatttccgaggaaaatatcaaaaataacttcgtgctgatctatgaacttctggattag

SEQ ID NO: 178134 - DNA, 1263 bp, synthetic construct
  misc_feature 1..1263: note = Description of Artificial Sequence: Synthetic coding sequence
  source 1..1263: mol_type = other DNA
atgatcggcggcctgttcatctacaaccacaagggcgaggtgctgatcagtcgtgtttatcgagacgatatcggacgtaacgcggttgatgccttccgcgtcaacgtgattcacgcgagacaacaagtccggagccctgtgactaatatatggctagcagcagtgacaaagcagaatgtcaacgcagccatggtatttgagttcctgtacaagatgtgcgacgtgatggcagcctacttcggaaagatctccgaagagaacatcaaaaataactttgttttaatttatgaactactcgatgagattcttgactttgggtaccctcaaaattctgagaccggcgccctgaaaacctttattactcagcaggggattaagagtcaaaccaaagaggagcaatcgcagattacatcccaagtaactggccagataggctggcgacgagaaggcatcaaatacaggagaaatgagctttttctggatgttcttgaatctgttaatctgctaatgtctccccagggtcaggtattgtccgcccatgtaagcgggagagtcgtgatgaaaagctacctatccgggatgcccgaatgcaagttcggcatgaacgacaagattgtcatcgaaaaacagggtaagggtacggcagatgaaacctcaaaatccggtaaacagtctatcgctatagacgattgtacttttcaccagtgcgttcgtctttctaaatttgacagcgaacgcagcataagcttcattcctcctgacggggaattcgaactcatgcgctatcgtacaacaaaggatatcattttgccctttcgggtgattcccctggtgcgggaagtgggacggaccaaattggaagtcaaagtagtgattaaaagcaacttcaaacctagtctgctggctcagaagatcgaagttagaataccaactcccctgaataccagcggagtgcaggtaatctgcatgaaaggtaaggctaaatataaagcgtccgagaacgctattgtgtggaagatcaaacggatggcggggatgaaggagtcccaaattagcgcagaaatcgagttactgccaactaacgacaagaagaaatgggctagaccccctatcagcatgaacttcgaggtaccctttgcacctagcggcctcaaggttaggtacctgaaagtgttcgaaccaaagctgaattatagcgaccatgacgtgattaaatgggtgaggtatatcgggcggtccggtatctatgagacccgatgttag

SEQ ID NO: 178135 - DNA, 1128 bp, synthetic construct
  misc_feature 1..1128: note = Description of Artificial Sequence: Synthetic coding sequence
  source 1..1128: mol_type = other DNA
atgatcggcggcctgttcatctacaaccacaagggcgaggtgctgattagccgagtttatagagacgacataggcagaaacgccgtcgcggcttatttcgggaagatcagtgaagaaaacatcaagaataatttcgtactaatatacgaattgctggacgagatcctggatttcggatatccacagaatagtgagaccggggctctaaaaaccttcatcacacagcaagggattaagtcccagcatcaaaccaaggaggaacagtcccagataaccagccaggtgaccggacagatcggctggcgtcgcgaggggatcaagtacagacgcaatgagctgtttctggatgtgcttgaaagcgtaaatttgctgatgagcccccagggacaggtgctaagcgcccacgtgagtggtcgcgtggtgatgaagagctacttatccggaatgcctgaatgcaaatttggcatgaacgacaaaatcgtgatagaaaagcagggcaaggggacggctgatgagacgtctaaaagcgggaagcagtctatcgcaatcgacgattgcacttttcatcagtgtgtgcggctgtctaagtttgatagcgagcgctctatctccttcatccccccagatggggaattcgaactcatgcgctaccgcaccaccaaggacatcattcttccgttccgggtcattcctctggtgagggaagtgggtcgaactaaactggaagtgaaggtcgtcattaagtcaaacttcaaaccaagcctcctagcccaaaaaattgaagtgcggattccgacccccctgaacacaagcggtgtccaggtcatttgcatgaaggggaaggccaagtacaaagcgagtgagaacgctatcgtatggaagatcaagagaatggctggcatgaaggaaagtcagattagtgcggagattgagttgttgcctaccaatgataaaaagaagtgggcccggcccccaatctcgatgaattttgaagtcccttttgccccgtccggtctcaaagtgagatacctcaaagtgttcgagcccaagctcaattatagcgaccacgacgtaattaagtgggtaagatacatcgggaggtctggcatttatgaaacacgttgttag

SEQ ID NO: 178136 - DNA, 429 bp, synthetic construct
  misc_feature 1..429: note = Description of Artificial Sequence: Synthetic coding sequence
  source 1..429: mol_type = other DNA
atgatccggttcatcctgatccagaaccgggccggcaagacccggttagccaagtggtacatgcaatttgacgacgacgaaaaacagaagctcatcgaagaagtccatgccgtggtcactgttcgggatgctaaacacacgaactttgtggagttcaggaattttaaaataatttatcgcagatacgcgggcttgtatttctgcatttgcgttgacgtgaatgacaacaacctcgcctaccttgaggctattcacaacttcgtggaggtgcttaatgagtacttccacaacgtttgtgagctggatttggtgttcaatttctacaaggtctacaccgtcgtcgacgaaatgtttcttgcgggggaaatccgcgagactagccagaccaaggtcctgaaacagctgctgatgcttcagtctttggagtag

SEQ ID NO: 178137 - DNA, 315 bp, synthetic construct
  misc_feature 1..315: note = Description of Artificial Sequence: Synthetic coding sequence
  source 1..315: mol_type = other DNA
atgatccggttcatcctgatccagaaccgggccggcaagacccggcttgccaagtggtatatgcagtttgacgacgatgagaagcagaagctgatcgaggaggttcatgccgtggtgaccgttcgcgacgctaagcacaccaactttgtggaggtattaaacgagtatttccacaatgtctgtgagctcgatctggtctttaacttctataaagtatatacggtggtcgatgagatgtttctcgccggggaaataagggaaacctcacagacaaaggtgctgaaacaacttctgatgctgcagtccctcgagtag

SEQ ID NO: 178138 - DNA, 3285 bp, synthetic construct
  misc_feature 1..3285: note = Description of Artificial Sequence: Synthetic coding sequence
  source 1..3285: mol_type = other DNA
atgagcagcaacagcttcccctacaacgagcagagcggcggcggcgaggcaactgagctcggtcaagaggcgacgtccaccatctccccctcgggcgcattcggcttatttagttccgatctcaaaaagaatgaggatctgaagcagatgctagaaagtaacaaagactctgcgaagctggatgccatgaagcgaattgtgggaatgatagccaagggaaagaatgcgtctgaactgttcccggctgtcgtcaaaaatgttgctagcaaaaatatcgagattaagaaacttgtctatgtctatctggttagatacgccgaagagcagcaggaccttgcactcctaagtatctccacttttcagagagccctcaaagatcccaaccaactcattcgggcatctgctctgagagtgctgagttctattagggtgccaattatcgttccaataatgatgttagccataaaggaggcctctgcagaccttagtccttatgtgaggaagaacgcagcacacgcaatccagaagctctatagcctcgatcccgaacagaaggaaatgttaatcgaggtgatcgaaaaacttttgaaggacaagtcaaccctcgtcgctggaagcgtagttatggcattcgaggaagtctgccccgacaggattgacctgatccacaaaaattatcggaagctctgcaacttgctggtcgatgtggaggaatggggacaggtggtaattattcatatgctgactagatacgctcggacccaatttgtttcgccttggaaagagggtgacgagttggaagacaatggcaaaaatttctacgagtccgatgacgaccagaaagaaaagaccgacaagaagaaaaaaccttatactatggatcccgatcatagactacttataaggaataccaagccactgctgcagtctcggaatgcagcagtcgtgatggcggtggcccagttatattggcacatatccccgaagagtgaagctggcatcatttcaaagtcactagtacggttattgcgcagtaatagagaagtccaatatattgtgttgcagaacatcgcaaccatgagcattcagcgcaaggggatgttcgaaccatacttgaagtctttctacgtccgttcaaccgaccccacgatgatcaagactctcaaactcgaaatccttactaatttggccaatgaggccaatatttctacccttctcagagagttccaaacatatgttaaaagtcaggataagcagtttgcagccgctaccattcaaacaattggacggtgcgctacaaatatcctcgaggttacagacacttgcctgaacggcctggtctgcctcctctctaaccgggatgaaatagtcgtcgctgaaagcgtggtcgtgattaagaaactgctgcagatgcagccggcgcagcacggagagataatcaaacacatggctaagctgctagattcaatcacagttccagtggcccgcgccagcattctgtggcttattggtgaaaattgcgagagagtacccaagatagccccagacgtgctgcggaagatggctaaaagttttacatcagaggacgaccttgtcaaattacagatactgaatctcggggctaaactgtatctgaccaacagcaagcagaccaagctactgacacaatacatcctgaatcttggcaaatatgaccagaattatgacataagagaccgcacaaggtttatacgccagctgatagtgcccaacgtgaagagcggtgccttgagcaaatacgccaagaaaattttcttagctcagaaaccagcacctctcttagaatctccttttaaagatcgcgaccatttccagcttggaaccctgtcgcacacactgaacataaaggccactgggtatctcgagctatcaaattggcctgaggttgctccagatccaagcgtgcggaatgttgaggtcatagagctggctaaagaatggaccccagcaggaaaggctaagcaggaaaatagcgctaagaaattttacagtgagagcgaggaggaggaagactcaagcgactcgtcatcagattctgaatctgagagcggcagcgagtcaggggaacagggggagagcggagaagaaggcgattcaaatgaggacagctccgaagattcttcttctgagcaagacagtgagagtggacgagagtccggactcgagaataaacggactgctaaacgtaacagcaaggcaaagggcaagtccgattcagaggacggtgagaaggaaaacgaaaagtccaaaacctcagattcctctaacgacgagtcctcctctatagaggactcatcatctgacagcgaatcagagagcgagcctgaatctgaaagcgagagccggcgcgtgaccaaggagaaagaaaaaaaaactaaacaagatcgtacacccctgactaaggacgttagcctactggatttagacgacttcaaccctgtctccacccctgtggccttgccaactccagccctctcccccagcctcatggccgatcttgaagggttacaccttagcacaagttccagtgtgatctcagtttctaccccagcctttgtgcccacgaaaacccatgtgctgttacacagaatgagcggaaagggactggcagctcattatttctttccccggcagccgtgcatatttggcgacaagatggtttctatccagattactctgaataacaccacagacagaaagattgagaacattcacatcggggagaaaaaattgccaatcggcatgaaaatgcacgtattcaaccctatcgactctctagaaccggaggggtcaatcaccgtttccatgggcatagacttttgtgactctacccaaactgccagtttccaactatgtacaaaggacgactgttttaatgtaaatattcagccccctgtaggcgagctcttgctccccgtcgccatgtctgagaaggatttcaaaaaggaacagggcgtgcttactgggatgaacgagacttcagcagtgattattgctgctccccagaacttcacaccaagtgtcatttttcagaaggtcgtcaatgtggctaacgttggggctgtaccctctgggcaggacaacattcatagattcgccgctaagacagtccattcgggcagccttatgctcgtgacggtggagctcaaggaagggtcgacagcgcagctgatcataaacaccgagaaaactgtaatcggcagcgtcctgctgcgcgaactcaagccagtgctgtctcaagggtag

SEQ ID NO: 178139 - DNA, 1698 bp, synthetic construct
  misc_feature 1..1698: note = Description of Artificial Sequence: Synthetic coding sequence
  source 1..1698: mol_type = other DNA
atgagcagcaacagcttcccctacaacgagcagagcggcggcggcgaggccactgaactggggcaggaagcaacctcaacgatttccccaagtggcgcatttgggctgttcagttccgacctgaagaagaatgaggacctcaagcaaatgctggagtctaataaggacagcgccattaaggaggctagcgccgatctgagcccttatgtacgaaagaatgctgcccacgccatccagaagctatattccttagaccccgagcagaaggagatgttgatagaggtcatagagaaattactgaaggataagtctacactggtggccggctccgtggtcatggctttcgaagaagtctgtcccgacagaatcgacttaatccacaagaattacaggaagttgtgcaacctactggtggacgtggaggaatggggacaggtggtgattatacatatgctcactcgatacgccagaacccagttcgtaagtccatggaaagagggggacgagctggaagacaatggaaaaaatttttacgaatcagacgacgatcaaaaggaaaaaacagataagaagaaaaagccctacacaatggatcctgatcatcgcctactcatccgcaataccaagcccctgcttcaaagcaggaacgccgccgttgtcatggcggtggctcaactgtactggcacatttcgcccaagagtgaggcgggcatcatcagtaaaagtctcgttaggctcttaaggagcaatagagaggtacaatatattgtcctgcagaatatagcaaccatgagcatacagcggaagggaatgttcgaaccctaccttaagagtttttacgtaaggagtactgatcccacaatgataaagacactcaaactagagattcttacaaatttagctaacgaggccaacatctcaacactgttacgggaatttcagacctacgtgaaatctcaggataagcagtttgccgctgctactatccagacaatcggtagatgcgccacaaatatactggaggttacagatacctgcctgaatggactggtctgcctgttgagtaatagggacgagatagtcgtcgctgagtcggtggtggtgatcaaaaagttgttacaaatgcagcctgcccagcacggagaaatcatcaaacatatggccaagcttctagactcaattaccgtccctgttgctcgggccagtattctatggctgattggggagaattgcgagcgtgtgcctaaaatcgcccccgacgtgctgagaaagatggcaaagtcgtttacctccgaggatgacctggttaagttgcagatcctaaatttgggggcgaaattatatctgacgaatagcaagcagactaagttactgacacagtatatcctgaatctagggaagtacgatcaaaactatgacattcgcgacagaacgcgcttcattcggcagttgatcgttcccaacgtgaagtctggggcactttccaaatatgccaagaagatcttcctagcccaaaagcctgcgcccttactggaatcaccattcaaggacagagatcactttcagcttggcacactcagccacactctcaatatcaaagccacaggttacctagagctgagtaattggccggaagttgcaccggatccctccgtcagaaatgtagaggtaattgagctcgtagtgctgagtgagtag

SEQ ID NO: 178140 - DNA, 2403 bp, synthetic construct
  misc_feature 1..2403: note = Description of Artificial Sequence: Synthetic coding sequence
  source 1..2403: mol_type = other DNA
atgagcagcaacagcttcccctacaacgagcagagcggcggcggcgaggctacggaactgggccaggaggcaactagtactatctcgccttctggggccttcggcttatttagcagcgacctcaagaaaaatgaggatctgaagcagatgttggagtccaataaagactcggcaaagctggatgcgatgaagcgcattgtcgggatgattgccaaggggaagaatgcctccgagctctttcctgccgtggtgaagaatgtcgcctcaaaaaacattgaaattaagaagctggtctatgtctacttggttcgatatgctgaggagcagcaggacctggcactactttctatcagtaccttccagagggctttaaaagaccccaatcagctgattcgcgcaagtgcactgcgggttctctccagcatccgggtgcccatcatcgtgcccatcatgatgctcgcaatcaaagaagcttcggccgacctttcgccatatgtccgtaaaaatgccgcacacgctatccaaaaactttattctctcgatcctgagcagaaagaaatgctgatcgaggtaatagagaagctgctcaaggacaaaagcacactggttgctggcagcgttgtgatggcctttgaggaagtatgcccagaccgcatcgatttaatccataaaaactataggaaactgtgcaatctgctagtcgacgtcgaagaatggggtcaggtcgtaatcatacatatgctaacccgctacgccaggacacaattcgtgtcaccttggaaggaaggtgacgagttagaggacaacggcaagaatttttacgaatccgacgacgatcagaaggaaaaaaccgacaagaaaaaaaaaccttataccatggaccccgaccaccggctcctgattagaaatacaaaaccgctcctccagtctagaaacgcggccgtcgtaatggcagtggcacagctgtattggcacatctcccccaagtccgaggccggaataatctctaagtccttggtacggctcttgcgctctaacagagaggttcagtatattgtgctgcaaaatatcgcaactatgtctatccaacggaagggcatgttcgagccatatctgaagtctttctacgtgcgttcaaccgatccgactatgatcaagacattaaagctcgaaatcctcaccaacctagctaacgaagccaacatcagcactctgctgcgtgagttccagacctacgtcaaaagccaggacaagcagtttgcagccgccaccatccagaccattggccggtgcgccaccaacatcttagaagtgaccgatacatgcctaaatggactggtttgcctgctctcgaacagggacgagattgtggttgctgagagcgtggttgtcatcaagaaactgctccagatgcagcccgctcagcacggagagattattaaacatatggctaaattgctggactctattactgtgccagtggctcgcgcctctatactgtggttgattggagaaaactgtgagagggtaccgaaaatagcaccagacgtgttgcggaaaatggcaaagtcatttactagtgaagatgacctggttaaactgcaaattttaaacctcggcgccaagttatacctgacaaactctaagcaaacaaagctgctgacccaatacattctgaacctcggaaaatatgatcaaaattacgacatcagagaccgcacaaggtttattaggcagttaattgtccccaatgtgaagtcgggagcactgagcaaatatgccaaaaagattttcctggcacaaaagcccgccccacttcttgagagtccatttaaggatcgggatcattttcagctggggactctctcgcatactctgaacattaaggctacaggctacctggagctatcgaactggcctgaggtggctccagacccatccgtgcgtaacgtggaggtcatagagcttgctaaagagtggacacccgccgggaaagccaaacaagagaacagtgcaaagaagttctacagtgagagcgaagaagaggaagactcctccgacagctcttctgactccgagagcgaatctggatctgagagcggcgagcagggagaatcaggcgaggagggtgactctaacgaagacagcagtgaggattcatcgagcgaacaagattccgagtctggccgtgagtccgggcttgagaacaaacgaacagcaaaacggaatagcaaggccaaagggaagagtgactctgaagatggcgagaaggaaaacgaaaagtccaaaacatccgacagttctaatgatgagagttctagcattgaagattccagcagtgactcagaatccgaaagcgaacccgaatccgagagcgaaagtcgaagagtcaccaaagagtag

SEQ ID NO: 178141 - DNA, 582 bp, synthetic construct
  misc_feature 1..582: note = Description of Artificial Sequence: Synthetic coding sequence
  source 1..582: mol_type = other DNA
atgatcaaggccatcctgatcttcaacaaccacggcaagccccggctctcgaagttttatcagccctattcggaggacacccagcagcagattatcagagaaacttttcatctggtttccaaacgtgatgaaaacgtgtgcaatttcctcgaagggggcctgttgatcggcggttcagacaataaattgatttaccggcactacgctacactgtacttcgtgttctgcgttgatagtagcgagtcagaactgggcattctggatctgatccaggtgttcgtagagacactagacaagtgctttgagaatgtttgtgagctggatcttatcttccatgttgataaagttcacaatatcttggcagagatggtgatgggcggtatggtcctggaaacaaacatgaatgagatcgtgactcagatcgacgctcagaacaagctggaaaagagcgaagccggtctggctggggctcctgcgcgcgccgtgtctgctgtgaagaacatgaatcttccagagatccctagaaacattaatatcggggatataagtattaaagtgcctaatcttccgtcattcaaatag

SEQ ID NO: 178142 - DNA, 450 bp, synthetic construct
  misc_feature 1..450: note = Description of Artificial Sequence: Synthetic coding sequence
  source 1..450: mol_type = other DNA
atgatcaagttcttcctgatggtgaacaagcagggccagacccggctctccaaatattacgaacacgtggacattaataagcggacactgcttgagaccgaggtgattaagagctgtctctccaggtcgaatgaacagtgctcattcatcgaatacaaagacttcaagctgatataccgccagtatgctgccctgttcatcgtggtcggcgtcaatgataccgagaacgaaatggctatctatgagtttatccacaattttgtagaagtccttgatgagtacttctctcgcgtgtccgaattggatgtatctttctttaacacagtcttccacagtacttggcagatgcacagtggcccatatcagaccaggagttgttcggtgacacaggccggagtgcaaagatgcgaccacggttcactgcaccccggatcacctgggctgaaatag

SEQ ID NO: 178143 - DNA, 408 bp, synthetic construct
  misc_feature 1..408: note = Description of Artificial Sequence: Synthetic coding sequence
  source 1..408: mol_type = other DNA
atgatcaagttcttcctgatggtgaacaagcagggccagacccggttgtctaaatattatgaacacgtggatatcaataaacggacactgctagagacagaggttattaagtcatgcctttcgagatcaaatgaacagtgttcatttatcgaatacaaagatttcaagctgatttaccggcagtatgcagcactattcatagtggtcggagtgaatgataccgagaatgaaatggcgatctatgaatttattcacaattttgtggaagtgttagacgagtatttctctcgtgtggaacctattgacgagctccctaagatctgttctgccctggagcctcagcaaacatgtttctcacctgattcgtcatctttcaaaggcgccgctagtacgacacccatttactag

SEQ ID NO: 178144 - DNA, 2220 bp, synthetic construct
  misc_feature 1..2220: note = Description of Artificial Sequence: Synthetic coding sequence
  source 1..2220: mol_type = other DNA
atgccctacctgggcagcgaggacgtggtgaaggagctgaagaaggccttgtgtaacccccacatccaggctgaccgcctcaggtaccgcaacgtaattcagagagttattaggtacatgactcagggcctggacatgtctggcgtgtttatggagatggtgaaagctagcgccaccgtggacatcgttcaaaaaaagttggtttatctctacatgtgtacgtatgcgccccttaaacctgatcttgctctccttgccattaataccctttgtaaagattgctccgaccctaaccctatggtccgcggccttgccctgcgatcgatgtgtagcctgcgtatgcccggggtgcaggagtatatccagcagcccattctgaacggactccgcgacaaagcctcttatgtaagaagggtggcggtcttggggtgcgctaagatgcacaatctgcatggcgactccgaggtcgatggggccttggtaaacgagctgtatagtttgctgagggaccaggaccctatcgtcgtcgtgaactgcttgcgctctcttgaagagatcctaaagcaggagggtggggttgtgattaataaacccatcgcgcatcacctgctaaaccggatgagtaaacttgaccaatggggccaggccgaggtgttgaattttctgctaaggtatcagccgcgctccgaggaggaactatttgatatactgaacctcctggactccttcttaaaaagtagttcgccaggcgtggttatgggggcaactaagctgttcctaatactggccaaaatgtttccacacgtgcaaaccgacgtcttggtgagagtaaagggtcctctcctggcagcctgttccagcgagagcagggagctctgtttcgttgcgctctgtcatgtaaggcaaatccttcattctctccccggccatttctcttcccattacaaaaagtttttttgctcatattcggaacctcactacatcaagctccagaaggtagaggtgctctgcgagctcgtgaatgatgaaaatgtccagcaggtcctggaggaattgagaggctactgcactgatgtgagcgcagactttgctcaggctgccatcttcgctattggcggcatcgcaaggacctacaccgaccaatgcgtccagattctgaccgaactgctgggtttacggcaggagcacatcacaacagtggtggtgcagacatttcgagatctggtgtggctttgtccccagtgtaccgaggcagtttgccaggcactgcctggctgcgaagagaacatacaagatagcgaggggaagcaggccctcatctggttgcttggcgtgcatggggaacggattcccaatgccccctacgtcctagaagacttcgtggagaacgttaaatccgaaaccttccctgctgtgaagatggaactcttgactgcgttgttgcgcctcttcttgtctaggccagctgaatgtcaggacatgctcggcaggttactgtattattgcatcgaggaggagaaggacatggccgtgcgagaccggggcctgttttactatagacttctactggttgggatcgatgaggtgaaaaggatactttgttcccccaaaagcgacccaactctggggctgctggaagatcccgctgaacgcccagtgaactcatgggcctctgacttcaatacgctggtgcctgtatacggcaaggcccattgggcaaccatctctaagtgtcaaggggctgagaggtgtgatccagaacttccaaagacaagtagcttcgctgcgtccggcccgctgatcccagaggagaataaggagagagtccaggagctgcccgactcaggagctctcatgttggtgcccaatcggcagctgaccgcggactacttcgagaagacctggctgtctctaaaagtggctcatcagcaggtgctgccctggagaggcgagtttcaccctgatactctgcaaatggcccttcaggtcgtcaatatccagacaatcgctatgtcacgggccggcagtcgcccatggaaagcatatctgtccgcacaggatgacaccggctgtcttttcctaaccgagctgctactggaacctggaaattcagagatgcagatctcagtgaagcaaaacgaagcccgaacagagactctgaattcgttcatctcggttttggagactgtgatcgggactatagaagagatcaaaagctag

SEQ ID NO: 178145 - DNA, 891 bp, synthetic construct
  misc_feature 1..891: note = Description of Artificial Sequence: Synthetic coding sequence
  source 1..891: mol_type = other DNA
atgccctacctgggcagcgaggacgtggtgaaggagctgaagaaggctctgtgcaaccctcacattcaggctgatcgcctgagatacagaaatgtgattcaaagggtaatcaggatgccaggcgtgcaagaatacatccaacaaccaatcctaaacggccttcgggacaaagcatcttacgtgcgtcgcgtagccgttctgggctgcgccaagatgcacaatctccacggcgatagcgaggtggatggagctctggtcaatgaactatacagcctgctccgggatcaggaccccatcgtggtggtgaattgcctccgttctctggaggaaattctgaaacaggagggtggggtggtgatcaacaagccaattgcccaccacttactgaaccgcatgagtaagttggaccaatggggtcaggccgaggtgcttaattttctgctccgataccaacctaggagtgaagaggagctgttcgatattctgaatctcctagattcgtttctgaagagcagcagtccaggggtggttatgggggccactaagcttttcctcatactcgccaaaatgtttccccatgtacagaccgacgtgctggttagagttaaaggtcctctactagcggcttgctccagtgaatctcgggagctgtgtttcgtggccctgtgtcatgtaaggcagatcttgcatagtctacctggccatttttccagtcattacaagaaattcttctgcagctattccgaaccccactacataaaattgcagaaagtggaagtgctgtgtgaactcgttaatgacgagaacgtgcagcaagtgctggaggagctccgggggtattgcaccgacgtgagcgctgacttcgcccaggccgctatatttgccatatag

SEQ ID NO: 178146 - DNA, 909 bp, synthetic construct
  misc_feature 1..909: note = Description of Artificial Sequence: Synthetic coding sequence
  source 1..909: mol_type = other DNA
atgccctacctgggcagcgaggacgtggtgaaggagctgaagaaggcactgtgcaacccacacatccaagccgaccggctcagatatcgcaacgtgatccagcgggtgatacgctacatgactcaaggattggatatgtctggtgtgttcatggagatggtcaaagcttccgctactgtggatatcgttcagaagaagcttgtttatctgtacatgtgcacatatgcgcctcttaaaccagacctggccctcctggctatcaacaccctgtgcaaagattgctctgatcccaaccctatggtccgcggactggcactgcgaagcatgtgtagtcttaggatgtctaaactcgatcaatggggccaggccgaggtactgaatttcctcctgcgctatcagcctcgctctgaggaggaattgttcgatatcctcaatctcctggactcttttctaaagagctcctctccaggggttgtcatgggggctaccaaactcttccttatcctggcgaagatgttcccacatgtccaaaccgatgttctcgtcagagtcaaagggccattgttagcggcatgcagctcagaaagtcgtgaactttgtttcgttgccctgtgccacgtgcgacagattctccacagtttgcctggccacttcagttcccattataaaaaatttttctgtagctacagcgagcctcactatattaagctgcaaaaagtggaggtcctctgtgaactggtaaacgatgaaaatgttcagcaggtgctggaggagctgcgaggctactgcacggacgtctccgccgactttgcccaagctgccatcttcgccattggtcgctgcctacttctcttcctgcttgaaaacctagatcagcccgccagaaagctgtggctggaagagccatag

SEQ ID NO: 178147 - DNA, 1716 bp, synthetic construct
  misc_feature 1..1716: note = Description of Artificial Sequence: Synthetic coding sequence
  source 1..1716: mol_type = other DNA
atgccctacctgggcagcgaggacgtggtgaaggagctgaagaaggccctttgtaatccacacattcaagccgaccgattgagataccgcaacgtgatacagagggtgattaggatgtccaagttggatcagtggggccaagctgaggtgctaaacttcctgctgcgatatcagcctcggtctgaggaagagctcttcgacattctgaacttactggactccttcctgaaaagttcgtccccaggcgtggtgatgggcgccaccaagctgttcctcattcttgccaaaatgttcccccacgtgcagaccgatgtacttgtgagagttaagggccccctcctggctgcttgctcctccgagtcccgggaactgtgttttgtcgcattatgtcatgtcagacagatactgcacagtctgcctgggcacttctcctctcattacaaaaaattcttctgcagctattctgagccccactatatcaaactgcagaaggttgaggtcctttgcgaactcgtgaatgacgagaatgttcagcaggttttggaggaactgagggggtattgtactgacgtgagcgcagatttcgcccaggcagccatttttgccatcggggggattgcacgaacgtacactgaccaatgcgtacaaatcctcaccgagctgctgggtctgaggcaggagcacatcacaacagtggtggtgcagaccttcagagacttggtatggttgtgcccacagtgtaccgaggcggtctgtcaggccctgcctgggtgcgaggaaaatatccaggactctgaggggaagcaggcactgatttggcttttgggagtccatggggagaggataccaaatgcgccgtacgtcttagaggattttgtggagaatgtaaagtcagagaccttccctgccgtgaaaatggagctgcttactgccctgcttcggctcttcctctcccgccctgcagaatgccaggacatgctggggcgacttctctattactgcatcgaagaggagaaagatatggcagttagagaccggggactgttttattaccgcctcctccttgtgggtatagatgaggtcaagcggatcctgtgtagcccgaagagtgacccgactttgggactgctggaggatcccgcagagcgtcccgtgaatagctgggcaagcgatttcaacactctggtgcccgtctacggtaaggcacactgggcaacgatatccaaatgtcagggcgccgaacgatgcgatcccgaacttcctaaaacttcctctttcgccgccagtggacccctcatccctgaggaaaacaaagagagagtgcaggagctgccagattcaggggccctgatgctcgttcccaatagacagctcactgcggactattttgagaaaacttggctgtctctgaaagtcgcccatcagcaagtgttaccttggagaggggagttccacccggacacactccagatggccctgcaggtggtgaacatacagacgatcgccatgagcagagcgggatccagaccatggaaagcatatctttccgcccaggacgatacgggatgcctgtttcttaccgaactcttgcttgagcccggtaattcagagatgcagataagtgtcaagcaaaatgaggcacgcaccgagactctgaattcttttatttccgtcttggaaaccgtgatcggtacaattgaggagataaaatcctag

SEQ ID NO: 178148 - DNA, 2220 bp, synthetic construct
  misc_feature 1..2220: note = Description of Artificial Sequence: Synthetic coding sequence
  source 1..2220: mol_type = other DNA
atgccctacctgggcagcgaggacgtggtgaaggagctgaagaaggctctgtgtaaccctcatatccaggcagacaggctgaggtatagaaatgttatccagcgcgtgattcggtatatgacccaaggtctggatatgagcggggtgttcatggagatggtgaaggcctcagcaaccgtggacattgttcagaagaagctcgtgtacctctatatgtgcacctatgccccactgaaaccagaccttgcgctgcttgccattaatacactgtgtaaagactgctctgatccaaatccaatggtccgaggcttggcattaaggagcatgtgtagcctccgtatgcctggcgtccaggagtacattcagcagcccatcctgaacgggctacgagataaggcatcctacgttcgccgagtagctgttctaggttgcgctaagatgcataatctgcacggagatagtgaggttgacggggctctggtgaacgaactgtactccttactgagagatcaagacccaatagtggtcgtgaattgtttaaggagccttgaggaaatactgaaacaggagggcggtgtggtgatcaataagcctattgctcaccatctgctgaaccggatgtcgaagttggaccaatgggggcaggccgaagtacttaatttcctcctgagatatcagcctagaagcgaggaggaactcttcgacattttgaatctgctagattcattcctgaaatcttcgtcacccggggttgtgatgggggcaaccaagctttttctgatcctggctaaaatgtttcctcacgtgcaaacagatgtcctggtcagggtgaaaggccctttgttggcagcatgtagcagcgaatcccgcgaactttgcttcgtagctctgtgccatgtcagacaaatactgcactctttaccaggacatttctcctcccactacaagaagttcttctgttcctactctgaaccgcactacattaaactacagaaagtggaggtgctgtgcgaattagttaatgacgagaacgttcagcaggttctcgaagagttgcggggctactgtactgacgtgtccgcggactttgctcaagcagccattttcgccataggagggatcgcacggacctataccgatcaatgcgtgcagattctaaccgaactgctcggtttaaggcaagaacacataactactgtggtcgtgcaaaccttcagggatctagtgtggctgtgtccccagtgcaccgaggccgtctgtcaggctctgcccggatgtgaggagaacatccaggactcggagggaaagcaagccctaatttggctgctcggagtgcacggagaacgtatacccaacgccccttatgtgctcgaggacttcgtcgagaacgtgaagtctgagacgtttccagccgtgaaaatggagctgctcaccgcactgctgcggttgttcctgagtaggccggcggagtgccaggatatgcttggtcgcttgttgtattactgcatcgaggaagagaaggacatggccgttcgcgaccgaggactgttctattatcggctgctgctggtcggtatcgacgaagtgaagcggattctatgctcaccaaaatcagatcctacacttggcctgctcgaagacccagctgagagacctgtaaacagttgggccagcgattttaacacgctggtccccgtctatggaaaagcgcactgggcgaccatttctaagtgtcagggagcagaaaggtgcgaccctgagctacccaaaacaagttccttcgccgcatccggcccccttatccctgaggaaaataaagaacgagtccaggaacttccagatagtggagccctcatgcttgttcccaataggcagctgactgctgactatttcgagaaaacatggttaagtctgaaagtcgcacatcaacaagtgctgccctggagaggcgaatttcatcctgacactctgcagatggctcttcaggtcgtgaatattcagacgatcgctatgtcacgcgcaggctcccgaccatggaaagcttacttgtctgcccaggacgacactgggtgtttgttcctgaccgagctgctgctggagcctggcaacagcgagatgcagatatccgtgaaacagaatgaggcgcggacagaaaccctgaactcgttcatttccgtgctggaaactgtgatagggaccatagaagaaatcaaaagctag

SEQ ID NO: 178149 - DNA, 789 bp, synthetic construct
  misc_feature 1..789: note = Description of Artificial Sequence: Synthetic coding sequence
  source 1..789: mol_type = other DNA
atgccctacctgggcagcgaggacgtggtgaaggagctgaagaaggcgctgtgcaaccctcatatacaggcagaccggcttcggtaccggaatgtgatccagcgggtgattcggtatatgacacagggcttggatatgagcggagtgtttatggagatggttaaagcaagcgccaccgtggacatcgtgcagaaaaagctcgtgtacctctatatgtgtacatacgcacccctgaagcccgacctggcccttctcgccataaatacactgtgcaaagattgttcagatccgaatcctatggtgcgaggcctggctcttcgaagcatgtgttcacttcgtatgcccggcgttcaggagtatattcagcagcccatcctgaatggtctgagggacaaagcctcctacgtgcgaagagtggcagtcttaggctgtgccaagatgcacaacctgcatggtgactctgaggtagatggagcacttgtcaatgaactgtattccctcctgcgagatcaggaccccattgtggtagtgaattgtttgcgttctctggaagagattcttaagcaagaagggggagtggttatcaacaaacccattgcgcaccatttgctcaatagaatgtctaagcttgatcagtggggccaggccgaggtgctgaactttttgctgaggtaccagccccgttccgaagaagagctgtttgacatcctgaatctcctcgattccttcctaaaaagcagttcccctggcgtcgtgatgggagccaccaaactcttcctcatactctag

SEQ ID NO: 178150 - DNA, 528 bp, synthetic construct
  misc_feature 1..528: note = Description of Artificial Sequence: Synthetic coding sequence
  source 1..528: mol_type = other DNA
atgccctacctgggcagcgaggacgtggtgaaggagctgaagaaggccctgtgcaacccacacattcaagcagacagactgcgatataggaacgtgattcaaagggtaattcgcatgtcaaaactcgaccagtggggccaggccgaggtcctgaatttcctattgaggtaccaaccacgaagcgaggaggagctttttgacattcttaacctgttggattcttttctcaaaagttctagtcctggggtagtcatgggagccactaagctgttcctgatccttgctaagatgttcccacatgtgcaaaccgatgtgttggtccgagtaaaggggccacttctggctgcctgcagttccgagtctcgggagctctgctttgtggccctgtgccacgtgaggcagatcttacactcattgccagggcactttagtagccattacaaaaagttcttttgctcgtactctgagccccactacatcaaactgcagaaagtcgaggttttatgcgagttggtgaacgatgaatag

SEQ ID NO: 178151 - DNA, 3414 bp, synthetic construct
  misc_feature 1..3414: note = Description of Artificial Sequence: Synthetic coding sequence
  source 1..3414: mol_type = other DNA
atgagcgacatcgtggagaagaccctgaccgccctgcccggcctgttcctgcagaatcaacctggcggggggccagctgcagccaaagcaagctttagctctcggctgggttctttggtgagaggcatcaccgctttgacatctaaacatgaggaagaaaagctcattcagcaggagttgagctctctgaaggcaaccgtgtccgcccccaccaccacgctaaaaatgatgaaagaatgcatggtgaggttgatctattgtgagatgctgggatatgacgcatctttcgggtatatccacgcaataaaattggctcaacaaggaaacttgttggagaagagggtgggctacctggcagtctccctgtttctgcacgagtcccatgaattactgctcttactggtgaacaccgtcgtgaaggatttgcaatctacgaatctggtggaggtttgtatggcccttacagtcgtgagccagattttcccttgtgaaatgattccagctgtgctgccactcattgaggacaagctgcagcactccaaagagattgttcgaagaaaggcggtccttgctctgtataagttccatcttatcgcacccaaccaggtgcaacacattcacatcaagttccgaaaagcactgtgtgatagggacgttggcgtcatggccgcttcccttcatatctatctgcggatgataaaggagaacagctccgggtacaaggatctgactgggtccttcgtcacgattctgaaacaggtggtgggcggcaagctccctgtggaatttaactatcactctgtccctgcaccttggctgcagatccaacttctgcggattctagggctgctgggtaaggatgatcagcgcacaagcgagttgatgtacgatgtgctggatgaaagcctcaggcgagcagaactgaaccataatgtcacttacgccatcttattcgagtgcgtgcacaccgtgtatagcatctacccaaagtccgagctcctggagaaggccgctaaatgcattggaaaattcgtcctgagccctaaaatcaacctcaaatatctcggactgaaggctctcacttacgttattcaacaggaccctaccctcgccctgcaacaccagatgacgataattgagtgtttggaccacccggacccgatcatcaaacgggagacccttgagctactctatcggatcaccaacgcccaaaacattacagtgattgtacaaaagatgctggagtacctgcaccaaagtaaggaagagtacgttattgtgaaccttgtgggcaaaatcgccgagttggccgagaagtatgcccccgacaacgcttggtttatccagacaatgaatgccgttttctcagtcggcggggacgttatgcaccctgacatccctaacaacttcctcagactgctcgcagaagggtttgacgatgagactgaggaccagcagctgcgtctgtacgccgtgcagtcttacctgaccctactcgacatggagaatgtgttttatcctcaacggttcctgcaggttatgtcttgggttcttggtgagtattcttacctcctggataaggagacacctgaagaggtgattgctaaactgtacaaattgttgatgaacgattctgttagcagcgagactaaagcttggctcattgcagccgtgaccaaactaacctctcaagctcactccagcaatacagtggagcgactgattcacgagtttacaatttcgcttgatacctgcatgaggcaacacgctttcgaactcaagcacctgcacgagaacgtggagctgatgaagtccctcctgcccgtggatcggagctgtgaagacctggtcgtggatgctagcctgtcattcctggacggcttcgtcgctgaaggattgagccagggggccgccccctataaacccccccatcagaggcaggaggagaagctctcacaagagaaagtgctgaactttgaaccatatggcctctctttctcctcttctggttttaccggccggcaatctccagccggcatcagcctgggctctgacgtgtctggtaacagtgccgaaaccggccttaaggagactaactctttgaagcttgaggggattaagaagctgtgggggaaagagggctacctccctaagaaggaatccaagacgggagatgaatctggtgctcttcccgtaccccaggagtctataatggagaatgttgatcaggccatcacaaaaaaggaccaatcccaagtgttaacccaatcgaaggaggagaaggaaaaacagctactcgctagcagtctgtttgtcggattaggctccgagtccaccatcaacctcctgggcaaagctgacaccgtgtcgcacaagtttcgaaggaagtctaaggtcaaggaggcaaagtccggtgagacaacaagcacccacaatatgacctgctcgtcattttcctccctgagtaatgtcgcctacgaagatgactattactcaaatacactgcatgacaccggtgacaaagaattgaagaagttctctctgacaagcgaactgttggactccgaatctctgacggaactgcctctggtagagaagttttcctattgttccctgagcacaccgtcgctctttgctaacaataacatggaaatctttcaccccccacagtcaactgctgccagcgtagcgaaagagagcagcctggccagctccttcctggaagagacgacagagtacatccatagcaatgccatggaagtgtgcaataatgagacaatcagtgtgtccagctataaaatatggaaagatgattgcctccttatggtatggtccgttaccaataagagtggccttgagcttaaatcagcggatcttgaaattttcccagcagagaatttcaaagtcacagaacagcccgggtgttgcttgcccgtcatggaagcagaatctaccaagtctttccaatacagtgtgcagatcgaaaagccctttactgagggaaacctaacaggtttcatatcatatcatatgatggatacccacagcgcccagttggagttctcagttaatctgagcctgctagatttcatccgtccactgaagatctcatccgacgatttcgggaagctgtggctctccttcgcaaacgacgtgaagcagaacgtaaaaatgtctgagagccaggcagcactgccttcggccctgaagactttacagcagaaactgcggctccacattatcgaaatcatcggcaacgagggattgctagcctgtcagctgctccccagtatcccttgcctcctccactgcagagtacatgctgatgtgttggcactctggtttaggtcctcttgctcgacacttcctgattaccttctctatcagtgtcagaaagtgatggaggggtcatag

SEQ ID NO: 178152 - DNA, 1362 bp, synthetic construct
  misc_feature 1..1362: note = Description of Artificial Sequence: Synthetic coding sequence
  source 1..1362: mol_type = other DNA
atgatcagccagttcttcatcctgagcagcaagggcgaccccctgatttacaaagactttcgaggagattccgggggcagagatgtggccgaactattctaccggaaactcactggcttgcctggagacgaaagccccgtcgttatgcatcaccacgggagacatttcatccacatcaggcactcgggtctgtacctcgtggtgactacgagtgaaaatgtcagcccctttagcttgctggaactgctgagtagactcgcaaccctcctgggggactactgcgggtccctcggggaaggcaccatcagtcgtaatgtggcacttgtatatgagcttctggacgaggttcttgattacggctacgtgcagacaacctcaacagagatgctgagaaattttatccagaccgaggccgtggtgtctaagccattcagcttgtttgacctgtcttcagtgggcctttttggagctgagacccagcagagcaaggttgccccctccagtgccgctagtcgccctgtcctctcatctagatctgatcagtctcagaaaaacgaggtcttcctggacgtggtcgagcggttgtccgtgttgatagccagtaacggctcactgttgaaggtggacgttcagggggaaataaggctgaaaagtttcttgcccagcggtagcgagatgagaattggattgaccgaggagttttgtgtcggcaagagcgaactaagggggtatggtcccgggattcgcgtagatgaagtttcctttcactcctcagttaatttagatgaatttgaaagccacaggatcctcagacttcagccaccacagggagagctgaccgtgatgaggtatcagttgtcagacgacctaccatcccctctaccctttcgattattcccatctgtacagtgggaccgtggctccggccgattgcaagtttacctgaaacttcggtgcgacttactgtcaaagagccaggcacttaacgttcgtctccacctccctctgcccaggggagtggtgagtctcagccaggaactgtcctcccctgaacaaaaggctgaactcgcggaaggtgctctcagatgggacctgccccgcgtacagggaggcagccagctttccgggttattccagatggatgtaccggggccacccggacctccttcccacggattatctactagtgcatccccactaggcctcggccctgcctccttatccttcgaactcccgaggcacacttgctcaggtctgcaggtccggtttctccgacttgctttccggccttgcggtaacgccaacccccacaagtgggtgagacatttatcacattcagatgcttatgtgatcagaatttag

SEQ ID NO: 178153 - DNA, 1362 bp, synthetic construct
  misc_feature 1..1362: note = Description of Artificial Sequence: Synthetic coding sequence
  source 1..1362: mol_type = other DNA
atgatcagccagttcttcatcctgagcagcaagggcgaccccctgatttacaaggattttagaggggacagcgggggccgagatgtcgctgaactcttctaccggaaactgacggggctgcccggcgacgaaagccctgtcgtgatgcatcaccatgggaggcactttatccacatccgacacagtggactctacttggttgtcaccaccagcgagaacgtgagtccgttctcccttctggaattgctttctcgcctcgccaccttgctgggagattactgtggatccctgggcgaggggacgatcagccggaatgtggcacttgtgtacgagctgcttgacgaggtgttagactatggctacgtgcagacaacatccaccgagatgttgcggaactttattcagaccgaagcagtagtgtccaaaccgttctccctgttcgatctgtcttccgtaggattattcggcgcagaaacacagcaatccaaggtggccccttctagcgccgcatcacgtccagttctctctagccgctcggaccagagccagaaaaacgaagtgttccttgatgtggtggaaaggctatccgttttaatagccagtaacggatccttactaaaggtcgatgtccagggcgaaatacggctgaagtctttcctgccctcaggtagtgaaatgcgcattggcctgacagaagaattttgtgtgggcaagtccgaactgcgcggctacggtcccgggattcgggttgatgaagtatccttccatagcagcgtgaacctggacgagtttgagtcccatcgcattctcaggctgcagccccctcagggcgagcttacagtgatgcggtaccagctgagtgatgatctccctagccccctgcccttccgcttgttcccctccgtgcagtgggatagaggtagcggcaggctgcaggtttatttgaagctgagatgtgacctgttgtcgaaatcgcaggcgctaaatgtgagactgcatctgccattgcccaggggtgtggtctccctctctcaggagctcagttccccggagcagaaagcagaactggcagagggagccctgcggtgggatttgcctcgggtgcagggtggaagtcagcttagcggcctcttccaaatggacgtgccagggcctcctggtcctccctcccacggcctgtcaacttctgcctctcctctcggcttaggacctgcctctctatccttcgaactccccagacacacctgcagcggcctgcaagttaggtttcttaggttggctttcagaccatgtggaaatgctaatccgcacaaatgggtgaggcacctcagtcatagtgacgcttacgtcatccgtatatag

SEQ ID NO: 178154 - DNA, 1653 bp, synthetic construct
  misc_feature 1..1653: note = Description of Artificial Sequence: Synthetic coding sequence
  source 1..1653: mol_type = other DNA
atgagcgccgcctggatccccgccctgggcctgggcgtgtgcctgctgctgctgccaggacccgctgggtccgagggcgctgcacccatcgccataacatgcttcacccgtgggctcgatattcggaaggagaaggccgatgtgttgtgcccagggggttgtcccctcgaggagttctctgtgtatggtaatattgtttacgcttctgtttcaagcatatgtggcgcggccgttcacagaggagtgatttctaatagtggtgggcctgttcgggtatattccctgcctggccgtgagaactactcatctgtggatgcaaatggtattcaaagccagatgctgtcgaggtggtccgcatcattcactgtgactaaaggtaagtcctctactcaggaagccaccggtcaggctgtctccaccgcccatcctcctacgggcaagcgtttaaaaaagacacccgaaaaaaaaactggcaataaggattgtaaggccgatatcgccttcctgattgacggttcctttaatattgggcagcgacggtttaacctccagaaaaacttcgtgggaaaggtggcattgatgcttggtattggcacggaggggccacacgttggacttgttcaggcgtcagagcatcccaaaattgagttctacttgaaaaatttcacatcggcaaaggacgtcctgttcgctatcaaagaagtaggcttcagaggcggcaatagtaacaccgggaaggcgctgaaacatactgcacagaaattctttaccgttgacgcgggagtgaggaaaggcattcccaaagtcgttgtggtgtttatcgatggttggcctagtgacgacatagaggaggccgggatcgtggccagggaatttggcgtgaatgtattcatcgtttctgtggctaagcccatccctgaggagttggggatggtgcaggatgttacgtttgtcgataaggcagtctgcagaaataacggattcttttcgtatcatatgcctaattggttcggcaccactaagtacgtcaaacccctagtccagaagctgtgcacacacgagcagatgatgtgtagtaaaacttgctataactccgtgaacatagcgttccttatcgacggtagcagttccgttggtgattcgaacttccgcttgatgctggagttcgttagcaacatcgcaaagacattcgaaatttctgatattggggctaaaattgcggccgttcagttcacctacgatcaacgcacggaattcagctttaccgactacagcactaaagaaaacgtgctggcggtaattaggaatatcagatacatgtctggggggaccgctaccggggacgcgatcagctttaccgtgcgcaatgtgttcggcccaatccgggagtcacctaataagaactttctggtcatcgttacagatgggcagtcgtatgacgacgtgcagggcccagctgccgcggcacacgacgcaggaattactattttttctgtcggcgttgcctgggcgcctttagacgatctgaaggacatggccagcaagcccaaagagtcacacgctttctttactagggaattcacaggcctggagcccatcgtctcggacgtgattaggggcatatgtagagattttctggaaagccagcaatag

SEQ ID NO: 178155 - DNA, 435 bp, synthetic construct
  misc_feature 1..435: note = Description of Artificial Sequence: Synthetic coding sequence
  source 1..435: mol_type = other DNA
atgatcaagttcttcctgatggtgaacaagcagggccagacccggctttctaagtactacgagcatgttgatatcaacaagcgaacattactagagactgaggtgatcaaaagttgtctgtccagatcgaatgaacagtgttcatttattgaatacaaggacttcaaacttatataccgccagtatgccgccctcttcattgtggtgggcgttaacgatacagagaacgagatggctatttacgagttcatccacaattttgtggaggttctggacgaatacttctcccgggtcgttaaaggacacattatgttcaatcttgacaaagtacatattattctggatgaaatggtgctcaacggctgcatcgtggagacaaaccgggccaggatcctcgctcctctcctaattttagataagatgagcgagagttag

SEQ ID NO: 178156 - DNA, 435 bp, synthetic construct
  misc_feature 1..435: note = Description of Artificial Sequence: Synthetic coding sequence
  source 1..435: mol_type = other DNA
atgatcaagttcttcctgatggtgaacaagcagggccagacccggctgtctaaatactatgaacacgtggatattaacaagaggactcttctcgaaaccgaggtgattaaatcctgcctgtccaggtccaatgagcagtgttcctttatcgagtataaggattttaagttgatttacagacagtacgccgcactattcatagtggtcggcgttaatgatacagaaaatgagatggccatttacgagttcatccacaactttgtggaggtgctggatgagtactttagtagagtctctgaactggatataatgtttaatttggacaaagtgcacatcattctagacgagatggttctcaatggctgtattgtcgagacgaaccgggccagaattctcgcccctctactcatactggataaaatgtctgagagttag

SEQ ID NO: 178157 - DNA, 27 bp, synthetic construct
  misc_feature 1..27: note = Description of Artificial Sequence: Synthetic coding sequence
  source 1..27: mol_type = other DNA
atgatcaagttcttcctgatggtgtag

SEQ ID NO: 178158 - DNA, 297 bp, synthetic construct
  misc_feature 1..297: note = Description of Artificial Sequence: Synthetic coding sequence
  source 1..297: mol_type = other DNA
atgatcaagttcttcctgatggtgaacaagcagggccagacccggctcagcaaatattatgagcacgtggacattaacaaaaggaccctattggaaacagaggttattaagtcctgcttgagccgatctaacgaacagtgcagcttcattgaatacaaggattttaaactgatttaccgccagtacgcagccctgttcatagtggtcggagtgaacgacacagagaatgagatggctatctacgaattcattcacaacttcgttgaggtcctggacgaatacttttctcgagtctag

SEQ ID NO: 178159 - DNA, 402 bp, synthetic construct
  misc_feature 1..402: note = Description of Artificial Sequence: Synthetic coding sequence
  source 1..402: mol_type = other DNA
atgatcaagttcttcctgatggtgaacaagcagggccagacccggctgtcaaagtactatgaacacgtcgatatcaacaagcggaccttgctcgaaaccgaggttatcaaatcctgtttgtctcggtcaaatgagcagtgcagcttcattgaatacaaggatttcaaactcatatatagacagtatgcagcattgtttattgtggtgggcgtcaacgatactgagaacgaaatggctatttatgagttcatacataacttcgtggaggtgctcgacgaatacttcagtagggtttcagaactggacattatgttcaatctcgataaagtgcacattatcctagatgaaatggtgcttaacgggtgtatcgttgagaccaatagagccagaatactggcgtag

SEQ ID NO: 178160 - DNA, 4611 bp, synthetic construct
  misc_feature 1..4611: note = Description of Artificial Sequence: Synthetic coding sequence
  source 1..4611: mol_type = other DNA
atgggcgtggtgaacttcgtgttccgggccagcgaggacctgcaggtgctggaaaactactcggacgcccctatgacacctaaacaaatcctccaggtaatcgaggcagaaggactgaaggagatgagtggaacaagtccactcgcgtgcctgaatgcaatgctgcacagcaatagcaggggcggagaaggcctgttctacaagctgcctggtaggataagcttgtttacgctgaagaaagacgcacttcaatggtctagacaccccgccacggtggaaggcgaagagccggaagataccgcagatgtggaaagctgtggatctaatgaggcctcaaccgtctccggagagaacgacgttagcctcgacgagacctcctccaacgcatcatgttcaacagagagtcagtcacgccccctgtcgaatccgcgcgacagctacagagcctcgtctcaggccaataaacagaaaaaaaagacaggagttatgctgccccgggtagtgctgacccccttgaaagtcaacggggctcacgtggagtcagcatcaggcttctctgggtgccatgctgacggagagagtggctctccaagcagctctagcagcggatcccttgctctgggttctgctgccatcagggggcaagcagaagtgactcaggaccccgcaccactgctgagaggattcagaaagcctgctacaggacagatgaagcgaaaccggggcgaagaaatcgacttcgagaccccaggttcaatcctggtgaacacgaacctgagagcgctgataaatagtcgcacattccacgcactgccaagtcactttcagcagcagctgcttttcctgctgcccgaagtcgataggcaggttggcacagatgggttgctacggctgtcatccagcgcactcaataatgagtttttcacacacgcagctcagtcctggagagagcgactcgcagacggagaattcacccatgaaatgcaagtgagaatccggcaagagatggagaaagagaagaaggtggagcagtggaaggagaaattctttgaggattactacggacagaagcttgggttgaccaaggaggagtcccttcagcaaaatgtgggccaagaggaggctgaaataaagtctggcctgtgcgtccctggggagtccgttagaatccaacgcggcccggccacacgacagcgggacggtcactttaagaagaggtcaaggcctgacttacgtactcgtgcgcgccgtaatctatacaagaagcaggaatctgaacaggcgggagtggccaaagacgctaaatccgtagcctcggatgtacctctgtacaaggacggtgaggccaaaacagacccagccggattgtcctcccctcatttgccggggaccagcagtgctgcccccgatctggaagggcccgaattccctgtcgagtccgttgccagccgtatacaggctgagcccgacaatctagcacgggcatccgcgtctcctgatcgcatacccagcctgccccaggagaccgtagatcaggaaccaaaagaccaaaagaggaagtcatttgaacaggccgcatccgcatccttccctgaaaagaaacccaggcttgaggatagacagtccttccggaataccatagagagtgtacacaccgaaaagccgcagcctacaaaggaagaacccaaggtgccccccatcagaatccagttgtcacgtatcaagccaccttgggtggtgaagggtcagcctacctaccagatttgtccaaggatcatccctactaccgaatcttcttgcaggggctggaccggcgccaggactctcgctgacataaaggccagggccttgcaggttaggggcgccagagggcatcactgccaccgtgaggccgccacaacggcaatcgggggggggggaggaccagggggagggggcgggggcgccacagacgagggcggagggaggggcagcagctctggcgatgggggtgaggcctgtggacaccccgaaccacgaggcggcccgtctactcccggtaaatgtaccagtgacctgcagcggacacagctgctccctccctaccccctcaacggagaacacacccaggccggcaccgcaatgtcccgagcccgtagagaggatcttccttctttaagaaaggaagaatcctgtctactgcagagagctaccgtgggactcactgacggtctgggtgacgcaagtcaactcccagttgcaccgacgggagaccaaccctgtcaggctttaccattgttgtcctcacaaaccagtgtcgccgagagactggtggaacagccacagcttcatcccgacgtccgcaccgagtgcgaatctggtaccacgagctgggagtcagatgacgaggagcaggggccaacggttcctgcagacaatggacctatactgagcctcgtgggggatgacaccctcgagaaaggaaccgggcaggccctggactcacaccccaccatgaaggacccagtaaacgtcactccaagttctacccctgagtctagcccgacggactgtctgcagaacagagcattcgatgatgaactgggtttgggtggtagctgtccccccatgcgggagagtgatacacggcaggagaacctgaaaactaaagctcttgtcagcaatagctcgctgcattggataccaattccctccaatgatgaagtggtgaagcaaccaaagcccgaatccagagagcacattccttccgtggaaccacaggtaggcgaagagtgggaaaaagcagcgcccaccccaccagctcttccaggcgacttaacggctgaggaaggactggatccactcgattcattgacttccctgtggaccgtgccttcccgcggagggagcgattcgaacggatcgtactgccagcaggttgacatcgagaagttgaaaattaatggagactccgaggcactgagccctcacggtgagagcacggatactgcatctgattttgagggccatctgacggaggattcatctgaggctgataccagggaggccgcagtaaccaagggctcatcggtcgataaagacgagaagccaaactggaatcaatccgctccgttgtccaaagtgaatggcgatatgagactagtgaccaggacagatgggatggtggccccccagtcctgggtgtcaagagtgtgtgctgtgcgccagaagattcccgactcactgttattggccagtacggaataccagccaagagcagtgtgtctcagcatgcctggatcctccgtggaggccaccaacccactcgttatgcagttgctgcaggggagtcttcctttggaaaaagtgctgcctccagcccatgatgactccatgtccgaatctcctcaggtgcccctgactaaggaccagagtcacggatctcttagaatgggatctctacacgggttgggaaaaaattcagggatggttgacggctcatctccatcctcactgcgagcccttaaggaaccccttctgcctgacagttgtgagaccgggaccggattggctcgcatcgaagccactcaggcccctggcgccccccaaaaaaattgcaaagcagtaccttccttcgattctctgcacccagtgaccaatcctattacatcctctaggaaactggaagagatggattccaaagagcagttttcctccttcagctgtgaagatcaaaaggaggtcagagcaatgagtcaagactccaactccaatgcggctccagggaagtcacccggggacttgaccaccagccgcacacccagattttcctctccaaacgtgatttccttcggaccagagcagaccgggagagcattaggggaccagagcaacgtgacagggcaaggcaagaagctgtttggcagtgggaatgttgctgccaccctgcaaaggccaaggcccgctgaccccatgccactgccggcggagatccctcccgtattccccagcggaaaactcggaccaagcacgaactcaatgtcaggaggtgtgcagaccccaagagaagattgggcgcctaagccccatgctttcgtgggctctgtgaagaacgagaaaacctttgtgggtgggcctcttaaagccaatgccgagaatagaaaggcaaccggacattcgcccttggaattggtcggccacctggaggggatgcccttcgtgatggatttgcccttctggaagctcccgagggagccaggaaagggactgagtgaacctctcgagccctccagtctgccttctcagttatccattaaacaggccttctatgggaaactgtccaagttacaactgagctctacaagcttcaattatagcagctcatcacccacattcccaaaaggtctcgcaggatccgtggttcagctgagccataaggcaaacttcggcgcctcccattccgcaagtctcagcttgcaaatgttcacggactccagtactgttgaatccatttctttgcagtgcgcctgctcgctgaaggctatgattatgtgccaggggtgcggtgctttttgccacgatgattgcatcgggccctctaaattatgtgtgctgtgcctggttgtccgttag

SEQ ID NO: 178161 - DNA, 4626 bp, synthetic construct
  misc_feature 1..4626: note = Description of Artificial Sequence: Synthetic coding sequence
  source 1..4626: mol_type = other DNA
atgaaggacaagcagaagaagaagaaggagcggacctgggccgaggccgctaggctagtgctcgagaattattctgacgcacccatgacaccgaaacaaatcctgcaggtgatagaggccgaagggctgaaggagatgcggtctgggaccagtcccctcgcctgcctgaatgcaatgctgcactccaacagccggggaggagaagggttgttttataaattgcccgggcgtatctcgttattcactctgaagaaggatgctctgcagtggagtcgacaccctgctaccgtcgaaggcgaggaacccgaagataccgcagacgtggaatcctgcggctctaatgaagcctccaccgttagcggagaaaatgatgttagcctggacgagacctcaagcaatgcttcctgttctaccgagtcccagagcaggccgctatcaaatcctagagacagctacagagcctcatctcaggccaacaaacaaaagaaaaaaaccggcgtcatgcttccaagggtcgtactcacaccactaaaggtgaatggcgctcacgtcgaaagcgccagtgggttttccggctgtcacgctgacggagagtcaggtagtccatcctctagcagctcagggagcctcgctcttggatcagccgcaatccgtggtcaggcagaagtcactcaagatcctgcaccgctccttaggggatttagaaaaccggccacagggcagatgaagcgcaataggggcgaggagattgatttcgaaacaccaggctccatcctagtgaacacaaacctgcgggcacttattaactctcgtacctttcacgccctgcctagccacttccagcaacagctgctgtttctgctgccagaggtcgaccgccaggtgggaaccgatggtcttcttagactgtcgtctagtgcacttaacaacgagttcttcactcatgcagcacagagttggcgggagcggctcgcggacggcgaatttacgcacgaaatgcaggtaagaatccgacaggagatggagaaagaaaagaaagtcgaacagtggaaggaaaagtttttcgaggactactacggccagaagctagggttgacaaaggaagaaagtctccagcagaatgtcggacaggaggaggcagagataaagagcggtctgtgtgttcctggagagtccgtgcggattcagcgtggacccgccacgaggcaacgggacgggcacttcaaaaaaaggtccaggcctgacctgcgcacccgcgctcgaagaaacctgtataaaaaacaagaaagcgagcaagcaggagtcgccaaagatgcaaagtctgtggcgtcagatgtccctctgtataaagacggagaggcaaagacagatcccgcagggttatcctcccctcatctgccgggaaccagcagcgccgcaccggacttggaggggccagagttcccagtcgagtccgttgcctccagaattcaagccgaaccggacaatcttgcccgggccagtgcaagcccggatcggattcccagcctgccacaagagaccgtcgaccaggagcccaaggaccagaagaggaaatcgttcgaacaggccgcttctgcctccttccccgagaagaagcctcgtctagaggatcgccagagcttcagaaacaccatcgaaagtgtgcatacagagaaaccccaacctaccaaggaggaaccaaaagtacctccaattagaattcaactttctcgcattaagcctccctgggttgtgaaaggacagccgacctaccaaatctgccctcggattattcctacaaccgagagttcttgccgagggtggactggggcccgtaccctcgccgacataaaagcacgggcactacaagtaagaggggctcggggccatcattgtcaccgtgaggccgccacaacagccataggcggcggaggcggtcccggcgggggtggagggggcgccaccgacgagggtggaggccggggtagctctagtggagatggcggagaagcctgtggccacccagagccaagaggcggaccttctaccccgggtaaatgcaccagcgacctgcagcgcacccagcttttgccaccataccctctgaacggcgaacatacccaggcaggcaccgctatgtctagagcccgccgggaggacctgccgagtttacgtaaagaagagtcctgcctcctccagcgagcgaccgtgggactcaccgatgggctgggagatgccagccagctgcccgtggcccctacaggcgaccaaccctgtcaggctctgccattgctgtcctcacaaaccagtgtggctgagcgattagttgagcagccccagctccatcccgacgttcgaaccgaatgtgagagcggcacgaccagctgggaatcagatgatgaggagcaggggcctaccgtccctgctgataatggccctattctgtccctggtgggggacgatacgctggaaaagggaaccggccaggccctagactcacatccgaccatgaaagatcctgttaatgtgacccccagcagtacccccgagagcagtcccaccgattgcctccaaaacagagcattcgacgacgagctcggacttgggggcagctgccccccaatgagagagtcggatacgcgtcaggaaaacttaaaaacaaaagccctggtgtcaaacagtagcctgcactggatccccatcccaagcaatgacgaggttgtcaagcaacctaaacccgaaagcagggagcatatcccttctgttgagccacaggtgggcgaggaatgggagaaggcagctcccacgcctcctgccttacctggggatctgaccgccgaagaggggctggatccattggattctctcacgagcctatggaccgtgcccagcagaggcggatcggatagcaacgggtcctattgtcagcaagttgatatagagaagctaaaaattaatggggactccgaagccctctctccccatggggagtccaccgacaccgcatcggactttgaaggccacctgaccgaagattcatcagaggcagacacaagggaagctgcagtaactaagggcagttccgtggacaaggatgagaagcctaactggaatcaatcagcccctttgtccaaagttaatggagacatgcggctcgtgacaagaaccgatggaatggtcgctcctcagtcctgggtcagcagagtgtgcgcagtgagacagaaaatccctgactccttgttacttgctagcaccgagtaccagccccgagcagtctgcctgtctatgcctggttctagcgtcgaagccacaaaccccctcgtgatgcagctgctccagggctctctgcccctggagaaagtgctccctccggcacacgacgattccatgagcgagtcaccacaggtcccattgacaaaggatcagagtcacggttcactgagaatgggatccttgcatggtcttggcaagaactctggcatggtggacggaagctccccctctagcttacgcgctctgaaggagcccttacttcccgactcttgtgagacaggcaccggtctcgcccgtatcgaagcaacccaggcaccaggcgctcctcagaagaactgcaaagccgtgccctccttcgactccctgcaccccgtgacaaatcctattacgagctctaggaagctggaagaaatggacagcaaggaacaattctcgagcttctcttgcgaagaccaaaaagaagtgagggccatgtctcaggacagcaatagcaacgccgctccgggaaagagtcccggggatctgactaccagccgcacaccgaggttctcctcacccaatgtgatctctttcggaccagagcagactgggagggcactgggtgatcaaagcaacgtcacggggcaaggaaagaaactttttggcagcggtaacgtggcggctacgcttcagcgcccacggcccgcggacccgatgcccttacccgctgaaatcccgcctgtattcccatctggcaaattgggtcccagcactaacagtatgtcgggcggcgtgcaaacccctcgggaagactgggcaccaaaaccccacgcgttcgttgggagcgtcaagaatgaaaagacttttgtaggtggcccactcaaagccaacgctgagaatcggaaagctacagggcacagccccctggagctagtaggacatctggaagggatgcctttcgtcatggatcttcccttttggaagctgccgcgtgagcctggaaaagggctctcagaacccctggagccgtcttctctgccttcgcaattgagcatcaaacaagctttttacggaaagctctctaagctccagctgtctagtacaagtttcaactacagttctagctcacccactttccctaagggcctcgcggggtcagtggtccaactgtcccataaagcaaacttcggtgcttcgcactcagctagtctaagtctgcagatgtttacagattccagcactgtggagtccatctcattgcagtgcgcctgttcacttaaggcaatgataatgtgccagggatgcggcgccttctgccatgatgactgtattggaccttctaaactttgcgtgctgtgtctcgtcgtaagatag

SEQ ID NO: 178162 - DNA, 4626 bp, synthetic construct
  misc_feature 1..4626: note = Description of Artificial Sequence: Synthetic coding sequence
  source 1..4626: mol_type = other DNA
atgaaggacaagcagaagaagaagaaggagcggacctgggccgaggccgcccgactggtgcttgagaactacagtgatgcaccaatgaccccaaagcagattctgcaggtgattgaggcagaggggctgaaggaaatgaggagtgggacctccccactcgcgtgtctgaatgctatgcttcattccaactctaggggaggtgaaggactcttctataagctgccgggcagaattagtctcttcactctaaaaaaggacgctcttcaatggtcaaggcaccctgcaactgtggaaggtgaggaacccgaggacactgccgatgtggaaagctgcggttctaatgaagcaagcactgtctccggggagaacgacgtgtcacttgatgaaacatcctctaatgccagctgtagcaccgagtcacaatcccgccctctgtccaatccccgtgatagctacagagcctccagccaagccaacaagcagaagaagaaaacgggtgtgatgctgcctcgggtagttctcactccactgaaggttaatggtgctcacgtcgaatcagcctcggggttcagtggttgccacgctgatggcgagtcgggctccccctcatcaagctctagcggctcactggcactcggctcggctgcaatccgagggcaggctgaggtgacccaagacccggctcctttactgaggggcttcaggaaacccgccaccgggcagatgaagcgtaataggggagaggagatcgactttgagaccccaggctccatcctggtgaacaccaatctgagggccctcataaacagtcggacattccacgctctgccaagccacttccagcaacaactgctgtttttgctccccgaggtggacagacaggtgggaaccgatggactgctgaggctgtcatccagcgccctaaacaacgaatttttcactcacgccgcccagtcgtggagggaaaggctggctgacggtgagttcactcacgaaatgcaagtcagaatcagacaggaaatggaaaaagagaaaaaggtcgaacagtggaaagaaaagtttttcgaggactattatggtcagaagctgggtctcacaaaggaggagtctctccaacagaacgtgggtcaggaggaggctgagattaaatccggtctttgtgtgcctggggagtctgtccggattcagcgagggccggcgaccagacagcgcgacggccactttaagaaaaggtctagacctgacctgcgaacccgagctaggcgcaacttgtataagaagcaggaaagcgagcaggcaggagtggcgaaggatgctaagtcagtggccagtgatgtccctctttataaggatggggaggctaaaacagaccccgctgggctcagcagcccacatttacctggtactagttcagcggcacctgaccttgagggccctgaattcccagtagagtctgtcgcaagtaggattcaggccgagccagacaacttggccagagcttcggctagcccggatcggatccccagccttcctcaggaaaccgtcgaccaggagcccaaggatcaaaagaggaagagcttcgaacaggcagcctctgcctctttccccgaaaagaagccgagattagaggacaggcagtcattcagaaatacaattgagtcggtacataccgagaagcctcaaccaacaaaagaggagccaaaggttcctccaatccgcatacaactctcgagaattaagcccccctgggtcgttaagggccagcccacataccaaatctgcccgagaattataccgacaactgaaagcagctgcagggggtggactggggcaaggacactggcagatatcaaagcccgcgcactgcaagttaggggagcccgaggtcaccactgccacagagaggcggcgaccaccgccataggcggggggggaggtcccggaggcggagggggaggggccactgacgagggcggaggccggggatcatcctccggagacgggggcgaagcttgtgggcacccagaaccgaggggcgggccctcaacacctggaaagtgtacctcagacctccaaagaacccagcttcttcctccatatccactcaacggtgagcacacacaggccggcactgcgatgagtcgcgctaggagagaggacctgccatctctccgtaaggaggagtcttgcctactgcagcgggcgactgttggcctgacagacggacttggagacgcctcccagctcccagtagcgcccacaggggatcaaccctgccaagccctgcccctgctaagttctcagacatctgtagctgaaagactggtggaacagccccagctccatccagacgtccggacggaatgtgagagcggcactacatcatgggagtcagacgacgaagaacaaggacccaccgtgcctgctgacaatggacctattctcagcttagtgggtgatgataccctagagaaaggcacaggccaggcactagacagtcacccaaccatgaaagacccagtgaacgtgactccttcatccacccccgaatcctcccctaccgattgcttgcagaatcgcgccttcgacgacgaactgggactggggggcagttgcccgcctatgagggagtcagacacaaggcaagagaatctgaagaccaaggcactggtctcgaattcgtcactccactggatccctattccttccaacgatgaggtcgtgaagcaacctaagcccgagtcccgcgagcatatccctagtgtcgagcctcaggttggcgaggaatgggagaaagctgctcctacacctcccgccctacctggcgacttgaccgctgaagagggactggacccattagatagccttaccagcctgtggaccgttccctctcgcggaggtagcgatagcaatggttcttactgccagcaggtcgacatcgagaagctgaagattaacggagactctgaggccctctcgcctcatggagagtcgaccgacaccgcaagtgactttgaaggccacctaaccgaggacagctccgaggcagacaccagggaggcagccgtcaccaaggggagttccgttgataaggatgagaagcctaactggaaccagtccgctcctctgtctaaggtgaacggagacatgcgtctggttactcgtactgacggaatggtcgctcctcagtcatgggtcagtcgagtctgcgccgtgcggcagaagatcccagactcgctgttgttagcatcaacagagtatcagccccgcgcagtgtgcttgagcatgcccggttcatcagtggaagcaacaaatccactggttatgcagctgctccaaggttccttgcctctggagaaggtcctaccccctgcacacgacgattccatgagcgaaagccctcaagtgcccctgaccaaagaccaaagccacgggtctcttcgaatgggctcactgcatggcttgggaaagaacagcggaatggtggatggtagctctccttcaagtcttcgagctttgaaggaacctcttctgcccgacagctgtgaaacaggaactggattagcacgtattgaggccacacaggcccccggtgctcctcaaaagaactgtaaagctgtccccagtttcgactccttgcatcccgtgacaaatccaataacgagttcacgtaagctcgaagagatggactctaaagagcagttttcctccttttcatgcgaggatcagaaagaagtgcgggccatgagccaggatagtaactcgaacgccgctcccggtaaatccccaggagacttaaccacctcaagaaccccacgtttcagttcacccaacgttatctccttcgggcccgagcagacaggccgcgcattgggagatcaaagcaatgttactggacagggaaagaaactcttcggttctggaaacgtggccgcaacacttcagaggcctcggcctgctgatcccatgcccctccctgccgaaattcctcccgtttttcccagtgggaaactcggaccttcaacaaattccatgagtggtggcgtccagacgccaagagaggattgggcaccaaaaccgcacgccttcgtcggttccgtgaaaaatgaaaaaacctttgtcggtggcccattaaaagcgaatgcagagaatcgaaaggctaccggacacagtcctctcgaacttgtgggacacctggaaggtatgcctttcgtcatggacctgcccttctggaaactgccacgcgagcctggaaagggactttccgaacccctcgagcccagctcactgccctctcagctgtccatcaaacaggccttctatgggaagctgtcaaagctgcagctctcaagcacttccttcaattactccagcagcagtcccacatttcccaaaggcctagctgggagcgtggtacagcttagccacaaagctaacttcggagcctctcatagtgccagccttagcttacagatgttcaccgatagtagcacggtggaatctatcagcttgcagtgtgcctgctctctcaaggctatgattatgtgtcagggctgcggcgcattttgtcacgatgactgtatcggcccttctaaactgtgtgtgctctgcctggttgtgagatag

SEQ ID NO: 178163 - DNA, 4389 bp, synthetic construct
  misc_feature 1..4389: note = Description of Artificial Sequence: Synthetic coding sequence
  source 1..4389: mol_type = other DNA
atgctgagcttccccaacctgaaccaggtgctggagaactacagcgacgcccccatgactccaaagcagatactccaggtcattgaggcggaaggtctgaaggaaatgtcttcagggacctccccactggcgtgtctgaatgccatgctgcattcgaactccagagggggtgaaggcctgttttataagctgcctggccgcatcagtctgttcacgctcaagaaggatgctctgcagtggtcccgacacccagccactgttgaaggagaggaacctgaggataccgctgacgttgagtcttgcggtagcaatgaagcctctacagtttcgggtgaaaacgatgttagtctcgacgaaaccagcagcaatgcttcttgcagcactgaaagccagtccagaccactgtccaacccacgcgactcctacagagcatcgagccaggccaacaagcagaagaaaaagactggcgttatgcttccgcgagtcgtactcacaccactcaaagtgaatggcgcgcatgtggagtcggcctctggacagatgaaaagaaatcggggggaggaaattgattttgagacacccgggtcaattttggttaacactaacctcagggccctcatcaactcaaggacttttcacgcactgcctagccatttccagcagcagttgctgttcctacttcctgaggttgacaggcaagtgggaaccgacggccttctcaggctaagcagttctgctcttaacaatgaattcttcacccacgcagcgcaatcatggagagaaaggcttgccgacggggaatttactcacgaaatgcaagtccggattcgacaggaaatggaaaaagagaagaaggtggagcagtggaaagaaaaattcttcgaggattattatggtcagaaactgggactcactaaagaggagtctttgcagcagaacgtcgggcaggaagaggccgagataaagtctggattgtgtgtgcccggagagagtgtccggattcagcgggggcccgccactaggcagagggatgggcacttcaagaaacgcagccgccccgatctgcgcacaagagcgaggcgaaacctgtacaagaagcaggagagcgagcaagctggggtcgcgaaggatgcgaagagcgtcgcctccgacgtgcccctctacaaggacggagaagccaagactgacccagccgggctgtcttctccacacttgcccggcacatccagcgcagctcccgatctcgagggtcctgagttcccagtcgagagtgtggcatccaggatacaagccgaacccgataatcttgcaagggccagcgcctcccctgatagaatcccatcccttccacaagagaccgtggatcaggagcctaaggaccagaagcgaaagagttttgagcaggcagcgtcagctagcttccccgagaagaagccaagactggaggaccgccaatcattccggaataccattgaatcagttcacacggaaaagccacagcccaccaaggaagagcccaaagtgccacccattcgcattcagctgagccgcatcaagcctccttgggtggtcaagggacagcctacttatcagatttgtccgcgtataattcctactaccgagtcttcttgtcggggctggaccggggctaggactctggctgatataaaggcgcgcgctctccaggtacggggagctagaggccatcattgtcatagggaagcaactgacgaagggggtggacgcggatcttcttctggggacggaggtgaggcctgcggccaccccgagccccgcggcggtccatctactcccggcaagtgtacctctgacctacagcggacacagttgctccccccctatcctctcaatggggaacatacgcaggccggaacagcgatgtcccgcgcgcgcagagaggatctgcccagcttacggaaggaagaaagttgtctcctgcagagggctaccgtcggcctgaccgatggcctgggcgatgccagccaactgccagtggcacctacgggggaccagccctgtcaggccctgcccctcttatccagtcagactagcgttgcagaacgcctggtcgaacagccacagctgcacccagatgtgaggacagagtgtgaaagcggaaccaccagttgggagtctgacgatgaagaacagggacctaccgtgcctgccgataatgggcccattctatctctcgtgggggatgacaccctcgagaaggggacaggccaggctctggacagtcacccgaccatgaaagatcctgtcaatgtgacccctagtagtacccccgaaagcagtcccacagactgtctgcagaatagggctttcgacgacgagctgggcctcggcggcagctgcccccccatgcgcgagtcagacactagacaggaaaacctgaagacgaaggccctggtatcgaacagcagtctccactggattccaataccctctaacgatgaggtcgtaaaacaaccaaaaccggaaagcagggaacatattcctagcgtcgagccacaagtgggcgaggagtgggagaaagccgcacccacgccaccagccctgccaggcgacctcaccgcagaagaaggtctggatccccttgactccttgacatctctctggacagtaccttcaaggggtggcagcgattccaacgggtcgtattgccagcaagtcgacatcgagaaattgaagatcaatggcgattctgaggccctcagccctcatggggagagtacggatactgcatctgactttgaaggccaccttacggaagattcaagcgaggcagacacccgcgaggccgctgtgactaaaggatcaagcgtagacaaggatgagaaaccgaactggaatcaatccgccccactcagcaaagtgaacggggacatgagactggttaccaggaccgatggcatggtggcccctcagtcatgggtgtcacgtgtttgtgccgtgaggcagaagattcccgatagtctgctgctggcctctaccgagtatcaaccaagagcggtgtgtttaagcatgcccgggagcagcgtcgaggcgaccaatccactggtgatgcagttgctgcaagggagtctccccctggagaaagtcctgccaccagcccatgacgattctatgtctgagtcacctcaggtccccctaacaaaagaccagtcacacggcagtctgagaatgggatcactgcacggcctcggaaaaaacagtgggatggttgacggctcctcaccctcaagcttgcgcgccctgaaagagcccctacttcctgactcctgcgaaacagggactggcctcgcacggatcgaggccacccaggcaccgggtgcccctcagaagaattgcaaagcggtcccatcgttcgatagcctgcatcctgtcaccaatccaataaccagtagtcggaaactggaggaaatggattccaaggagcagttcagcagcttctcctgcgaggatcagaaggaagtacgggccatgagccaagacagtaattccaatgcggcccctggtaagagtccgggtgatctgacgacctcccggaccccccggttttcttctccgaacgtgatcagcttcggacccgagcagacagggcgggccctgggagatcagagcaatgtcacgggccagggtaaaaagctgttcggcagcggtaatgtggcagccactctccaacgaccgagaccagccgacccaatgccactgcctgctgaaattccgcctgtgttcccatccggcaaactgggtcctagcaccaacagcatgtccggcggggtgcaaacaccgcgggaggattgggcaccgaagccgcacgcttttgtggggagcgtgaaaaatgagaagaccttcgtcggtgggcctctgaaggccaatgcggaaaacagaaaggcaactgggcatagtcctctcgagctcgttggccaccttgaaggcatgccattcgtgatggaccttcctttttggaagttgccccgggaacccgggaagggcctatccgagcccttggaacctagtagtcttccctcacagctctccattaaacaagccttttatggcaagctctccaagctgcagttgagctccaccagcttcaactattcttcctcctccccaacctttcctaagggcttagcgggcagtgtcgtgcagctgtcccacaaggctaacttcggagcctcccattctgcttccctttccctgcagatgttcacggactcttccaccgtcgagtcaatatcccttcagtgcgcatgcagtctgaaggcgatgataatgtgccagggctgcggggctttttgccacgacgattgtatcggaccttcaaagctgtgtgtcctttgccttgtggttcgctag

SEQ ID NO: 178164 - DNA, 4626 bp, synthetic construct
  misc_feature 1..4626: note = Description of Artificial Sequence: Synthetic coding sequence
  source 1..4626: mol_type = other DNA
atgaaggacaagcagaagaagaagaaggagcggacctgggccgaggcggcccgtctggtccttgagaactattccgatgcacctatgacgccaaaacagattctgcaagtcatagaggcggaaggtctcaaggagatgcggtccggcacttcccctcttgcttgcctcaatgccatgttgcactctaacagtagagggggtgaagggctcttctataaactccctgggcggataagtctgttcaccctcaaaaaggacgccttacaatggagccggcaccctgctacagtagaaggggaggagcccgaagacaccgccgacgtggaatcttgcgggagcaacgaggccagcaccgtaagcggagagaacgatgtgagcctggacgaaactagctctaacgccagttgctctacagagtcccaatcccggccactcagtaacccccgcgacagctaccgcgcatctagtcaggccaataaacaaaagaagaaaactggtgtaatgctacctagagttgtcttaaccccactcaaggtaaacggcgcacacgtcgaaagtgccagtggattctccggatgtcatgcagacggcgagtctgggtcaccctcctcgagttcgtcaggctccctagcccttgggtcagcagccataagagggcaggccgaggtcacccaagatcctgctccattgctgcgcggctttcggaaaccagccaccggacaaatgaagcgaaacagaggcgaagaaatagattttgaaactccaggctctattttggttaacacaaaccttcgtgccctgattaacagccgcacttttcatgctttaccttctcattttcagcagcagttgctgttcttactcccggaggtcgatcggcaggttggcacggacgggcttctgcgactgagcagttcagccttgaacaacgaattctttactcacgctgcacaaagctggcgtgaaagactcgccgacggtgagttcactcatgagatgcaagtcaggatccgccaggagatggaaaaggaaaaaaaggtcgagcaatggaaagagaagttcttcgaggactactatggacagaagctcgggctgactaaggaagaatcgctgcagcagaatgtgggccaagaagaggccgagatcaagtcaggtctctgtgtgccaggggagtccgttagaattcagcggggccctgcgacacgacagagagacgggcattttaaaaaacggtctcgacctgacctccgcacccgagctcgcagaaacctgtacaagaagcaggagagcgagcaggcgggcgtggcgaaggacgcaaaatcagttgctagcgatgtacctctctacaaggacggggaggcaaagacagaccctgctgggttatcaagtccgcacctccccggcacctcaagtgccgccccagatctggagggtccagaatttccagtggagtctgtcgcctctcggatccaagctgagccggacaatctggcccgcgcaagcgcttcccccgataggattccctccctaccacaggagaccgttgatcaggaacctaaggaccagaagcgcaaaagctttgagcaggctgcttcagcgagcttccctgagaaaaaaccaaggctggaggacaggcaatctttcagaaacaccattgaatccgttcacactgaaaagccccagccgaccaaagaggagccaaaggttccgcccatcagaattcagctaagccggataaaacccccttgggtggtcaaaggacagccaacatatcaaatttgcccaaggattatccctacgacagaatcgtcatgcaggggatggactggtgcaagaacccttgccgatattaaggccagggccttgcaagttcgcggcgcaagaggtcatcattgtcaccgagaggctgccaccaccgccattgggggtggtggagggcctgggggaggcgggggtggcgctaccgacgagggaggcggtagaggcagttcatctggggacgggggggaagcatgtggccacccagaaccacggggaggcccctctacacccggaaaatgcacaagcgacctacaacggactcaactcctgcccccttacccgctgaatggagaacatacccaggcggggaccgcaatgagcagggcacgcagggaggatctgccctcattgagaaaggaagagtcttgcctgttacaacgcgcaacagtggggctcacagatgggttgggggacgccagccagctgccagtggcacctaccggtgaccagccctgccaagcgttgccgctcctgtcttcccaaacatctgttgccgaaagactcgtggagcagccccagctgcaccccgatgtgaggacagagtgtgagagtggcacgacgtcttgggaaagcgacgacgaggaacagggccctaccgtgcccgcagacaacggacctattttgtcactcgtgggcgatgacacactcgaaaagggaacagggcaggcgctcgatagccaccccacgatgaaagatcccgtcaatgtgacaccttcctccacacccgagagcagtccaacagactgcctacaaaatcgggccttcgacgacgagctcggcctcgggggaagctgtcctcccatgcgcgaatcggataccagacaggaaaacctgaaaacaaaggcactagtgagcaattcctcactgcactggatacctatcccctcaaatgacgaagtggtgaaacagcctaaacctgagtctcgggagcatatcccttccgtggaacctcaggttggtgaggaatgggagaaggctgcaccgaccccccctgctttgccaggcgatttgacagcagaagaaggcctggatcctttagactccttgacgtccctgtggacagttccttcacggggcggaagtgactccaacggatcttactgtcaacaagtcgatatcgaaaagctcaaaattaatggagactcggaggctcttagtccccacggcgaatccactgacacggcgagtgatttcgaagggcacctgacagaggattcgtctgaagcagatacccgtgaggccgcagtaaccaaaggtagcagcgtagataaggacgagaagccaaactggaatcagtctgctcctctaagcaaagtgaacggagacatgcgcctcgtgacaaggacagacggaatggtagctccacagtcctgggtctcccgcgtgtgcgcggttcgccagaagattccagactcacttctcttagcaagcaccgagtaccagccaagagccgtctgcttgtccatgcccggatcatctgtggaggctactaaccccttggtgatgcagctcctccaaggctcgttacctctggaaaaagttctcccacccgcccatgacgatagcatgtccgagagtccccaggtcccactgaccaaggaccagtcccatgggtccctgcgcatgggaagcttacatggcctgggcaagaacagtgggatggtggacggaagcagcccgtcaagtctccgagcactcaaagaacctctgcttcctgattcttgcgaaacaggaacgggcctcgctaggatcgaagctacacaggctcccggcgccccgcagaagaattgtaaggccgttcccagcttcgattcactgcaccctgtaacgaacccgatcaccagctcgcgcaagctggaggagatggacagcaaggaacaattcagtagcttcagttgtgaggaccagaaggaggtgcgggctatgtctcaggattccaactcaaatgccgctccgggcaagagtccaggagacctcaccacctccaggacaccccgctttagctctcccaacgtgatttccttcggccccgaacagactggacgggcgctgggagatcaaagcaacgtgactgggcaaggaaaaaagctgttcggctccggcaatgttgccgccacactccagcggcccaggcctgccgatccaatgcctctgccagcagagataccgccagtcttccccagcggtaaactaggcccaagcacgaactccatgtccggcggcgtccagacaccgagggaggactgggcccccaagcctcacgcattcgtggggagcgtgaagaatgagaagactttcgttgggggacctctgaaagctaacgcggaaaataggaaagcaaccggacattcccctttggaactcgttgggcaccttgaggggatgccgtttgtgatggacctgcccttttggaagcttccacgcgaacctggaaagggcctttccgagccactcgaaccatccagtttaccgagccaactatcgattaagcaggccttttacggcaagctgtccaagctccagctgtcttccacctcatttaactattcttcatcgagccctacattccctaagggtctcgctgggagcgttgtccaactgagccacaaggccaacttcggggcttcccattctgccagtctgtccttacagatgttcactgactcctcaacagtggagtcaatcagcctgcagtgcgcatgcagcctgaaggccatgatcatgtgtcaaggatgcggggccttctgccacgacgactgtattggtcctagtaaactgtgcgtcttgtgcctggtagtcagatag

SEQ ID NO: 178165 - DNA, 225 bp, synthetic construct
  misc_feature 1..225: note = Description of Artificial Sequence: Synthetic coding sequence
  source 1..225: mol_type = other DNA
tgatgggccgaggccgcccggctggtgctggagaactacagcgacgctcctatgacccccaaacagatcctccaggtgatcgaagcggaaggcttaaaggagatgcgctctggtacctctccactcgcctgcctaaatgcaatgcttcactcgaattctagagggggggaaggtttattctataaacttccaggaaggatttcactgttcacgctaaaggtctag

SEQ ID NO: 178166 - DNA, 258 bp, synthetic construct
  misc_feature 1..258: note = Description of Artificial Sequence: Synthetic coding sequence
  source 1..258: mol_type = other DNA
atgaaggacaagcagaagaagaagaaggagcggacctgggccgaggctgccaggctggtcctggagaactattcagatgctcctatgactccaaagcagatactgcaagtcatagaagctgaaggactcaaagaaatgcgcagcggcacttcccctctggcatgtctgaatgccatgctgcatagcaattcgaggggcggcgaggggttattctacaagctgcctggtcgcattagcctgttcactctgaaggtgtag

SEQ ID NO: 178167 - DNA, 255 bp, synthetic construct
  misc_feature 1..255: note = Description of Artificial Sequence: Synthetic coding sequence
  source 1..255: mol_type = other DNA
atgaaggacaagcagaagaagaagaaggagcggacctgggccgaggcggccaggctcgtacttgagaactattctgacgcacccatgacgccaaaacagattctgcaggtgatagaggccgagggcctcaaggagatgagcggcacatctcctctggcatgccttaacgccatgttgcactcaaactcacgtggcggagagggcctattctataaactgccgggccggatcagtctgttcacactcaagcgatag

SEQ ID NO: 178168 - DNA, 2757 bp, synthetic construct
  misc_feature 1..2757: note = Description of Artificial Sequence: Synthetic coding sequence
  source 1..2757: mol_type = other DNA
atgaagcggaccaagtgcgccgacatcgacgtggagacccccgactccatactcgttaacacaaatctgagagcgttaattaacaaacacaccttcagcgtgttacctggagactgtcaacagagactgctgttactccttccagaagttgacaggcaggtgggcccggatgggctcatgaaattgaacggaagcgccctgaacaatgaatttttcacatctgctgcgcaaggttggaaggagcggctgtcagaaggggagtttacccctgagatgcaggtgcgcattagacaggaaattgagaaggagaagaaagtggagccctggaaagaacagtttttcgagtcctactatggtcagagctctggcctgagtctcgaagatagtaagaaattaacagcttctcctagtgatcccaaagtgaaaaagaccccggccgagcagccaaagtctatgccagtttctgaggcgagcctgatcaggattgttccggtggtgagccagtccgaatgcaaggaggaagcattacaaatgagcagccctggacggaaggaagagtgcgaatcccagggagaagtccagccaaatttcagcacctccagtgagccactcctgtctagcgccctgaatacccatgaactcagttctattctcccgataaagtgtccaaaggacgaggatctcctcgaacaaaaaccagtgacctctgcagagcaggaatccgagaaaaaccaccttaccaccgctagcaactacaataaatctgaatctcaggagagtcttgtcacttcacccagcaagccaaagagccctggggtagaaaaacccatagtcaaaccaacagcaggtgccggaccccaggagactaatatgaaagaaccactggccactctggttgaccagtcacctgagagcctgaaaagaaaatcatcgttgacgcaagaagaggccccagtttcctgggagaagcgacccagggtgacagaaaacaggcagcaccagcaaccttttcaggtttccccccagccgttcctgaaccgtggggatcgaattcaggtgcgcaaggtgcccccgctgaagatccccgtgtctcggattagccctatgcccttccaccctagtcaggttagtccgagagcccggttccccgtgtccatcacgagtcctaacaggacaggagccagaactcttgctgacattaaggctaaggcacaattggtgaaagcacagagggctgctgcagcagcggccgcagctgctgccgcagctgcaagcgtaggtgggactatccccggcccggggcccggaggaggacaagggcctggcgaaggcggcgaaggccagacggcacgggggggaagcccgggatccgaccgggtgtcagagacaggcaaaggacccaccctggaattggctggaacgggaagcagaggtggcaccagagagctgctcccctgtggccccgagactcagcctcagtcagagaccaagacaactccatctcaagctcagcctcacagcgtctctggggctcagcttcagcaaacccctcccgtgccgcctacacccgccgtttcgggagcgtgcaccagtgtgccctcaccagcccatattgagaagctcgataacgagaagctgaaccctacccgtgctaccgcgactgtggccagtgtgtctcacccccaggggcctagcagctgcagacaggaaaaggctcccagcccgacgggctttcagttagaggatattagcacatctcaacggttcatgctggggtttgccggccggcgcacgagcaagcctgctatggccggacattaccttctgaatatcagcacttatggccgcggaagtgagtcatttaggcggactcatagcgtgaaccccgaggacaggttctgtttgagctccccgaccgaggctctgaagatgggatataccgactgtaagaacgccactggcgagagcagctcatccaaggaggatgacaccgatgaagaaagcacaggggacgagcaggagagtgtaactgtgaaggaggagccacaggtttctcagagcgcagggaagggggatacctcaagtggacctcactcccgcgaaacccttagcacttctgactgccttgcctcaaagaatgttaaggccgaaatccctctgaatgagcaaactacgcttagtaaggaaaattacttatttactagaggacagacatttgacgagaagacgctggctcgtgatctgatccaggccgcccagaagcagatggctcatgccgtgcggggtaaggccatccgctcttccccggagttgttttccagcacagtgctcccgctgccagcggactccccaacacaccagccattactgctgcctccattgcagacacccaaattgtacggtagtcccacccagattggaccaagctaccgggggatgataaatgtctccacatcctcggacatggatcacaatagcgcagttcccggctcgcaggtgtcttcaaacgtgggagacgtgatgtctttctcagttaccgtgacgactataccggcaagccaggccatgaatccctcttcacatggacaaacaattcccgtacaggccttcagcgaagagaatagtatcgaaggcacaccaagcaagtgctactgcaggttgaaggctatgatcatgtgtaagggctgcggtgccttttgtcacgacgattgcatcgggccgagtaagctgtgcgtttcatgcctggtcgtcagatag

SEQ ID NO: 178169 - DNA, 4224 bp, synthetic construct
  misc_feature 1..4224: note = Description of Artificial Sequence: Synthetic coding sequence
  source 1..4224: mol_type = other DNA
atgagccacaaggagatcctgcaggtgatccagcgggagggcctgaaagagataagcagtggaacttcgcccctggcttgtctcaatgcgatgctgcacactaacagtagaggagaggagggaatcttttataaggtgcccggcagaatgggagtctacacgctgaagaaggatgtccccgacggggtgaaagagttgtccgaaggcagcgaggagagcagcgacggccagagcgactcgcagagcagcgaaaattcaagttctagtagtgacggagggtccaataaggagggtaaaaagtcccggtggaagcggaaagtgagctcctcctccccccagagcgggtgtcctagtcccacaatcccggccggaaaagttatctctcccagccagaaacattcgaagaaggctcttaagcaggcgttgaagcagcagcagcaaaagaagcagcagcagcaatgcagaccctccattagcatttcatccaaccagcatctttccctcaaaaccgtgaaagcagccagtgattccgtccctgccaagccagctacttgggagggaaagcagtccgacggccagactggctccccgcagaatagcaactcgtctttctcttcaagtgtgaaggttgaaaatacattacttggcctcggaaaaaagtccttccaacgttctgaacggttgcacactagacaaatgaagcgcacaaaatgtgccgatattgatgtggagacccccgactcgatccttgtaaatacgaacctacgcgcactcattaacaagcacacgttctctgtgctccctggagactgccagcagcgcttgctcctgctgctgcctgaggtcgaccggcaggtgggaccggatgggttgatgaagctcaacggaagcgctcttaataatgagttcttcactagcgcggcgcaaggctggaaggaacgcctaagtgagggtgaatttactcctgagatgcaagtgcgaatccggcaggagatcgagaaagagaaaaaagtggagccatggaaggagcaattttttgagagttattatggtcagagcagcgggctgtctctggaagacagtaagaagcttactgcttccccctctgacccaaaggtaaagaaaactccagctgaacagcccaagagcatgcctgtgtctgaagcgtcgctgatccgcatcgtgccagtggtgagccagtctgaatgcaaggaggaggcacttcagatgagcagcccaggacgtaaagaagagtgcgaatcccagggtgaggtccagcccaacttctcgacgtcctccgagccccttctctcatcagctctcaacactcatgaactctcttctatccttccaattaaatgcccgaaggatgaagatcttcttgaacaaaagccagtgacctccgccgaacaagagagcgagaaaaatcacttaacaaccgctagcaactataataagtcagagtcgcaagagtccctggtgacaagtccaagcaaacccaagtctcccggggttgagaagcccattgtcaaacccactgcaggcgcaggcccccaggagacgaatatgaaagagcccttggccaccttggttgaccagtcgcctgaatccctcaagcgtaaatcatccctgacccaggaggaagcccccgtgagttgggagaaacgacctagagtgactgaaaatcggcagcaccagcagccattccaggtcagcccacagccattcttgaatcggggggatagaattcaggtccggaaggttcctcccctgaaaatccccgtgtctcgaataagcccaatgccctttcatccctctcaggtgagccccagagcacgattcccagtgtcgattacttctcccaatcggactggcgcaaggactctcgccgatataaaggctaaagcgcagttagtgaaagcacagagggcagcggccgccgcagccgccgccgcggcagcagctgccagtgttggcgggaccatacctggcccaggacctggaggaggccagggccctggcgaaggcggggaaggccaaactgcccggggtggtagtcccggcagcgaccgggtcagcgagaccgggaagggcccaacgctggaactggctggcaccggatctagagggggaacgcgtgagctactgccctgtggtcccgagacgcaaccacagagcgagacaaagactaccccttcacaggctcagccacactccgtgtcgggtgcacagctccaacaaactcctcccgtcccacccactcccgctgtcagtggtgcttgcacctcagtcccctctcccgcccatatagagaaattggacaatgagaagctgaatccaacacgggccactgcgacagtggcaagcgtgtcccatcctcagggaccctcatcctgtcggcaagaaaaagccccttccccgacaggcccagcactcatttctggcgcctccccggtacactgcgccgctgacgggaccgtcgagctcaaagctggccccagcaaaaatatccccaaccctagtgcctctagtaagacggacgcgagcgtccccgtggccgttacgccgtcaccactcacctctcttctgaccaccgccacactcgagaagctgcccgtgccgcaggtgagcgcaactactgcacctgccggctcagcccctcccagctcgactctacctgcagcttcgtccctgaaaacacctgggacttcactgaacatgaacggccccactctgagaccaacttcttcaatccctgcaaacaatcctcttgttacgcagctgctgcagggcaaggacgtgccaatggagcagattttgccaaaaccgctgactaaagtcgagatgaaaactgtcccactcaccgccaaagaggagcggggcatgggcgccctgatcgcaactaacactacagaaaacagtacccgagaagaggtgaatgagaggcagagccaccctgccacacagcagcaacttgggaagacactccagagcaaacagcttccccaggttcctaggcctctgcagctattctccgccaaagaactgagagactcgagcatagacacgcaccagtaccacgagggtttaagtaaagccacgcaggatcagatcttgcagactctcatccagagggtgagaaggcaaaatttactaagcgtggtgccccctagccagtttaactttgctcattcaggtttccaactcgaggatatctcgaccagccaacgtttcatgctgggctttgccggccgccggaccagtaagcccgcaatggctggacactacttgttaaacatctctacctatggtcggggctctgagtcatttcgaagaactcacagcgtcaaccctgaagatagattctgtctgtcatcacccacagaggcccttaagatggggtacaccgattgtaagaacgctactggagaatcttcaagcagtaaggaggacgatactgatgaagaatcaactggggatgagcaagagtccgtcactgtgaaagaagaaccacaggtttcgcagtcggctggaaagggtgatacctcgtctggtccccactcccgggaaactctctccacaagtgactgtttggcgtcaaaaaatgtaaaagctgagattcctctgaatgagcaaacgactctgtctaaggagaactatttgttcacccgaggccagacattcgacgaaaagaccctggcccgcgatcttattcaggccgcccagaagcaaatggcgcacgcggtacgagggaaagcaattcggagcagtcctgagttgttcagctccacagttctgccgctgccggctgatagtccgacacaccagccactgttgcttccacccttgcaaacaccgaagctctacggcagccccacacagatcggcccatcttatagaggcatgataaatgtctctacttcctctgatatggaccataatagcgccgttcccggcagccaggtatcctcgaatgttggggatgtcatgtctttctccgtgactgtgaccacaatcccggcttctcaagcaatgaacccctcatctcatggccagacaattcctgttcaagcctttagtgaagagaacagcatagagggtacaccctcaaaatgctactgccggctcaaggctatgattatgtgcaagggatgtggggctttttgtcacgatgactgcattggaccctccaaactatgtgtgtcttgcctcgttgtgcggtag

SEQ ID NO: 178170 - DNA, 2757 bp, synthetic construct
  misc_feature 1..2757: note = Description of Artificial Sequence: Synthetic coding sequence
  source 1..2757: mol_type = other DNA
atgaagcggaccaagtgcgccgacatcgacgtggagacccccgactcaatcctcgttaacaccaatctacgagctctgatcaataagcatacctttagcgtactccccggtgactgtcagcagaggctgctgctcttactgccagaggtggataggcaagttgggcccgatgggttaatgaaattgaacggctccgccctaaataacgaattcttcaccagcgcggctcaaggctggaaggaacggctttccgaaggggagttcaccccagagatgcaggtaagaataagacaagagattgaaaaagaaaagaaggtcgaaccctggaaagaacaattttttgaaagttattatggccagagttctggcctgtccctggaagacagcaagaagctgaccgcctctcctagcgatcccaaagtcaagaagaccccagcagagcaacctaagtcaatgcccgtctccgaggctagcctgatccgtatcgtgccggtcgtctcccaaagcgagtgtaaggaagaagccttgcagatgtctagtcctggcagaaaggaagagtgcgaaagccagggtgaggtgcagcctaacttttcaactagcagcgaaccgctgctctcatctgcgctcaatacacacgaactctcaagcattctgccaattaaatgcccaaaggatgaggacttactggaacagaagcctgtgacttccgccgaacaggaatcagagaagaaccacttaaccacggccagcaattacaacaaatctgaatcacaggaaagcttggtcacttccccttccaagcctaagagccccggtgtggaaaagccgatcgttaagcccactgcaggagccgggccccaggagactaatatgaaagaacctctggccaccctcgtcgatcaatcccccgagagcctgaagcgcaagtcctcgctgactcaagaggaagccccagtatcctgggagaagcgccctcgagtgaccgagaatcgacaacaccagcaaccttttcaagtgtcccctcagccatttctgaatagaggcgacaggattcaggtcagaaaggtccccccattaaagattcccgtgagtaggatctcacctatgccctttcatcctagccaagtgtccccacgagcgcgtttcccagtcagtataacctcccctaacaggaccggggccaggaccctcgctgatatcaaagccaaagctcagctggtaaaagctcagcgcgctgctgctgcagctgctgcagctgctgctgccgccgccagcgtgggaggaacaattcctgggcccggacccggtggcggccaaggccccggcgaggggggtgagggtcagactgctcgcggggggtcccccggctcggatcgagtctcggaaacgggcaaaggacccacactggaattggccggcaccgggtcacgcggaggaacaagagaacttctgccatgcggacccgaaactcagccacaatcagaaactaagaccactccttctcaggcacagccccactcagtatcaggagcccagctccaacagaccccgccggtgccgcctacccccgccgtctccggggcttgtacttccgttcctagcccagcccacatagagaaacttgacaacgagaagcttaatccaaccagggcaacagcaaccgttgcatcggtcagtcacccgcagggacccagctcttgtcgccaggagaaggcccctagtcccacaggattccaacttgaagatatcagcacttcacaaagatttatgctcgggttcgctggacgcagaacctctaagccggctatggcaggacactacctgctcaatatcagcacttacggcagggggtcagagagttttcgccgtacacactccgtgaatccagaggatagattctgcctttcgtcccccacggaggcccttaaaatgggttacaccgattgcaaaaacgctaccggagagagctcatcaagtaaagaagacgacactgatgaggagtcaaccggcgacgagcaggagagtgtgacagtgaaggaagagccacaagtctctcagtctgcagggaaaggggatacaagctctggcccccacagtagagaaacattatcaacaagtgactgcctcgcctccaaaaatgttaaagccgagatccccctgaacgaacaaacgaccctgtctaaagaaaactatctcttcactcgcggccagacctttgatgagaaaaccctcgcaagggatctgatccaagctgcgcagaaacagatggctcacgcagtgagagggaaggcaatacgtagctcacccgaactattttcctccaccgtgctccctctcccggcggattcccccacacatcagccactgctcttgcctcccctgcagaccccaaagctctacgggtcccctacgcagatcggcccatcttatcggggcatgataaatgtcagcacatctagtgacatggatcacaactctgctgtccctggttctcaggtaagctcaaatgtgggcgacgtgatgtccttcagcgtaacagtcacgacaatcccggctagtcaggccatgaacccaagtagccacggacagactatccccgtgcaagcatttagcgaagaaaattcaatcgagggcacccctagtaaatgttattgcagactgaaggccatgatcatgtgcaaggggtgtggagctttctgccacgacgactgcatcggacccagtaagctgtgtgtgtcttgcctcgtggtaagatag

SEQ ID NO: 178171 - DNA, 4308 bp, synthetic construct
  misc_feature 1..4308: note = Description of Artificial Sequence: Synthetic coding sequence
  source 1..4308: mol_type = other DNA
atgcgggagaagggccggcggaagaagggccggacctgggccgaggcagccaaaactgtcttggagaagtatccgaatactcccatgagccataaagaaattctgcaggtgatccagcgagaaggactgaaggaaatccggtcaggcaccagcccactggcctgcctgaacgctatgttgcataccaatagcagaggagaggagggaatattttacaaggtaccgggccggatgggtgtctatacccttaaaaaagatgtgcccgatggagttaaagagctctcagagggaagtgaggagtccagcgacgggcagtccgacagccaaagctccgagaattcctcctctagctcagacggcggttccaacaaggaggggaagaagagccgctggaagcggaaagtgtcatcatcaagcccccagtcaggctgtccaagtcctaccattcctgcaggaaaggttatcagcccgagtcagaaacacagtaagaaagcccttaaacaggctctaaaacaacaacagcaaaaaaagcagcagcagcagtgcaggccatccatatctatctccagcaatcagcatcttagcttaaaaaccgttaaagccgcaagcgattccgtgcctgccaagcccgccacttgggagggaaagcagtctgacgggcagactggctccccccagaattctaattctagcttttcttcctccgttaaggtcgagaacactctgctgggactggggaaaaaatcctttcaacgctccgaaagactgcacacgagacagatgaagcgcactaaatgcgccgatatcgacgtggagacgcctgacagtatcctggtcaacacaaacctccgggccttaatcaataaacatacctttagcgttctccctggagactgtcagcaaagactcctgctcctgctgccggaagtggataggcaggtggggccagatggattgatgaaattgaatggatctgctctgaacaacgagtttttcacctctgccgctcagggctggaaagaacgactctcagagggagagtttactccagaaatgcaggtgagaattcgtcaagagattgagaaggaaaaaaaggtggaaccatggaaggagcagtttttcgaaagttactacggccagtcaagcggacttagtctagaagattccaaaaagctcaccgcctctcctagcgaccctaaagttaaaaaaaccccggctgagcaaccaaagagcatgcctgtctccgaggcttcgctcataagaatcgtgccagtggtcagccaatcagagtgcaaggaggaagcactacagatgtcatccccaggtcggaaggaggagtgtgaatcacaaggcgaagttcagcctaatttctccacgtcaagcgagcccctcctgagtagtgccctgaatactcacgagctttcctccattttacctatcaagtgtcctaaagatgaggatttactggagcagaagcctgtgacatcggccgaacaggaaagcgagaagaaccacctcacgacggcaagtaattacaacaaatcagagtcacaggaatccctcgttacctccccaagcaagccaaagagtccaggcgttgagaagcccattgtgaaaccaaccgcgggagccggcccccaggaaactaatatgaaggagcctttagccacacttgtggaccagagtcctgagtcactgaagcgcaagtcatctctgactcaagaggaggccccggtcagttgggaaaagaggcctagagtgaccgagaataggcaacatcagcagcctttccaggtgagcccccagccatttttaaatcgaggcgacagaatccaggtgcgcaaggttccccccctaaagattccagtgtcccggatctctcctatgccctttcacccaagccaggtttctccaagagccagattcccagtatctattacttctccaaaccgaactggtgcccggactcttgccgacatcaaagctaaagcccaactagtcaaggcgcagcgcgcagccgctgccgctgctgccgctgcagctgccgcggcttccgtcgggggcaccataccaggcccaggtcccggcggcggccagggacctggcgagggtggcgagggacaaaccgccaggggaggtagtccaggttccgatcgggttagtgagaccggcaaggggcctacactggagctagcagggacaggtagcagaggaggtacacgtgagctgctgccatgtggccccgaaacccaaccacaaagtgagacaaaaacaacaccttctcaagcacagcctcactccgtgagcggcgcccagctccagcagaccccccccgtgccaccaactcccgccgttagcggggcttgcacttctgtgccgagccccgcccacatcgaaaagttggacaatgaaaagctaaatcctactagagctactgccaccgtggccagtgtttcgcatccgcaggggccctccagttgccgccaggaaaaggctccatctcccaccggtccagctctcatttcaggtgcatctccagtgcattgcgcggcagatggcacggtggagttgaaggctgggccaagtaaaaacatccccaacccttccgcttcaagcaagacagacgcatctgtacctgttgcagtgactccatctcccttgaccagcctgttaacgaccgcaaccctggagaagctgccagtccctcaggtgagtgcaacaacagccccagccgggagtgccccacctagctccacacttcctgcggcgagcagcttgaaaacgcccggtacctcattaaacatgaacggcccaaccctgcgacccacttcatctattcctgcaaacaatccactggtgacacagctgcttcaagggaaagacgtgccaatggagcagattctacctaaacccttgaccaaagtcgaaatgaaaaccgtcccactgaccgcaaaggaggagagagggatgggggctcttatagctaccaataccaccgaaaacagcacccgtgaggaagtcaatgagcggcagtctcatcccgcaacacaacagcagctgggtaagactcttcagtcaaagcagctgccccaggttccccgccccctgcagttgttttctgccaaggagctgcgagatagcagtatcgatacacatcaataccacgaggggctcagcaaggcaactcaggaccagatattgcaaacactgattcaaagggtccgcagacagaacctgctctcagtggtgccaccctcccagttcaatttcgcccactctggcttccagctggaggatatatcgacgagccagcgattcatgctgggctttgcaggccgacgaacctccaagccggccatggccggccactaccttcttaacataagtacttatgggcggggctcagagtccttcagacggacgcacagtgtcaatcctgaagatcggttttgtctatcctctcccactgaagcactgaagatgggatataccgactgcaagaatgccactggagaatcttcatctagtaaagaggacgacacggacgaggagagtaccggggacgaacaggagagcgtgacagtcaaggaagaaccccaagtgtctcagagtgcgggaaaaggtgacacttcttcaggcccacacagtagagagacattgtcaacgagcgactgcctcgccagtaagaatgtcaaggctgaaattccacttaacgagcagacgacacttagtaaggagaattacctgtttacaagagggcaaacatttgacgagaagacattagctcgggatctcatccaggccgcccaaaaacagatggctcacgcagtgaggggaaaagctattcgaagctcccccgagctcttttctagcacagttctgcccctgcctgcagattctccgacccatcagccgcttctccttcctcccctgcaaacccccaaattgtatggatccccgactcagatcggtccttcttatcgaggcatgataaatgtgtcgactagtagcgatatggaccataatagcgcggtcccaggaagccaggtctcttctaatgtgggggacgtgatgtccttcagtgtcactgttaccaccattcctgctagccaggcaatgaaccccagctcgcacggccaaacaatccccgtgcaggcatttagcgaggagaattccatcgaagggacaccgagtaaatgttactgtcggttaaaggcgatgatcatgtgcaagggttgcggggctttctgccacgatgattgcatcggaccgtccaagctctgcgtctcttgtctggtggtccggtag

SEQ ID NO: 178172 - DNA, 6747 bp, synthetic construct
  misc_feature 1..6747: note = Description of Artificial Sequence: Synthetic coding sequence
  source 1..6747: mol_type = other DNA
atgaaggacaagcggaagaagaaggaccggacctgggccgaggccgctcgacttgctctggagaaacatccaaatagccctatgactgctaaacagattctggaggtgatccagaaagaggggctcaaagaaacatcagggacttcgcccctggcatgtttgaatgccatgctgcacaccaatactagaatcggcgatgggacattctttaaaatcccaggtaaatctggcctctacgcacttaagaaggaggaaagttcttgtccagccgatggaacactggatttggtatgtgaaagcgagttggacggaacagatatggcagaagctaatgctcatggagaagagaatggcgtctgctcaaaacaggtgactgacgaagcctcatccacgagggacagctctctaaccaacactgcagtccaatctaaattagtctctagctttcaacagcacaccaaaaaggctcttaagcaagctttaaggcagcagcagaagcggagaaatggtgtctccatgatggttaacaaaacagtgcctagagtggtgctgacacctctgaaggtttccgacgaacagagcgatagtcccagcggctccgagtctaaaaacggcgaagcagattcatctgataaggaaatgaaacatggccagaagtcgccaacaggaaagcagacatcacagcacctgaagcgtcttaaaaagagtggtttaggccatctgaagtggaccaaagctgaagatatagatatcgaaacaccggggagtatacttgtgaacacaaacctgcgggcactaattaacaaacatacattcgcaagcttaccccagcatttccagcagtatctgctgctgttgttacccgaggttgataggcagatgggctcagatgggattttgcggctctctactagcgcccttaacaatgaattctttgcttacgcagcccaaggctggaagcagcgtcttgcagagggagagttcactccagagatgcagctgagaatcaggcaggagatagagaaagaaaaaaagaccgaaccctggaaggaaaagttcttcgaaagattctacggagaaaagctagggatgtcacgggaggaatccgtcaagctcaccaccgggccgaataatgccggtgcccagtcttctagcagttgtggcacatccgggctgccagtgtctgcgcaaaccgccttggctgaacaacagcccaaatccatgaaatcccccgcttctccagaacctggcttttgcgcaaccttgtgcccaatggtggaaatcccaccaaaggacattatggccgagttggagtctgaggatatactcattccagaggaaagcgtcattcaagaggagatcgctgaggaagttgagaccagcatctgcgaatgtcaggacgagaaccacaaaactatcccagagttcagtgaggaagctgaaagtctcaccaactctcacgaagaaccacagattgccccccccgaagataatctggaaagttgcgtcatgatgaacgacgtcctggaaacattgcctcatatcgaagtgaagattgagggaaaatccgagagcccccaggaggagatgactgtggtcattgaccagctcgaggtttgcgactcgctgattcccagtactagtagcatgactcacgtcagcgatactgaacacaaggagtccgagaccgccgtcgagacttctactcctaagatcaaaacaggtagttctagcctcgagggccagtttccaaatgaaggcatcgccattgacatggagttacagtctgacccggaggaacaactgagtgagaacgcatgcatcagtgaaacctcattttcatctgagagtcctgagggcgcctgtacgagcctgccctctcctggtggagaaactcagagcacttctgaagaatcctgcaccccagctagcctcgagactaccttttgcagtgaggtaagctccaccgagaacactgacaagtataaccagcgcaatagcacagacgaaaattttcacgcatcacttatgtctgaaatatctcccataagtactagccctgaaatcagcgaggcatcccttatgagcaacctgccactcactagcgaggcctccccagtgagcaacctccccctcacgtctgagacgagccccatgagcgatctgccactcacatcagaaaccagctccgttagtagcatgctccttacatctgagacaaccttcgtaagctctctgcctctgccgagcgaaacctctccaatcagcaacagctccatcaacgaacgcatggcacaccagcaacgtaagtctcccagcgtttccgaggagcctctgtcaccgcagaaggacgaatcctccgcaaccgccaaaccattgggagagaacttaacctcccagcagaaaaatctctctaatacacccgaaccgataattatgtcaagctccagcatagcacctgaggcctttccttccgaggacctacataataaaaccctgtctcagcagacctgcaaatcacatgtggataccgaaaagccctatccggcctcaatccccgaacttgccagcaccgaaatgatcaaggtgaaaaaccacagcgttctgcagaggacagagaagaaagtgttgccttctcccttagaactctcagttttttcagagggaacggataacaaaggcaacgagcttccctctgccaagctgcaggacaagcagtatatctcgtcagtagataaagccccattcagtgaaggttctcggaataagacccataagcagggcagtactcagtctaggttggaaaccagccacacttccaaaagctcagaaccttccaagtcaccagatggcatcaggaacgaatcacgagacagtgagatctccaaacggaaaacggccgagcagcactccttcgggatatgcaaagagaagcgagctcgcattgaggatgaccagagtactcgcaatatcagttctagcagtccacccgagaaagaacagcccccgcgggaagaacctcgcgtccccccgcttaagattcaattgtccaaaatcggcccgcccttcatcatcaaatcccagcctgtgagcaagccagagagtcgcgcctctacgtcaacttcagtgtccggggggaggaacacaggagcccggaccctggccgatataaaggcccgtgctcagcaggcgagagcccagcgtgaggccgcagctgccgcggccgtggccgcagcagcttcgattgtaagtggcgcaatgggatctcccggtgaaggcggtaagactagaactctagctcatatcaaggaacaaacgaaggccaaactgttcgccaaacatcaggctcgcgcgcatctattccagacctctaaagagacacgactaccaccaccacttagttcaaaagagggaccaccaaacctggaggtgagctccaccccagagactaagatggaaggcagcacaggtgtgattatcgttaacccgaactgccgatctccgtcaaacaagtcagcccacctacgcgaaactactactgttctgcaacaatctctcaacccgagtaaactcccagagactgcaacggacttgagcgtgcacagtagcgatgagaatattcccgtctcccatcttagtgaaaaaatcgtgtcctcaacctccagtgaaaattccagtgtgcctatgctgttcaataagaatagcgttcccgtgtccgtgtgctctacagccatctctggagcaataaaagagcacccttttgtcagttccgtcgataagtccagcgtattgatgtcagtggattctgctaatactaccatcagcgcgtgtaatatctcgatgctgaagacaatccagggcactgatacgccgtgcatagctattatcccgaagtgtatagagtctacacccatcagcgctacgacagaaggctcttctatatctagtagcatggacgacaagcaattgctgatttctagctccagtgcttctaacctggtatccacccagtacacttctgttcctaccccaagcatcggtaacaatctcccaaatttatccactagtagcgtgctaatccccccaatgggaatcaacaatcgattcccatccgaaaaaatagccataccgggctcagaggaacaagctaccgttagcatgggaacaacagtaagagcagctttaagctgctctgattcggtggccgtgacggattccctcgtggcacatcccacggtagctatgttcacggggaacatgttgacaatcaattcatacgattcgccgccaaagctttcagccgagagtctggacaagaattcaggcccgcgcaaccgggccgataacagcggtaaaccccagcaaccacctggcgggttcgctccagccgcaataaaccgttccattccctgcaaagtgattgtggatcactccacaacactgaccagttcgcttagcctcaccgttagtgttgagagttctgaagcgagcctggacctgcaaggcaggccagtccggaccgaggcatctgtgcagccagtcgcctgtccccaggtgagcgttatcagcaggcccgagcctgttgccaatgaggggatagatcactctagtacatttatcgccgcctcagccgccaagcaggattctaagactctgcccgccacatgcacgtcattgcgggagttacccctggtcccggacaagcttaacgagcccacggcaccttctcacaactttgccgaacaggcaaggggccccgcgcctttcaagagtgaggctgacaccacttgctccaatcagtacaacccatctaatcggatttgttggaacgacgacgggatgcggtccaccgggcagccccttgtaacgcactcaggaagtagtaagcaaaaggaatatctcgaacagagttgccctaaggctataaaaacagaacatgcaaactacctaaacgtatctgagctgcatccaagaaatcttgtgacaaatgtggctctgcctgtgaagagcgaactgcacgaggcagataaaggtttccgcatggacaccgaagacttccccgggcccgaacttccccctcccgccgctgagggcgcaagctccgttcaacagactcaaaacatgaaagccagtacaagctccccaatggaggaggcgatcagcctcgctaccgacgccttgaaaagagtgcccggagccggctcttcaggttgtcgcctgtcatcagtcgaagccaataaccctttagtgactcaactcctgcagggtaacttacctctcgagaaagtgctgccccagcccaggcttggcgccaagctggagatcaaccggcttccactcccccttcaaacgacaagtgtgggtaagaccgcacccgaacggaatgtggagattccaccatcgtcaccaaaccctgatgggaagggctacctagctggaacactggcacccctgcagatgaggaagcgggagaaccatcccaaaaaacgagttgccaggaccgtgggagaacacacacaggtcaaatgtgaacccggcaaactgctcgtagagccagatgtgaagggggtgccatgcgtgatatcatcaggcatcagtcagctgggccattcgcaaccattcaagcaggaatggctcaacaagcatagcatgcagaatagaattgtacacagtcccgaggtgaaacagcaaaagcgcctgttaccctcctgttcctttcaacagaacctgttccacgtcgataagaatggtgggtttcacactgacgcaggcacaagccataggcagcaattctaccaaatgccagtggcagcacgcgggcccataccaaccgctgctttactccaggcatcgtccaagacacccgttggctgcaatgcctttgctttcaatcgtcacttggagcagaaaggcctgggcgaagtgagcttgtctagcgcacctcaccaactgagattagctaatatgctgagcccaaacatgccgatgaaggagggagatgaagtgggcggcactgcacatacgatgcccaacaaagccctggtgcatccacctcctcccccaccccctccccctcctcctccactggctctacctccacccccccccccccctcccccattaccaccgccactcccaaacgccgaggttcccagtgaccagaagcagccgcctgtaaccatggagacgactaaaagattgagctggccacagtccaccggaatctgctcaaacatcaaaagtgagcccctgagcttcgaggaagggctgtcatcaagctgcgaactgggcatgaagcaagtgagctacgaccagaatgagatgaaggagcagctcaaggcattcgcgctcaaatcagccgacttttctagttatcttctgtccgaacctcagaagccttttacccaattagctgctcaaaagatgcaggtgcagcagcaacagcagttgtgcggtaattatcctaccatccattttggcagcacatcttttaagcgggccgcgtccgcaatcgaaaaatctattggtatactcggtagcggctcaaaccccgctacaggcctctccggccaaaacgcccagatgcccgtgcaaaacttcgcggactcaagtaatgctgacgagttggaattaaagtgtagttgtcgtttaaaggccatgatagtgtgcaaaggctgcggtgctttttgccacgacgattgcattgggccgtcaaaactgtgcgtcgcttgtctggtggtacggtag

SEQ ID NO: 178173 - DNA, 2307 bp, synthetic construct
  misc_feature 1..2307: note = Description of Artificial Sequence: Synthetic coding sequence
  source 1..2307: mol_type = other DNA
atgaacggcgacagccgggccgccgtggtgaccagccccccccccactacggcgcctcataaggagcgatacttcgaccgcgtcgacgagaacaacccagagtacctccgtgagcgcaacatggctcccgacctgcgtcaggactttaatatgatggagcaaaaaaagagggtaagcatgattctgcagtcaccagcgttttgtgaagagctggaatccatgatccaggagcagtttaagaaggggaaaaaccccactggactgttagcactccagcagatcgccgacttcatgacgacaaatgtacctaacgtttacccagccgcccctcagggcggtatggctgccctcaatatgtcgctcggcatggtaacccctgtgaatgatctaagaggctccgattccattgcctacgacaagggcgagaagcttctccggtgtaaactcgccgccttttacagactcgcagatctgtttggctggagtcaactgatttacaaccacatcactacccgggtgaacagcgagcaggaacattttctgattgtcccctttggcctgctttactccgaagtcaccgccagctccctcgtgaagataaaccttcagggggatatcgtcgatcgggggtcgacgaatctcggagtgaaccaagcaggattcaccctccactcagccatctacgcagcgcggccggatgtgaagtgcgtggtccacatccacacaccagctggcgctgccgtcagtgcgatgaaatgcggcctgctgccaatttctcccgaagccctgtctctgggagaggttgcataccatgactaccacgggattctggtggatgaagaggagaaggtgctgatacaaaagaacctgggccccaagagcaaggtgctcatactcaggaatcacggcctggtcagcgttggagaatctgtggaagaggccttttactacatccacaacttagtggttgcttgcgaaattcaggtgagaactcttgcttctgcaggcgggcctgacaacctcgtactgctcaatcccgagaagtacaaagcgaagtcccgctcacctgggagtcctgtaggcgaaggcacaggatccccacctaagtggcagatcggtgagcaggagtttgaagcgctcatgaggatgctggacaatctgggctatcggacgggctacccatatcggtaccccgctcttcgggagaaatccaagaaatattctgatgttgaagttcccgcttccgtcaccgggtacagctttgcctctgatggcgactcaggaacatgctctccactccggcattcctttcagaaacagcagagggaaaagacacggtggctgaattcaggccgcggggacgaggcttcagaggaggggcaaaacggctccagtccaaagtccaaaacaaaagtgtggaccaacattactcacgatcacgtaaaacccctgctgcaatcccttagttcaggagtttgtgttccttcttgcatcacaaattgtctgtggacaaaagaggacggtcataggacaagcacctctgctgtgccgaatttgtttgtcccgctgaacacaaacccaaaagaggtgcaggaaatgaggaacaaaattcgggaacagaacttgcaggacatcaagactgcaggcccccagagtcaggttctgtgtggtgtggtgatggataggtcccttgtccagggcgagctggtcaccgccagcaaggctatcattgaaaaggagtaccagccacacgtcatcgtatcaacaaccggccctaaccccttcactactctgactgatagagagctcgaagaatacaggcgggaggtcgagcgaaaacagaaaggcagtgaagagaacctggatgaggctagggagcagaaggagaagagccccccagaccagcccgccgtgcctcacccacctccatctacccccataaaactggaggaagacctggtgcccgagccaactacaggcgatgactctgacgctgcgaccttcaagcctaccctgccagacctgagccccgacgaaccatccgaagccctggggttcccaatgctggaaaaagaagaagaggcacataggcccccgagccctactgaagcccccacagaagcaagtcccgaacctgctccggatcccgctcccgtggcggaggaagcagccccttctgccgtggaagagggcgctgccgccgacccgggatctgacgggagcccggggaagtcaccaagtaaaaaaaaaaagaagttcaggaccccaagttttctcaaaaagtcaaagaagaagtccgatagttag

SEQ ID NO: 178174 - DNA, 1989 bp, synthetic construct
  misc_feature 1..1989: note = Description of Artificial Sequence: Synthetic coding sequence
  source 1..1989: mol_type = other DNA
atgaacggcgacagccgggccgccgtggtgaccagccccccccccaccacggccccccataaggaacggtattttgaccgagtggacgaaaataatcctgagtatttgcgcgaaagaaacatggcacccgatctacgtcaggattttaatatgatggaacagaagaagcgggtgagtatgatacttcaatctcctgcattctgcgaggaattggagagcatgattcaggagcagtttaagaagggaaagaaccccacaggactgctggcgctgcaacagatagccgacttcatgacaaccaacgtgcccaatgtctaccctgccgccccccaagggggtatggcagcattgaacatgtcgcttggcatggtgacccccgtcaacgatctccggggaagcgacagcattgcctacgacaaaggagaaaaattgctgagatgcaaacttgccgctttttataggctggccgaccttttcggttggagtcagcttatctataatcatatcacaactagggttaacagtgagcaggagcactttctcatagttccatttggtctgctgtatagtgaggttactgctagttctctggtaaagatcaatctccaaggggacatcgtggacaggggttccaccaatttgggagttaatcaagcgggcttcacactacacagcgcgatctacgccgcacgccccgatgttaagtgtgtagtgcatattcacacgccagcaggcgccgccgtcagcgccatgaagtgtggcctgctgcccattagccctgaagcattaagtctaggcgaagtagcctaccacgattatcacggaattttagtagatgaggaggaaaaagtgttaatccaaaagaaccttggccctaaatccaaggtcctgatcctgagaaaccacggactcgtgtcagtcggtgagagcgtggaggaggcattctactatatccataacctggtcgtagcctgcgagatacaggtgagaaccttagcttctgctgggggtccggataatcttgtcctcctgaatccagagaaatacaaagctaaatcccgttccccaggctcccccgttggcgagggcaccggtagcccgcctaagtggcaaattggagaacaggagtttgaagcactcatgaggatgttagacaacttgggatatcggactggatacccctataggtacccagccctccgggagaagtctaagaagtattctgacgtcgaagtgcctgcatcggtgacaggctattcctttgctagcgacggagactccggaacatgttcgccgctgcgccatagctttcagaaacaacagagggagaaaaccagatggttgaacagcggtcggggagatgaagctagcgaggagggccagaatgggtccagcccgaaatcaaagactaagtggaccaaagaagacggccacaggacctcaactagtgccgtgccaaatcttttcgtccccctaaataccaaccctaaagaagtgcaagaaatgcgaaacaagattagagagcaaaatctgcaggacataaaaaccgcggggccccagtctcaggtcctgtgtggcgtggtgatggaccgatctctggtccaggacgcacctctgtccgattgtactgagacaatcgagggactggagttgaccgaacagacattcagccccgctaaatcattgtcttttcggaaaggcgaattggtgacagcaagtaaagccattattgagaaagaatatcaacctcatgtgattgtaagtaccaccggacccaatccttttacaacgctgactgaccgcgaactagaggaatatcgcagggaggttgaaaggaagcagaaaggttcggaggaaaacctggacgaagcccgggaacagaaagagaagtcaccgccagatcagcccgcagtgccccatccccccccttcaaccccaatcaaacttgaagaaggtgatggctgtgctagggagtacctgcttccttag

SEQ ID NO: 178175 - DNA, 1989 bp, synthetic construct
  misc_feature 1..1989: note = Description of Artificial Sequence: Synthetic coding sequence
  source 1..1989: mol_type = other DNA
atgaacggcgacagccgggccgccgtggtgaccagccccccccccaccacagcgccgcacaaggagagatactttgatcgtgtagacgagaataaccccgagtaccttagagaacggaatatggcacctgacctgcgccaggacttcaacatgatggaacagaaaaagagggtcagtatgatcctgcaaagtcctgctttttgtgaggagctggagagcatgatccaggagcagtttaagaagggtaaaaatcccactggccttctggctctgcagcaaattgccgatttcatgaccactaacgtgcctaatgtctacccagcggcccctcaaggaggaatggccgccctcaacatgtcactgggaatggttactccagtcaacgaccttcgcggctcagattctatcgcgtacgacaagggcgagaagctgttgcggtgcaaattggcggcattttacagactagcagatctgttcggatggtcacagctcatttataaccatatcacaacgagggtcaacagcgaacaggaacatttccttatagtcccattcggactgctatactctgaggtaactgctagcagtttggtgaagattaatttacagggcgacatcgtggatcggggctctaccaatctgggggtcaatcaggccgggtttactttgcatagcgccatctatgctgcccgacccgacgtgaagtgcgtagtacatatacatactcctgccggggctgcagtgagtgctatgaaatgtggacttctgcccatctcacctgaagctctgtccttgggcgaggtagcctatcacgactatcacgggattctggttgatgaagaagagaaggtactgatccagaaaaatttgggaccaaagagtaaagtactgattttgcgaaatcacggacttgtttctgtgggggaatcagtggaagaagccttctattacattcacaacctcgttgtggcatgcgaaatccaagtgagaacgttagctagtgccggcgggccagataatctcgtacttttaaacccagaaaagtacaaagccaagtcacgatcccctggttcccctgttggggaggggactgggtcccccccgaaatggcagatcggcgagcaggagtttgaggcactgatgcgtatgctggataatctgggctacagaacaggctatccgtacaggtaccctgcccttcgagaaaaatccaagaagtattctgacgtggaagttccggcatcggtcaccggttatagcttcgctagtgacggcgactctggcacgtgctcacccttgaggcactcgtttcagaagcaacagagggaaaaaaccagatggctgaattccggtagaggagacgaggcttctgaggagggacagaacggttccagtccgaaaagtaaaaccaaggtctggaccaacattactcatgaccacgtcaagccattgctacagtccttgtcttccggagtatgtgtgccatcatgtataactaattgcctatggactaaggaggatggacatcggacatcaacgtcggctgttccaaatcttttcgttcccctgaacactaatcccaaagaagtccaggagatgaggaataagatccgtgagcagaacctgcaggacatcaaaactgcgggccctcagagccaggtgctctgtggagtcgtcatggatcggtcacttgttcagggcgagctagtcactgcctcaaaggctatcattgagaaggagtaccaaccacatgtcattgtatccaccacagggcccaacccattcacaaccctaacagatcgggagcttgaggagtacagaagagaggtcgagagaaagcagaagggcagtgaggagaacttggacgaagctcgggaacagaaagagaaatcgccgcctgaccagcccgctgtaccccatccacccccctcgactccaatcaaactcgaggagggagatggctgtgcacgggagtatctcctgccatag

SEQ ID NO: 178176 - DNA, 1203 bp, synthetic construct
  misc_feature 1..1203: note = Description of Artificial Sequence: Synthetic coding sequence
  source 1..1203: mol_type = other DNA
atgaacggcgacagccgggccgccgtggtgaccagccccccccccacgaccgctccccataaggaacgatacttcgacagggtggacgagaataatcccgaatatctgagggagaggaacatggctccagatcttcggcaggatttcaatatgatggagcagaagaagagagtaagtatgatcctccaatctcccgccttttgcgaggaacttgagtctatgatccaggagcaattcaaaaagggcaaaaacccaaccggtctgctcgccctccagcagatcgctgactttatgacaactaatgtcccaaacgtctatcctgctgctcctcaggggggtatggccgctttaaacatgagccttgggatggttaccccagtaaacgacctacggggtagcgacagcatcgcctatgacaaaggcgagaagctcctccgctgcaagctggccgcattttaccggttagcagacctgttcggatggagccagttgatttacaaccatattaccactagggttaattcagagcaggagcattttttaatcgtcccctttggtcttttatattccgaagtcactgcttcatctcttgttaaaattaacttgcagggagatatcgtcgaccgcgggagcaccaatctgggggtgaaccaggccggctttactttgcactctgccatatacgccgcgcggccagacgtaaaatgcgtggttcatattcatacaccagcgggagctgctgtgtccgcaatgaaatgtgggttgctcccaatttctcctgaggcccttagccttggtgaggtggcttatcatgattatcatgggatcctggtggacgaggaagaaaaggtgctgatccagaagaacctggggccaaagtccaaagtcctgattctcagaaatcatgggctagtgtcagtcggtgaatccgtggaagaggccttttactacattcacaatctggtcgtggcatgcgaaatccaggttaggaccctggcttctgctggaggtccagataatctggtgcttctgaatccagaaaaatacaaagccaagtctagatccccgggatccccagtaggggagggcactgggtctccgccgaaatggcagatcggagagcaggaattcgaagcgctcatgcgcatgctggataacttgggctatcggacatccagctcaggccgcagacaggacggctag

SEQ ID NO: 178177 - DNA, 1989 bp, synthetic construct
  misc_feature 1..1989: note = Description of Artificial Sequence: Synthetic coding sequence
  source 1..1989: mol_type = other DNA
atgaacggcgacagccgggccgccgtggtgaccagccccccccccacaaccgctccccacaaggagaggtactttgacagagtcgacgagaataacccggagtaccttagagagcgtaacatggcgccagatctccgccaggacttcaatatgatggagcagaaaaaaagagtgtcgatgattctccaatcccctgctttctgtgaagagctggagtcaatgatccaagagcaattcaagaaaggaaaaaaccccaccggcttgctggccctgcagcagatagctgattttatgaccactaatgttccaaatgtgtaccctgccgcccctcagggcgggatggcagcccttaacatgtctctgggtatggtgactcccgtaaatgatctcagaggatcagactcaatcgcctatgataagggtgagaaattgctaaggtgtaagctggccgctttctacagactcgccgacctttttggttggtctcagctgatttacaaccacattactacccgggtgaactccgaacaagaacacttcctcatcgtcccatttggcctgctatacagcgaggtcaccgcttccagcctggttaagatcaatctgcagggagatattgtggacaggggatccacgaacttaggcgtgaatcaggctgggttcacactgcatagcgctatttacgcggcccggccagacgttaagtgcgttgtccacatccacacccccgcaggcgctgcagtgagcgctatgaagtgtggtctcctgcccatctcacccgaagctcttagtttaggagaggtggcctatcatgattaccacggaatacttgtggatgaagaagagaaggtgttgatccagaagaacctagggccgaagtccaaggtgttaatccttcgtaaccacggactggtgtcagtgggagaaagcgtggaggaggctttttactatatccacaacctggtggtggcatgcgagatacaagtgcggactctggccagcgccggaggcccggataacctggtcttgttgaacccggagaaatataaagcaaaatctagaagtccagggagccctgttggcgagggaacagggtcgccaccaaagtggcagatcggcgaacaggagtttgaggcactaatgaggatgctggataacctcggctatcggaccggctatccttataggtacccggcattaagagagaaaagcaaaaagtactccgacgtcgaggtgccagcctcagtgactggttattccttcgcctctgatggcgatagtggcacatgctcccccctgagacattcgttccagaagcagcagcgcgagaagacccgctggctgaacagcgggagaggggacgaggccagtgaggaaggtcagaatgggtctagccccaaaagcaaaactaaggtgtggacgaacatcacacacgatcatgttaaacctttactccagagcctgtcctccggggtatgcgtgccctcttgcattaccaactgtttgtggaccaaggaggacggccataggacatcgactagtgccgtacctaatctgttcgtccctttaaataccaatccaaaagaagtccaggagatgcgtaataaaatcagggaacagaacctgcaggacattaaaaccgccggcccccagtctcaggtattatgtggcgtggtgatggatcggtcactagtccagggggagctggtgaccgcaagtaaagctattatcgaaaaggaataccaacctcacgtgatagtcagcacgacagggccaaaccccttcacaactctgaccgatcgggagctggaggaatacaggagagaggtagagcgaaagcaaaaggggagcgaagagaatctggacgaagctagggagcagaaggagaagagccccccagaccagccggctgtgcctcaccctccaccctccacaccaattaaactggaggagggagatgggtgcgctagggagtacctgctcccctag

SEQ ID NO: 178178 - DNA, 2214 bp, synthetic construct
  misc_feature 1..2214: note = Description of Artificial Sequence: Synthetic coding sequence
  source 1..2214: mol_type = other DNA
atgaacggcgacagccgggccgccgtggtgaccagccccccccccactaccgctccgcataaggaacgctatttcgatcgggtggatgaaaacaatccagagtacttgagagagcggaacatggctccagacctgcgccaggatttcaatatgatggagcagaaaaagagggtgagcatgatactccagtcccccgccttctgtgaggagttagagagtatgatccaagagcagttcaaaaaggggaagaatcctaccggcctgctggcactgcagcagatcgccgattttatgactactaacgttcccaacgtctatccagctgcaccgcagggaggcatggctgccctgaacatgtcgttgggcatggtcacacctgtgaatgacctgaggggatcagattccattgcctatgacaaaggggagaagctactgcgctgcaaattagctgctttttaccggctcgccgacctgtttggttggtctcaactgatctacaaccatatcaccacccgggtgaacagcgagcaggagcacttcctaatcgtgccgtttggcctactctatagtgaggtgaccgcttcaagcctggtcaagattaacctgcagggcgacatcgtggaccgcggcagcacaaatttgggtgtgaatcaggcagggttcaccttgcactctgcaatttacgctgctaggcctgatgtgaagtgtgtcgtccatatacatacgcctgccggcgctgctgtgagcgcgatgaaatgcggactgctccctatcagtccagaggcgctgtccctgggagaagtagcctaccacgattatcatggcattttagtagacgaggaggaaaaagtgctgattcagaaaaaccttgggccaaaatccaaggtgctgatcctgcggaatcacggcttggtgtcagttggcgaaagtgtggaggaagcattctactacatccacaatctggtagtagcctgtgagatacaggtgcgaaccctggcctcggcggggggccctgataacctcgtgctgctgaaccccgaaaaatacaaagcaaaatcccgctctccgggatctcctgtgggcgagggcacaggaagtcctcctaagtggcagattggagaacaagagttcgaggcactcatgcggatgctggacaatctgggttaccggactggttacccgtatcgttaccctgccctacgcgaaaagagcaaaaaatattcagacgtggaggttcctgcatctgtgacgggatattccttcgcctccgatggcgactccgggacctgctcccctctccgtcacagtttccagaaacaacagcgagagaagactaggtggctaaactcagggagaggggatgaggcctctgaggagggacagaacggaagtagccccaaatccaaaaccaaatggacgaaggaggacggccaccgcacaagcacttccgccgtgcctaatctgttcgtgccacttaatactaatccgaaggaagtacaggaaatgcggaataagattcgcgagcagaatctgcaggatatcaagaccgccggtccgcagagtcaggtgttatgtggggtggtgatggatcgttcccttgtgcagggcgaacttgtaaccgctagcaaagctattattgagaaggaataccaaccacacgtcatagtttcaactaccggccccaaccccttcactactctgacagatcgggaattggaagagtataggagagaagtggagcggaagcaaaaggggagcgaggaaaacctggatgaagcacgcgagcagaaagaaaaatcccctcccgaccagcccgcagtaccccaccccccaccctcaacgcctatcaagctcgaagaggatttggtccctgaacctaccacgggagatgacagcgatgcagccacgttcaagcctaccctgcccgacttaagtcccgacgagccatccgaagcgctgggatttcctatgcttgagaaggaggaggaggctcacagacctcctagcccaacagaggcaccaactgaagcctcccccgagcccgccccagatcctgctccagtggctgaggaagccgccccctctgcagttgaggagggggctgccgcagaccctggatcagatgggagccccggaaagtctccatcaaagaaaaagaaaaaattcagaaccccctcttttctgaagaagagcaaaaaaaaatcagattcctag

SEQ ID NO: 178179 - DNA, 2214 bp, synthetic construct
  misc_feature 1..2214: note = Description of Artificial Sequence: Synthetic coding sequence
  source 1..2214: mol_type = other DNA
atgaacggcgacagccgggccgccgtggtgaccagccccccccccactactgctccccataaggagcgctactttgaccgagtggatgagaacaaccctgaatatctgcgcgaacgcaatatggccccagatctaaggcaggattttaatatgatggagcaaaagaagcgggtgagcatgatcctgcagagtcccgcattctgcgaagagttggagtcgatgattcaggaacagttcaaaaagggcaagaaccctaccggtttgctggcactccagcaaatcgccgattttatgacaacgaatgtgcctaacgtctatccggccgcgccacaggggggtatggctgctcttaacatgtccctggggatggttaccccggtcaatgatctccgtggatccgactctatagcctacgacaagggagagaaactattacgctgcaagctagccgccttttaccggcttgccgacttgttcgggtggagtcagctgatttacaaccacattaccacccgagtcaacagtgagcaggaacactttttgatcgtccctttcggcctcctgtactctgaggttacggcaagctccctggtgaagatcaacctgcaaggagatatagtggaccgaggcagcacgaatctaggtgtgaaccaagcagggttcacgctccactctgccatctatgctgcaaggccggatgtgaaatgtgtggtgcacatccatactcctgcaggggccgctgtgtctgctatgaagtgcggtctgctgcctatctcccctgaagcgctgtctctgggggaagtcgcctaccatgattaccacggcatcctggtagatgaggaggagaaagtcctcattcagaaaaatctgggccctaagtccaaggtcctgattctcaggaaccatggccttgtatccgtgggggaatctgtggaagaggctttttactacattcacaacctggtcgtcgcctgcgaaatccaggtcaggaccctcgcttccgcaggcggtccagataatttggtcctgctgaatcctgagaagtataaggctaaaagcaggagcccaggcagcccagtcggcgaaggtactggctctcccccgaaatggcagatcggagaacaggagttcgaagccctgatgagaatgttagataacttgggctaccgtactggatacccttaccgttatcccgccctgcgtgaaaaaagtaagaagtattctgatgtggaggttcctgcttctgttaccggttactcttttgcttcggatggggactcgggtacttgctctccgctccggcactccttccagaagcagcagagagaaaagaccaggtggctgaactccggtagaggggatgaggcctctgaggagggacagaatggaagctcacctaagagcaaaacaaagtggacgaaggaagacgggcaccgcacttccacaagcgcagtgccaaatttgttcgtccctctcaacacaaatcccaaagaggtgcaggagatgagaaacaagattagggagcagaacctgcaggacattaaaacagcaggcccccaatcccaggtgctgtgtggggtcgtgatggatcgtagcctcgttcagggcgaactggtgacagcctctaaagccattatcgaaaaggagtaccagcctcacgtgattgtcagcacaaccggccctaatcccttcaccacgctgacagatagggaactggaagagtacagacgggaagtggagagaaaacagaagggttccgaagaaaatctggacgaagcacgagaacagaaggagaaaagccctcccgatcaacctgccgtgccccacccccccccctctactcctatcaagctagaggaggacctggtccccgagccgacaacaggggacgatagcgatgccgccacctttaagcctactcttcccgaccttagtccagacgagccatccgaagccttgggtttcccgatgttggaaaaggaggaggaggcccatcgcccccctagtcccactgaagctcctaccgaagcctcccccgagccagcaccagatccagcacctgtggcggaggaggccgcccccagcgcagtcgaagagggcgccgcagccgatcctgggtcagacgggtctccagggaaaagcccatcaaagaaaaagaagaagttcaggacacctagtttcctgaaaaaatcaaaaaaaaaatcagactcttag

SEQ ID NO: 178180 - DNA, 414 bp, synthetic construct
  misc_feature 1..414: note = Description of Artificial Sequence: Synthetic coding sequence
  source 1..414: mol_type = other DNA
atgaacggcgacagccgggccgccgtggtgaccagccccccccccacaacggctccacacaaggaacgctacttcgaccgggtggacgaaaataacccagagtacctgagggagcggaacatggcccccgatctgagacaggatttcaatatgatggagcagaagaaacgggtctctatgatactgcagagccctgctttttgtgaggagctggaaagtatgattcaagagcagtttaaaaaggggaagaacccgaccggcttgctcgccctgcaacagatcgcggatttcatgacgaccaatgtgccaaacgtttatcctgcagctccccagggaggtatggccgccctgaatatgtccttgggaatggtcacaccagtcaatgatttgaggggctctgacagtatcgcgtag

SEQ ID NO: 178181 - DNA, 1899 bp, synthetic construct
  misc_feature 1..1899: note = Description of Artificial Sequence: Synthetic coding sequence
  source 1..1899: mol_type = other DNA
atgaacggcgacagccgggccgccgtggtgaccagccccccccccactactgctccacataaagagagatatttcgaccgagtggatgagaacaacccagagtacctccgcgagaggaacatggctcccgaccttcgccaggatttcaacatgatggagcagaaaaagcgggtttccatgatccttcaaagtccggccttctgcgaggaactggagtccatgatccaggagcaattcaagaaggggaagaaccccaccgggctgcttgccctccaacagatcgccgatttcatgacgactaatgtgccgaacgtgtaccctgcagctccccagggaggcatggctgcactcaatatgtccctggggatggtgacaccagtgaacgatcttcgcggctccgatagcattgcgtacgataagggtgagaagcttctgaggtgtaaattagccgcattttatagattggccgacttatttgggtggtcccagctgatatacaatcatatcaccacaagagttaattctgagcaagaacactttctgattgtcccatttggtttgctatactctgaagtaacggcatctagccttgttaagataaaccttcagggtgatatcgtggatcgggggagtacaaatttaggggtaaaccaagcggggtttaccctgcactctgcgatttacgctgctagacccgacgtgaaatgcgtggtacacatccacacgccggctggcgccgcagtgtcagccatgaagtgtggcctgttgccaatctcccctgaggccttgtctcttggcgaagtagcctaccatgattaccacggcatattggtggacgaggaggaaaaggtcctgattcagaagaatctcgggcctaagtccaaggtacttatcctgcgcaaccacgggctggtttctgtgggcgagagcgtcgaagaagctttctactatattcacaatctcgtggtcgcatgcgaaatccaagtccggaccctggcttccgctggaggaccagacaacttggttctcctgaatccagaaaaatataaggcgaaatcccgcagcccgggaagtccagtcggagagggtacggggtctccccctaagtggcagatcggcgaacaggagtttgaggccctcatgcgaatgctcgataacctgggatatcgtaccggctatccatacaggtatcctgctctgcgggagaagtccaagaaatactcagatgtggaggttcccgcatcagtgaccggctattcttttgcctcagacggagactcagggacctgctcaccgctgaggcattccttccagaaacaacaacgcgaaaagactcggtggctaaactccggtcgtggtgacgaggcttccgaagagggccagaatggaagcagtcccaaaagcaagaccaagtggacaaaagaagacggacatcgaacctccacgtctgccgtgccgaatctgttcgttcccttgaacactaaccccaaggaggtgcaagagatgcgcaacaagattcgggaacagaatttgcaagacatcaagaccgccggaccacagtctcaagttctctgcggagtcgtcatggatcgctctcttgtacagggagagctcgtgaccgcttctaaagctatcatcgagaaggagtaccagccacacgtaatcgtgagcacaaccggtcctaacccctttaccacactgaccgaccgggaactagaggagtatagacgcgaagttgaacgcaaacaaaagggatctgaggaaaacttagatgaagctagagagcaaaaagaaaaatcaccccccgatcaaccagcagtgccccatccgcccccatcgacccctatcaagctggaagaagccggcgacggatgcgcgcgagagtacctcttgccttag

SEQ ID NO: 178182 - DNA, 1335 bp, synthetic construct
  misc_feature 1..1335: note = Description of Artificial Sequence: Synthetic coding sequence
  source 1..1335: mol_type = other DNA
tgagtgctgatcctgcggaaccacggcctggtgagcgtgggcgagtctgtcgaggaagctttctactatatccataatctggtcgtggcatgcgagatacaagtccgcacactcgcatccgctggcggaccggataacctggtgctcctgaatccggagaagtataaggcgaagtctagatcacctgggtcgccggttggagaaggtacgggctccccccctaagtggcagataggagaacaagagtttgaagcattgatgagaatgttggataaccttgggtaccgaacgggatatccctaccggtaccccgcattgcgggaaaaatctaagaagtattctgatgtagaggttcccgcaagtgtcaccggatactccttcgcctctgacggggactctgggacatgcagcccgttaagacacagctttcagaagcagcagagagagaagaccagatggctcaattcaggtcggggcgatgaggccagtgaagagggccagaatggcagtagcccgaagtccaaaaccaaggtgtggacaaacatcacccacgatcacgtgaagcctctgctgcagtctctcagctcaggagtgtgcgtgccttcctgcatcaccaactgtctgtggaccaaagaggacggacaccggacgtccacctccgcagtcccaaacctcttcgttcctttgaacactaaccccaaagaggtgcaagaaatgagaaacaaaattcgggaacagaacctgcaggatattaagactgccggaccacagtctcaagtgttatgtggcgttgtaatggaccggtcacttgtccagggggagttagttaccgcatccaaagccatcatcgagaaggaatatcagccccacgtgatcgtgagcacaactggcccaaacccctttactactctgacggaccgcgaacttgaggagtaccggagggaggtggagcgtaaacagaaaggctcggaagaaaatctagacgaggcccgtgagcagaaggagaaaagtcctcctgaccagcctgccgtacctcacccgcccccgtccacacccatcaagctggaagaagatctcgttccggaacccaccactggcgatgatagtgatgctgccaccttcaagccgacccttccagatctgtctcccgatgaacctagcgaagcgctcggcttcccaatgcttgagaaagaggaagaagctcacaggcccccgagtcccaccgaagccccaactgaggcttcgccggaacccgccccagatccagcccctgtcgccgaagaggccgctccttcagcagttgaggaaggtgccgccgccgatcccggctcatag

SEQ ID NO: 178183 - DNA, 2181 bp, synthetic construct
  misc_feature 1..2181: note = Description of Artificial Sequence: Synthetic coding sequence
  source 1..2181: mol_type = other DNA
atgagcgaggagaccgtgcccgaggccgccagccccccccccccccaggggcagccctatttcgaccggttctcagaggacgatccagaatacatgcgcttacgcaaccgcgccgctgacctcagacaggatttcaacctgatggaacagaagaagagggtgactatgatcctgcagtctccaagctttcgcgaggagcttgaggggctcatccaggagcaaatgaagaagggaaataacagttctaatatttgggcccttagacagatcgcagatttcatggcgtctacatcccatgcagtgtttccaaccagttccatgaacgtctctatgatgactccaattaacgacctccacactgccgattcactcaacttggcaaagggcgagcggctgatgagatgtaaaattagctcagtgtaccggctcctggacctgtatggatgggcacagttgtccgatacctacgtcacactcagggtgagcaaggaacaggatcactttcttattagtccaaaaggagtgtcttgcagcgaagttactgcctctagtctgattaaagttaacattctgggcgaagtggtggagaaggggtcctcttgttttcccgtcgacacaaccggattttgcttgcattcagccatttatgcagcaaggcctgatgtgagatgcattatacatctccatacccccgccacagccgcggtcagtgcgatgaagtgggggctgctgcctgtgagtcataacgctctcctcgtcggcgacatggcctactacgatttcaatggcgaaatggagcaggaggcggaccgtatcaatctgcaaaagtgccttgggcctacatgtaagatcctggtccttcgaaatcatggagttgtcgccctgggtgacactgtggaggaagcattctataaaatatttcatctgcaagccgcatgcgagatccaggtgtccgcgctttctagtgccgggggtgttgaaaatttgatactgctggagcaggaaaaacaccgcccgcacgaagtggggtctgtgcagtgggccggcagcacctttggtccaatgcagaaatccaggctgggcgaacatgaatttgaagccctgatgagaatgctagacaatctagggtatcgaaccggatatacataccgccatccttttgtacaggaaaaaacgaaacataagtcagaagtggagatcccggcaacagtgactgccttcgtcttcgaagaggacggggcccctgtcccggccttgcgccagcacgcccagaagcaacagaaagagaaaactcgatggctgaacacacccaacacgtacttgcgggtcaacgtcgccgatgaggtgcaaagatcaatgggatcgcccaggcccaagactacttggatgaaagccgacgaggtggagaaaagctcgagcgggatgcctataagaatcgaaaatcctaaccagttcgtccctctctataccgacccccaggaagttctcgaaatgagaaacaagatccgcgagcagaatagacaagacgtgaagagcgcagggccacaaagtcagctcctggcaagcgtgattgccgagaagtccaggtcccccagcacagagtcacagctcatgtcgaaaggagacgaagacacaaaggacgatagtgaagaaactgtgccgaacccattctcacaacttacagatcaggagcttgaagagtataagaaggaagtggagaggaagaaactagaactcgacggagaaaaagaaactgcgccggaggagccagggagccctgccaaaagcgctccagcctcacctgtccagtcaccagccaaagaagccgagaccaagtcacctcttgtgtccccctctaagtcattggaggaggggacaaagaagacagagacctccaaggcagctacaactgaaccagaaacaactcagcctgagggagtggtggtgaacggtagagaagaagagcaaaccgcagaagagatcctctcaaaggggttatctcagatgactacctctgccgataccgacgttgacaccagtaaagataaaactgagtctgtgactagcgggccgatgagcccagaaggtagcccgagtaaatctccctcaaaaaaaaagaagaaattccggacccctagttttctcaaaaagtctaagaagaaagaaaaagttgaaagctag

SEQ ID NO: 178184 - DNA, 297 bp, synthetic construct
  misc_feature 1..297: note = Description of Artificial Sequence: Synthetic coding sequence
  source 1..297: mol_type = other DNA
atgagcgaggagaccgtgcccgaggccgccagccccccccccccccagggacaaccttacttcgacaggttttcggaggatgaccccgagtatatgcggctccgaaatcgcgcggccgacctccgtcaggactttaatctaatggagcagaaaaaacgcgtgactatgattctgcagagtccaagcttcagagaagagttggaagggctgatccaggagcagatgaagaaagaatacaagaaagaagtggagcgcaagaagcttgaactggatgcacctggatggtttagctcttag

SEQ ID NO: 178185 - DNA, 1764 bp, synthetic construct
  misc_feature 1..1764: note = Description of Artificial Sequence: Synthetic coding sequence
  source 1..1764: mol_type = other DNA
atgagcgaggagaccgtgcccgaggccgccagccccccccccccccagggccagccttattttgaccgattctccgaggacgaccccgaatatatgcgcctgaggaatagagctgcggatttgaggcaggacttcaacctcatggaacaaaaaaaacgagtcacgatgatcttacagagcccctccttccgggaggaattggagggcctgatacaggaacagatgaaaaaggggaacaacagctcaaacatttgggccctgcggcagatcgctgacttcatggcatcaacgtcccacgccgtcttccctacatccagcatgaacgtatctatgatgacgccgatcaatgatctgcacacagctgatagcctcaatctggcaaagggagagcggctgatgcggtgcaagatcagtagcgtctacagattgctcgacctttacggatgggcccagttgtcggacacctacgttaccctgagagtaagcaaggaacaggatcactttttaattagtcccaaaggggtgtcctgcagcgaagtcactgcctcttctctgataaaggtaaatatcctaggagaagtggtcgagaaaggaagctcatgttttcccgtagacacaaccggattttgtctacatagcgccatatatgcagccaggcccgacgttcggtgcattattcacctacacaccccagccacagccgctgtttctgccatgaagtggggactattacccgtgtcccataacgccctgttagttggtgatatggcgtattatgacttcaatggcgagatggaacaagaagccgaccgcattaatctacaaaagtgcttggggcctacctgcaagatcctggtgctgcgcaaccacggagtggtggctctgggcgacactgtggaggaagcgttttacaagatttttcacttgcaagccgcatgcgagattcaagttagtgcacttagctccgcaggtggagtggaaaatctgatactgctggagcaggaaaagcacagaccgcatgaagtcggctccgtacagtgggctggctcaacatttggcccgatgcaaaaaagtagactgggcgagcatgagtttgaggcgctcatgcgaatgcttgacaatctgggataccggaccgggtatacatatagacatccctttgtccaagaaaagacaaagcacaaatctgaagtagagattccagcgacagtaacggcttttgtgtttgaagaagacggcgctcctgtccccgccctgcgtcagcacgcacagaagcagcagaaagagaaaacccgttggctgaacaccccaaatacttacctcagggttaacgtggccgatgaggttcagaggtctatgggtagtccacgccccaaaaccacatggatgaaagcagacgaggtggagaaaagttcttcggggatgccaatcagaattgaaaaccctaatcagtttgtccccctctacactgaccctcaggaggtccttgagatgaggaataagatacgcgagcagaacagacaggacgtcaaatccgcaggtccccagtcccagcttctggccagcgtgatcgcagaaaaatctcgatccccgtcaacagagagccagcttatgtcaaaaggcgacgaagacacaaaggatgactccgaggaaacagtccccaatccattttcccaattaacagaccaggagcttgaggaatacaagaaagaagtggagcgcaagaaattggaactggacgccccaggatggttcagcagctag

SEQ ID NO: 178186 - DNA, 2181 bp, synthetic construct
  misc_feature 1..2181: note = Description of Artificial Sequence: Synthetic coding sequence
  source 1..2181: mol_type = other DNA
atgagcgaggagaccgtgcccgaggccgccagccccccccccccccaaggccaaccatatttcgaccgcttttctgaggatgatccagagtacatgaggctccgaaaccgtgctgccgatttgcggcaggacttcaaccttatggaacagaagaaaagagtgacgatgattttacagtctccgtcttttcgtgaggagctcgaaggactgattcaggagcagatgaaaaaaggtaataattcaagcaacatctgggcactccgccagattgcagacttcatggcttcaaccagtcatgcagtgttccctaccagttcgatgaacgtgagcatgatgacccctatcaacgacctgcatactgccgacagcctcaacttggctaaaggagaacggttaatgaggtgcaaaattagttctgtctatcgtctcctcgacctgtatggctgggcccagctgtctgacacttatgttacactccgcgtgtctaaggagcaggaccactttctcattagtcccaagggcgtgtcttgctctgaggtgactgctagctccctgatcaaagtgaatattctgggcgaagtcgtggagaagggttcctcctgcttcccagtggacaccaccggcttttgtctccattctgctatctatgccgcccgccctgacgtgagatgtatcatccatctgcacaccccggccacagctgccgtatccgccatgaagtggggtttactccctgtgagtcacaacgctcttctggtcggggacatggcttactatgactttaatggagaaatggaacaggaagctgacagaattaacttgcagaagtgcttgggccccacatgtaaaattttggttctccggaatcacggtgtggtcgctctcggcgacactgtggaagaggcgttttataagatatttcatctgcaggcagcctgcgaaatccaggtgtctgctctgtcttccgctggtggggtggagaatctcattctgttggagcaggagaagcatcgcccacacgaagttgggtcggttcaatgggctggttccacctttggccctatgcaaaaaagccggctgggcgagcacgaattcgaggctctaatgcgaatgcttgataacttaggatacaggaccggatacacataccgacatccatttgtacaggagaaaactaaacacaagagtgaagtggaaatccccgcgacggtgacagcattcgtgtttgaagaagatggggccccagtgccagctctccgtcagcacgctcagaagcaacagaaagaaaagacacgttggctgaacacaccgaacacttatctgcgcgttaatgtggcggatgaggtccagcgtagcatggggtcaccaagaccaaagacaacctggatgaaggcagatgaggtggaaaagtcgagcagtgggatgccaataaggattgaaaatcccaatcagtttgtgccactgtacacggacccgcaggaggtgctcgagatgaggaataaaatccgtgaacagaatcgtcaggatgtgaaatctgctggaccccagtctcaactgctcgcctcagtaattgccgaaaaaagtcgtagcccaagcacagagagtcagctgatgagtaagggtgatgaggataccaaggatgacagtgaggagacagtacctaatccgtttagccagctgacagatcaagagttggaggaatataagaaagaggtcgagaggaagaaactcgagctggatggcgaaaaggaaacggcccctgaggaaccgggtagtcccgctaagagtgctcctgcaagtccagtccagtctccagctaaagaagccgagaccaagtcacccctggtctctcccagcaaaagtttggaagagggtacgaaaaagacagagacctccaaagcagccacaacagaacccgaaacaacgcagcctgaaggggttgtggtgaacgggagggaggaagaacagaccgccgaggagatactctccaagggcctttcccaaatgaccaccagcgccgacactgacgtagatacatcaaaagacaagactgagagcgttaccagcggaccaatgtctcccgaaggatccccgagcaagtctcctagcaagaagaagaagaaatttaggaccccgtccttcctcaagaagtccaaaaaaaaagaaaaagtggaatcatag

SEQ ID NO: 178187 - DNA, 2181 bp, synthetic construct
  misc_feature 1..2181: note = Description of Artificial Sequence: Synthetic coding sequence
  source 1..2181: mol_type = other DNA
atgagcgaggagaccgtgcccgaggccgccagccccccccccccccaggggcagccatatttcgacaggttctcagaagatgacccagagtacatgcggctgagaaatcgagctgcagacctgagacaggacttcaacttgatggagcagaagaagagagtgacaatgatactgcaaagtccctcattccgagaggagttggaaggcttaatccaggaacaaatgaagaagggcaacaattcttcgaatatttgggccctgcggcagattgccgacttcatggcctccacatcccacgctgtgttcccaacctccagtatgaacgtctccatgatgacgccgattaacgacctccacacggccgactcattgaacttggccaaaggcgagcggctgatgcgatgcaagattagttcagtctaccggctgctggacctgtacggctgggctcagctctcagatacctacgtgaccctcagggtgagtaaggaacaggaccacttcttgatttcaccaaagggcgtgtcttgcagcgaggtgactgcaagcagcctcataaaggttaacatcctaggggaggtagtggagaaggggtccagctgctttcctgttgataccacaggattctgtctgcacagcgccatctacgctgcccgaccagacgtccgctgcatcatccacctgcatacccccgccactgccgctgtgtctgcgatgaagtggggtctgttacctgtctctcacaatgccctgctggtcggcgacatggcctattacgattttaacggagagatggaacaagaagccgaccgtattaacttgcaaaagtgtttggggcccacgtgtaaaatccttgtcttgcgaaatcatggtgtcgtggcgttaggagacacagtggaagaggccttctacaaaatctttcatcttcaggcggcatgtgagatccaggtcagtgctctgagcagcgcaggcggagtggagaatctcattcttctggaacaggaaaaacatcggccacacgaggttggtagcgtgcagtgggctggttccacctttggcccaatgcagaaatctagactaggcgaacacgaatttgaggcgctgatgcgtatgcttgataacctgggctacaggaccggttacacttaccggcatccatttgtgcaggagaaaaccaagcacaaatctgaggtggagatacccgccaccgtgacagcgttcgttttcgaggaggacggcgcccccgtcccagccttgcggcagcatgcccagaagcagcagaaagagaagacaagatggttaaacacacctaatacatacctgcgggtgaacgtcgctgatgaggttcaacgctcgatgggctcccccagacctaagaccacttggatgaaggcagatgaggtcgagaagagcagttcaggaatgccaatcagaatcgaaaatcccaaccaattcgtcccactgtacacggatccccaggaggtgctggaaatgcggaacaagatcagggaacagaacaggcaagacgttaaatcagccggacctcaatcccagctgttggcaagcgtcatcgccgagaagagcaggtcaccctccactgagagtcaactgatgagcaaaggcgatgaggacaccaaggatgatagcgaggagaccgtgccaaatcccttttcccagctcacagaccaagagctggaggaatacaagaaagaagtggagagaaaaaagctggaactggacggcgagaaagagactgcacctgaagagccaggtagccctgctaagagtgcccccgcttctcccgtccagagcccggctaaggaggccgagaccaagtccccccttgtaagccctagtaagagtctggaagaaggcaccaaaaaaacagaaaccagcaaggcggcaacaactgagccagagactacacagccggagggtgtggttgtgaacgggcgggaagaggagcaaactgccgaagagattctctctaaggggctttcacagatgaccacgtcggcagatacggatgtggacacttcaaaagacaaaacagaaagcgtgacttccggcccaatgagcccagagggctcaccctccaagagtcccagtaagaagaagaaaaagttccgcactccttcctttttaaagaagtccaagaaaaaggagaaggtcgagagttag

SEQ ID NO: 178188 - DNA, 1680 bp, synthetic construct
  misc_feature 1..1680: note = Description of Artificial Sequence: Synthetic coding sequence
  source 1..1680: mol_type = other DNA
atgagcgaggagaccgtgcccgaggccgccagccccccccccccccaggggcagccatatttcgaccggttttctgaagatgatcctgagtacatgcgcctgcggaacagagcagccgacctcagacaggactttaaccttatggaacaaaagaagagggtcacaatgattctgcaatctccttcttttagggaagaactggagggcctgatccaggaacagatgaaaaagggaaacaattcctccaacatctgggccctaaggcagattgccgatttcatggctagcacttctcatgctgtctttcctactagcagtatgaatgtgagcatgatgacccccataaatgacctgcatactgctgactctctcaatttggctaaaggcgagcgcctgatgcggtgtaaaatctcaagtgtttatcgtctgctcgatctttacggctgggctcagctcagcgacacctatgtaaccctgcgcgtgtcaaaggagcaagaccatttcctgatttcgccaaaaggagtgtcatgttcagaagtgacagcatcttcactcatcaaggtcaatatcttgggcgaagtggtggaaaaaggcagctcttgttttccagtggacacaaccgggttctgcctgcacagtgcgatatatgcagccaggcccgacgtgcgatgtatcattcacttacatacgccggccaccgccgctgtatctgcaatgaagtggggcttgttacctgtcagccataacgcccttctggtgggcgatatggcttactacgacttcaacggagaaatggagcaggaggccgatcgtattaatctgcaaaagtgcctgggccctacatgcaagatcttagtactccgaaaccacggcgtggtcgctctgggcgacacggttgaagaggccttctacaagattttccacctgcaggccgcctgtgaaattcaggtgtccgccttgtctagcgccggcggcgttgagaacctgatccttctagagcaggaaaagcaccggcctcatgaggtggggagtgtccagtgggccgggtcaacttttggccccatgcagaagagcagactgggggagcacgaatttgaggccctaatgcggatgctcgataatttaggctatcggacaggatatacgtaccggcatccattcgtacaagagaaaaccaaacacaagtctgaagttgaaattcctgctaccgtgacagcttttgtgttcgaagaagatggcgcccctgtccccgcgcttaggcagcacgcccaaaaacagcagaaggaaaaaaccaggtggctaaacactccgaatacatacctcagagtgaacgtggctgatgaggtccagagatcaatggggagcccgcgcccaaagacaacttggatgaaggctgatgaggtagagaaatcctcgtctggtatgccaatccgaatcgagaacccaaaccaattcgtcccgctgtataccgatccccaagaggtgcttgagatgcggaataaaatacgcgaacagaaccgccaggatgtcaaaagcgctgggccgcagagccagttgctggcgagtgtgattgctgagaaaagtcgcagcccagtagaacaacgcctccccctgacaggaggcgagacttgcttaccttccggcagctctgtccctggcgcgggattacaagacccctag

SEQ ID NO: 178189 - DNA, 681 bp, synthetic construct
  misc_feature 1..681: note = Description of Artificial Sequence: Synthetic coding sequence
  source 1..681: mol_type = other DNA
atgagcgaggagaccgtgcccgaggccgccagccccccccccccccaggggcaaccctactttgatagattttcagaggatgacccagagtacatgagactccggaatcgcgcggctgatctcaggcaggacttcaatctcatggagcaaaagaaaagagtgactatgatcctgcagtcaccatctttcagggaggaactcgagggtctgatacaggagcagatgaagaagggtaacaactcctcgaacatctgggctctgagacaaatcgccgacttcatggccagcacttctcacgctgtgttccccactagctccatgaacgttagtatgatgacgcccattaatgacttgcacactgccgacagtctgaacctggccaaaggggaacgcttgatgagatgcaaaattagcagtgtatatagacttctggatctgtacggatgggcccaattaagtgatacctacgtgaccctgagagtgtcaaaggagcaagaccatttcctcatttctcccaaaggggttagctgttccgaagtgacagccagttccctcattaaggttaatattctgggggaggtggtggaaaaagggtcgtcctgtttcccagtggatacaacaggattctgtttgcattccgctatatacgctgcccggccggatgtgcgttgtattatctag

SEQ ID NO: 178190 - DNA, 432 bp, synthetic construct
  misc_feature 1..432: note = Description of Artificial Sequence: Synthetic coding sequence
  source 1..432: mol_type = other DNA
atgagcgaggagaccgtgcccgaggccgccagccccccccccccccaggggcaaccctacttcgacagattctctgaggatgacccagagtacatgcgccttcggaaccgggccgcggatctgcgtcaggatttcaacctgatggagcaaaagaagagggtgaccatgattttgcagagccccagctttagagaagagcttgaggggttgatacaggagcagatgaagaagggaaacaattccagcaatatttgggctctgaggcagattgcagactttatggcttcgaccagccatgccgtcttccctaccagcagcatgaatgtgtccatgatgactcctattaatgatctccacacggctgactcactgaatctcgccaaaggcgaaagattgatgcggtgtaaaatttcaagcgtgtatcgcctctag

SEQ ID NO: 178191 - DNA, 1728 bp, synthetic construct
  misc_feature 1..1728: note = Description of Artificial Sequence: Synthetic coding sequence
  source 1..1728: mol_type = other DNA
atgccccggcggcgggtgcccggcgccaactgcaagcccaccggcaaaatgtcagaggagaccgtgccagaagctgccagcccccctccgccgcaggggcagccttatttcgacaggttctcagaggacgacccagagtacatgcgactgaggaaccgagccgccgacctgcgtcaagactttaaccttatggaacagaaaaaacgtgtgaccatgatcctccagtccccatctttcagggaggagctcgagggtctaatacaggaacagatgaagaaaggcaacaactcatccaacatctgggcattacggcaaatagccgattttatggcctcaacatctcacgcggtgttccccacaagcagcatgaatgtttccatgatgacacctatcaatgatctgcatactgctgactctcttaatcttgctaaaggagaaagacttatgcggtgcaaaattagttccgtgtacagattgctggacctgtacggctgggcgcaactcagcgatacatatgttaccctgcgcgtatctaaagagcaggaccacttccttatttccccgaagggagtgtcctgttctgaggttaccgcttcatctctcattaaagtgaatatcctgggtgaggtagtagagaaaggtagctcctgctttccagtggacactacagggttttgtcttcacagcgcaatctacgctgcgcgccccgacgtgagatgcatcatccacctgcatacccctgcaaccgcggcggttagcgcaatgaagtggggcttgttacctgtgagccataacgccctgctcgtcggcgacatggcctactacgacttcaacggtgagatggagcaagaggcggacagaattaatctccaaaagtgcctaggcccaacctgcaaaatcctggtgctgcgtaatcatggggtcgtcgccctgggtgatactgtggaggaggcattctataagattttccatctccaggccgcctgtgagatccaggttagtgcgctatccagcgctggaggcgtggagaacctgatcctcctcgaacaggagaaacaccggcctcatgaggtgggatcagtccaatgggctgggtcgaccttcggccccatgcagaagtcgcggttgggtgaacatgagtttgaggcgctaatgcggatgctcgacaatttggggtacagaaccggttacacctatcgccaccctttcgttcaggagaagactaagcataaaagcgaagtagaaattccagccaccgtaacggcctttgtttttgaagaagatggcgctccagtgcccgccttacgacagcacgcccagaagcaacaaaaagaaaaaacacgctggctcaacacaccaaatacctatttgcgcgtgaacgtggccgacgaagtacagcggagtatgggcagtcctcgaccaaagaccacttggatgaaagctgatgaggtcgagaaatctagttccggaatgccaatccgcattgagaacccaaaccagtttgtccctctgtatacagatccccaggaggtgctcgaaatgcgcaacaagattagggaacagaataggcaagatgtcaagagtgcggggccccaatcccaactactggcatctgtaatcgccgagaagtcccgaagtcctgttgagcagcgactgcccctgaccgggggcgagacctgcctgcccagcggttccagcgttcctggagcaggcctccaagacccctag

SEQ ID NO: 178192 - DNA, 54 bp, synthetic construct
  misc_feature 1..54: note = Description of Artificial Sequence: Synthetic coding sequence
  source 1..54: mol_type = other DNA
atgagcgaggagaccgtgcccgaggccgccagccccccccccccccagggatag

SEQ ID NO: 178193 - DNA, 846 bp, synthetic construct
  misc_feature 1..846: note = Description of Artificial Sequence: Synthetic coding sequence
  source 1..846: mol_type = other DNA
atgagcgaggagaccgtgcccgaggccgccagccccccccccccccagggacaaccgtattttgataggttctcagaagacgatccggaatatatgcgcctgagaaatcgggccgccgacctacgccaagactttaacctaatggaacaaaaaaagagagtcacaatgattttgcaaagccctagcttcagagaggaattggagggtctgattcaggagcagatgaaaaagggcaacaactcctcaaacatctgggccctccgccaaatcgcagattttatggcttccaccagccatgccgtgttcccaacatcaagcatgaatgtcagcatgatgacgcctataaacgacttgcatacagcggactctttaaatctggccaaaggagagcgcctgatgcgctgcaagataagtagtgtgtataggctgctggatttatatggctgggcccagctctccgatacttatgtaacgttacgagtcagcaaggaacaggaccatttcctgatatctccgaaaggtgtttcctgttctgaggtgacggcttcatccctggtctctgaagtactggagatgcgcaataagatccgggaacagaaccgccaggacgtgaaaagcgcgggtccacaatcccaactcctcgcatctgtcatcgcagaaaagagtaggtccccttcgaccgagagccagcttatgtcaaaaggcgacgaggacactaaggacgactccgaagaaacagtgccaaacccgtttagccaactaactgaccaagaactcgaagagtacaagaaggaagtcgagagaaagaaactcgagctggatgccccaggttggttttcatcctag

SEQ ID NO: 178194 - DNA, 1932 bp, synthetic construct
  misc_feature 1..1932: note = Description of Artificial Sequence: Synthetic coding sequence
  source 1..1932: mol_type = other DNA
atgagcgaggagaccgtgcccgaggccgccagccccccccccccccaggggcaaccttattttgatcgcttttccgaggatgacccggaatatatgcgactacggaaccgggctgcggatctgaggcaggacttcaacctcatggagcagaaaaaaagggttactatgatcttgcagagcccaagctttcgggaagagcttgagggattgattcaggagcagatgaagaaaggaaacaattcatcaaacatctgggccttacgacagattgcggactttatggcttctaccagccatgcagtttttcccacaagcagcatgaacgtgtcaatgatgacccctataaacgacctgcacactgcggactctttaaatctggcaaagggggaaagactaatgcgatgtaagataagctccgtctatcggcttttagacctttacgggtgggcccagctgtccgacacctatgtgacacttagggtgtccaaagagcaggaccattttctcatttctcctaagggggtctcctgcagtgaggtcacggcctccagtcttattaaagtgaatattctgggggaagtagtagagaagggctcgtcctgttttccggtggataccaccgggttttgcctccactccgccatctacgcagcaagaccagatgtaagatgtatcatccacctccacacacctgcaactgcagccgtctcggccatgaagtggggtctcttgcccgtttctcacaacgccttgcttgttggggacatggcttactatgactttaacggagagatggagcaggaagcggataggattaatttgcagaagtgcctcgggcccacctgtaaaatcctggtgcttcggaaccacggagtggtcgccctcggcgacactgttgaagaagccttttacaagatctttcatcttcaagccgcctgtgagattcaagtgtcagccctgagctcggctggaggagtggaaaacctaatcctgcttgagcaggaaaagcaccggcctcatgaagtggggtccgtccagtgggcaggcagcacgttcggccccatgcagaaaagcagattgggtgagcatgagttcgaggctctgatgaggatgttggataacctgggttaccggactggttatacataccgacatccgttcgtgcaggagaagaccaagcacaaaagcgaagtcgaaatccctgcaacagtgacggcctttgttttcgaggaggatggagcccccgtgcccgcgttgcgacagcacgcacagaaacagcagaaggagaaaacccgatggttgaatacacctaatacatatctgcgtgtcaatgtagctgatgaggtgcaaagatctatgggttcccccaggcctaagaccacttggatgaaggccgatgaagttgagaaatcttcttcagggatgcctatccgaattgagaatcctaaccagttcgtgccactctataccgaccctcaggaagttttggagatgcgaaataagatccgggagcagaatcgccaggacgtcaaatcggctggaccacagtctcaactgttagcttccgtgattgctgaaaagagccgatcaccatcaactgaatcacagttgatgtccaagggggatgaggataccaaagacgattccgaggaaacagtgcctaatcctttctctcagctgaccgaccaggagttggaggagtataaaaaggaggtggaacgcaagaagcttgaattggatgagacaggccaggaacgggagccagggtccggccctgccgtgtgcgaattcttttccgtcgcactgcacatttggagtaacatcctggagagaaagaaactgcctcaaaagagcctggcgcatctacagtcccttcacctgctcctgcagtgtcgtgcccagcggaggcggcagcgccaaagggccctgtag

SEQ ID NO: 178195 - DNA, 2025 bp, synthetic construct
  misc_feature 1..2025: note = Description of Artificial Sequence: Synthetic coding sequence
  source 1..2025: mol_type = other DNA
atgagcagcgacgccagccagggcgtgatcaccacccccccccccccctccatgccccacaaagaacggtatttcgataggattaatgagaatgatccagagtacatccgggaaaggaacatgagcccagatctgagacaggactttaacatgatggaacagcgtaaaagggtgacacaaattctccagagccccgcattcagagaggacttggagtgcctaattcaggagcaaatgaaaaagggccataatcccactggactcctggccttacaacagatcgcagattatataatggccaattcttttagcggcttttcatcgcccccgttgtcgctggggatggtgactcctatcaatgatctgcccggtgccgatacttcaagctacgttaaaggtgagaagctaactcggtgcaaactggcctccctttatagactggtagatctgttcgggtgggcgcatttggccaatacctatatctccgtcagaatcagtaaggagcaggaccatataattatcatccctagagggcttagcttcagcgaagctaccgccagtaacctggtcaaggtgaatatcattggggaggtggtggaccagggttccacaaacctcaagatcgaccacactggatttagccctcatgctgccatttattcaacgcgccccgacgtgaagtgcgtgatacatattcacactttagccaccgcagctgtgtccagtatgaagtgtgggatactgcccatcagtcaagagtcgctactgctgggcgacgttgcttattacgactaccaggggtctcttgaagagcaagaggaacgtattcagctgcaaaaggtccttggacccagctgcaaggtccttgtgctgaggaatcacggcgtggtggccctgggcgagacgttagaggaggctttccattatatctttaacgtacagctggcatgcgagattcaggtgcaagccctcgccggcgcagggggcgtggataacttacatgtacttgacttccagaaatataaggcctttacttatacagtagcagcaagcgggggcggaggcgtgaacatgggctcacaccagaaatggaaggtgggagaaatcgagtttgagggactgatgcgtacacttgacaacctgggataccgtacagggtacgcgtaccgacatcccctcatacgagagaagccaagacacaagtccgatgtggaaatcccagccactgtaacggcattctcctttgaagatgacacggttcccctctcgcccctcaaatacatggctcaaaggcagcaacgtgagaaaacgcgctggcttaactctcccaacacttacatgaaggtgaatgtgcccgaggagtcccgtaatggagagaccagtccacgcacaaagataacctggatgaaagccgaggactccagcaaggtaagcggagggaccccaatcaagattgaagaccctaaccaattcgtcccacttaatacaaatcctaatgaagtgctggagaaacgtaacaagatacgcgagcagaaccgctatgacctgaagacagccggtcctcagtctcaactgctggctggaatagtggtagataagcccccatccaccatgcagttcgaggacgacgaccacgggccgcccgcgccccccaaccctttctcacacttaaccgagggtgaactggaggaatacaagcgtacaattgagaggaagcaacagggcttggaggagaaccacgagctcttttctaagagctttatcagcatggaggttccagtaatggtcgtgaacggcaaggatgacatgcatgatgtagaagatgaacttgctaagcgcgtgtctagactttctacctcaacgaccatcgagaacatcgagatcactatcaaaagtcctgagaagattgaggaggtgctctccccagaaggctcccctagtaaatccccctctaagaaaaagaagaagttcagaaccccctccttcctaaaaaaaaataaaaaaaaagagaaggtcgaagcgtag

SEQ ID NO: 178196 - DNA, 2121 bp, synthetic construct
  misc_feature 1..2121: note = Description of Artificial Sequence: Synthetic coding sequence
  source 1..2121: mol_type = other DNA
atgagcagcgacgccagccagggcgtgatcaccacccccccccccccctcaatgcctcataaagaacgttattttgatagaatcaatgagaacgatcctgagtacattcgtgagagaaacatgagtccagacctgagacaggattttaacatgatggagcagcggaaacgagttacccagattctacagagccccgctttcagggaggatctggaatgtctgatccaggaacagatgaaaaaaggtcacaatcctactgggttgctggctttacagcagatagcagattatatcatggctaattcattctcaggcttctcctcccctcctctgagcttgggcatggttactccgattaatgaccttcccggcgcagatacttcctcttatgtgaagggcgagaagttaactcgttgcaaactggcctctctctaccggttggtcgaccttttcggttgggcacacctggctaatacctacattagtgtacgaatttcaaaggagcaagaccacatcatcatcattcctcggggcctgagcttcagcgaggctacagccagtaatttggtaaaagttaatatcattggcgaggtggtggaccagggctccaccaacttaaaaatcgatcacacaggcttttcaccccatgccgccatttacagcactcgtcccgacgttaaatgcgttatccatatccataccctcgcgactgccgccgttagttcaatgaagtgtggaattctccccatctcacaagagagcttactgctgggtgacgtcgcctattacgattaccagggatcgttggaggaacaggaggaaaggattcagctgcagaaggtgctgggacctagctgcaaagtcctggtgcttcggaatcacggtgtcgttgccctgggggaaaccctcgaagaggccttccactatatatttaatgttcaactagcttgtgagatccaggttcaggcactcgctggggccggaggggtggacaaccttcacgttctggactttcagaaatacaaggcgtttacttacaccgtggccgcttcggggggaggcggcgttaatatgggaagccatcagaagtggaaggtgggcgagattgaatttgaggggttgatgcgtacactggacaacttggggtacaggacgggatacgcctataggcatcctctcataagagaaaaacctcggcataaatcggacgtagagatcccagccaccgtaacggcattctcctttgaggacgataccgtcccgctgtccccccttaaatacatggcccagagacaacagcgagaaaaaactcgatggctgaactctccgaatacgtacatgaaggtgaatgtgccagaggaatcacggaacggcgagacaagtccgcgcactaaaatcacgtggatgaaggccgaggactcaagcaaggtctctggaggcacacctattaaaatcgaggaccccaatcagttcgtgccattaaataccaatcccaatgaggtattagaaaagcgtaacaagatccgcgagcagaaccggtacgatctgaaaaccgcaggcccacaatctcagttgctggccgggatcgtggttgataagccccctagcaccatgcagttcgaggatgatgatcatggcccccctgctccccctaacccattctcccacctgactgagggcgaactcgaagagtacaaacgtacaatcgagcgcaaacagcaaggacttgaggatgccgagcaggagctactgtccgatgatgcttcatctgtctctcagatccaaagtcagacccagtcaccccaaaacgtaccagagaaactggaagaaaatcacgagctgttctccaaaagcttcattagcatggaggtgcctgtcatggtagttaatgggaaggatgatatgcacgacgtcgaggacgagctcgcaaagagagtaagtcgtcttagcacttctaccaccattgagaacatcgagataaccatcaagagcccagagaagatagaagaagtcctttcacctgagggttctccaagcaaatccccatctaagaagaaaaagaaatttcgaaccccaagtttccttaaaaagaacaaaaagaaggagaaagtagaggcctag

SEQ ID NO: 178197 - DNA, 2025 bp, synthetic construct
  misc_feature 1..2025: note = Description of Artificial Sequence: Synthetic coding sequence
  source 1..2025: mol_type = other DNA
atgagcagcgacgccagccagggcgtgatcaccacccccccccccccaagcatgccccataaagaacggtattttgaccgcatcaatgagaacgatcccgagtatatcagagagagaaacatgtccccagatttgaggcaagactttaacatgatggaacaaagaaagcgggtgacccagatcttgcaaagtcccgccttccgggaggacctcgagtgtctgattcaagaacagatgaagaaggggcataatcctacaggcctcctcgcactccagcagattgccgattatatcatggctaattccttctcaggattctcctcacccccgttaagtctgggcatggtaaccccaatcaacgacctccctggtgctgatacatctagttacgtgaagggcgagaagttaactagatgtaagcttgcaagcctttacagactggttgacctgtttggctgggcacaccttgctaatacctacattagcgttcgtataagcaaggaacaagatcatatcatcatcatcccccggggcctgtccttttccgaagctactgcatcgaatctagtgaaggtgaatatcataggcgaagtggtcgaccagggatcgactaatctgaaaatagaccacaccgggttttccccacacgctgctatatactccactcgacccgacgtcaagtgtgtaattcacattcataccctggccacagccgcggtgtctagcatgaaatgtggcatcctgcccatcagtcaagagtccctgttacttggtgacgtggcttactacgattatcaggggagtctcgaggagcaagaagagcggattcaactccagaaggttctcggaccgtcctgtaaagtgctggtgttgaggaaccacggtgtggtggccctgggagaaaccctcgaagaggcgttccactatatctttaatgtgcaactagcctgtgagatacaggtacaggccctggccggtgctggtggtgtggataacttgcacgtgttggattttcaaaagtacaaggcgttcacatacacggtcgcagccagcggtggaggaggggttaacatggggagccatcagaaatggaaggtaggtgagatcgagttcgaaggtttgatgagaactttggataatctgggttatcggacgggctacgcatatagacatcccctgattagagagaaacctaggcataaatccgacgtggaaattcccgctactgtgactgccttttcattcgaagacgataccgtgcccctgtccccacttaaatatatggcgcagcggcaacagcgtgagaaaacacggtggctcaactccccaaacacctacatgaaggtaaacgtcccagaggaatccaggaatggagagacctccccgcgcaccaagattacttggatgaaggctgaggactcaagtaaagtcagcggtggaacacctattaaaatagaggatcccaaccagtttgttcccctgaacacaaaccccaacgaggttctcgaaaaacggaacaagattcgggagcagaatcggtacgaccttaaaacagccggaccacagagccagctgctggccgggatcgtcgttgacaagcccccatcaacaatgcagtttgaagacgacgatcatgggcctcccgcgccacccaaccccttctctcatctcactgaaggagagctggaggaatacaaaaggacgatcgagcggaagcagcaaggacttgaggagaatcacgagctattcagcaagtcctttatcagtatggaagtcccagtaatggtggtcaatggcaaagacgatatgcatgatgttgaggacgaactcgccaaacgggtaagcagactttccacttcgactactattgaaaatatcgagataactatcaaaagccctgagaaaatagaagaagtgctgagccctgaaggaagcccctctaaaagccccagtaagaagaagaagaagtttcggacgccctctttcttgaagaagaataagaaaaaggaaaaggtggaagcctag

SEQ ID NO: 178198 - DNA, 543 bp, synthetic construct
  misc_feature 1..543: note = Description of Artificial Sequence: Synthetic coding sequence
  source 1..543: mol_type = other DNA
atggccgacagcgagctgcagctggtggagcagcggatccggagcttccctgactttccaacccctggggtggtctttagagacatctcaccggtcctcaaagatcccgctagctttagagcggccatagggctgttggcaagacatctcaaggctacgcacggtggacggatcgactacatcgccggtcttgactctcggggctttctattcggaccctcgttagcccaagagctggggctaggctgcgttctgatcaggaagcgcggcaaactgccagggcctactctttgggcaagttactccctcgagtacggaaaagccgaattggaaattcagaaggatgcgctagaacctgggcagagggtggtggtcgtggatgatcttctcgcaaccggcggcacaatgaatgcagcatgtgagctgctgggtagactgcaggcagaagtgcttgagtgcgtgtcattggtggaactgacatccctcaaagggagagagaagcttgctcctgttcctttcttttcactgctccagtacgagtag

SEQ ID NO: 178199 - DNA, 405 bp, synthetic construct
  misc_feature 1..405: note = Description of Artificial Sequence: Synthetic coding sequence
  source 1..405: mol_type = other DNA
atggccgacagcgagctgcagctggtggagcagcggatccggagcttccccgactttcctactccaggcgtggtgtttagggacatttctccggtcctgaaggatcctgcgtcttttcgcgctgccatcggcctcctcgcacgacatctcaaggccactcatggcggccgaatcgactatatcgctgggttggactctagagggtttttgttcggcccaagcctcgcccaggagctggggcttggctgtgtgctcatcaggaaaaggggtaagcttcctgggcccacactgtgggcctcatattctctcgaatatggcaaagctgagctagagattcagaaggacgccctggagcccggccagagagtggtcgtggtggatgacctgctcgctacaggcgtgtag

SEQ ID NO: 178200 - DNA, 555 bp, synthetic construct
  misc_feature 1..555: note = Description of Artificial Sequence: Synthetic coding sequence
  source 1..555: mol_type = other DNA
atggacggcctgcggcagcgggtggagcacttcctggagcagcggaacctggtcactgaagtgctaggcgctctcgaggctaaaactggtgtggagaagaggtatctagccgccggtgccgttacgctgcttagtctctatctgctttttggctatggagcctctctcctgtgcaatctgattggcttcgtctacccggcttacgcctccattaaagctatcgaatctccatcaaaagatgacgacacagtgtggctgacttactgggtagtgtatgcccttttcggactggctgagttcttttccgatctcctcttaagttggttcccattttactatgtgggaaagtgcgcatttcttctgttctgtatggcgccaagaccctggaacggtgctcttatgctgtaccagcgtgtagtgcgcccattattcttacgccaccacggtgccgtggatcgaattatgaatgatctgagcggacgagctctggatgcagctgcaggaattaccagaaatgttaaaccgtcgcagacaccccagcccaaagataagtag

SEQ ID NO: 178201 - DNA, 6090 bp, synthetic construct
  misc_feature 1..6090: note = Description of Artificial Sequence: Synthetic coding sequence
  source 1..6090: mol_type = other DNA
atggccagcagcgtggccccctacgagcagctggtgcggcaggtggaggctttgaaggccgagaatagtcatctgcggcaggaactacgggacaacagctcccacctaagtaagttggagaccgagacctctggaatgaaagaagtcttgaaacaccttcagggcaaacttgaacaagaagccagggtcctggtctccagcggccagaccgaggtgctggagcagctgaaggcactgcagatggatataaccagcctctacaacttgaaattccaacctcctacgctcgggccagaacctgctgcccgcactcctgaaggctcccccgtgcacggaagcggtcccagtaaggatagcttcggcgaactcagtagagccaccatcagattgctggaggagctggatcgggagcgatgtttcttgcttaacgagattgagaaggaggagaaggaaaagctatggtattattcacaattacaggggctgtctaagaggctagacgaactccctcacgtcgactatgagatgcataagatgacacgtgacccactgaacctcgccctccgacggtatgcaggtatgacgctcactaacttgaccttcggggatgtggcgaacaaggccactctgtgtgcgcgccgagggtgcatggaagctatcgtggcacagttggccagtgacagcgaggagctgcaccaggttgtctctagcatactgaggaatttgtcatggagggccgatatcaattccaagaaggtactgagagaagctgggtccgttactgcactggtgcagtgcgttcttagagccaccaaggagtcaacacttaagagcgtcctctccgccttgtggaacctaagcgcacattctactgaaaacaaagctgccatttgccaagttgacggcgctcttgggtttctggtaagcactctgacatacaagtgccagagtaacagtctggccattatcgaatctgggggcggtatcctgcgtaatgtgagttcactagtggctacgagagaggattatcgtcaggttctcagggaccataactgcctgcagacactgctgcagcatctcacctcccattccctaaccattgtgagtaatgcttgcggaacgctctggaatctgtccgctaggtctgctagggaccaggagctactgtgggacctgggtgccgtgggcatgctcagaaatctcgtacactctaagcataagatgatagctatgggttcagcagctgcactgcggaatctcctcgctcaccggcccgccaagcaccaagcagcagctaccgccgtttcccccggatcctgcgttccatcactgtatgtgaggaagcaaagagcgctggaggcagagctagatgcacggcacttggcgcaggcactggagcacctagaaaaacaaggcccgccggcagcggaagcggcgactaaaaagcctctcccacccttacggcacttggacggactcgcccaggattatgcttcggattcagggtgcttcgatgatgacgacgccccatcctccctggcggctgctgccgccaccggcgagcctgcttcacccgcagccctgagcctgttcctcgggagtccctttctgcaggggcaggctttggcccgaactcctcctactcggcgcggcgggaaggaggcagaaaaggatacctctggggaagccgctgtggctgccaaggccaaggccaaattagcccttgccgtggcacgcatcgaccagttggtggaagacatcagcgcactccatacctcttctgacgactccttctctctgagcagcggcgacccaggccaggaggctcctagagaaggtagggcacagagctgttcgccctgtagggggcccgagggcggtaggagagaggcaggttctagggcgcaccccctgctgaggcttaaggccgcacatgcatccctgtcaaacgattctttgaactcaggctcggcaagcgacggttactgcccacgggagcacatgcttccttgccctctcgctgccttagctagtcgaagagaggatccccgatgcgggcagccccggccatcccgcctggatctagacttaccgggctgtcaggccgagccgccagcacgggaggcaaccagcgccgatgcgcgcgtgcgcactatcaagctcagcccaacctaccagcacgtccccctcctcgaaggcgcctctcgggctggtgccgaaccactcgcgggtccagggatctcacccggagcccgcaagcaggcatggcttcctgccgatcatctttcaaaggtgcccgagaagctggctgctgcccccctatccgtggcctcaaaggccctccagaagctagccgctcaagaaggacctctaagcctgagtaggtgctcaagcttgtcatccctctcatcagccggcagacctggcccttcggaaggaggcgacctggacgattccgacagttccctggagggactggaggaagccggtccgtcagaagcggaactggatagcacctggcgtgcacctggggctacatctctgcccgtcgccatcccagcccccagaaggaatcggggcaggggattgggtgtcgaggatgctactccgagctcttctagcgaaaattatgtccaagagacacccctcgttctctctcgctgctcctccgtatcttctttgggtagctttgagtccccttccatcgcatcatctatcccttcggagccatgttctgggcaaggctcaggaaccatttccccatctgagctacctgacagtccaggacagacaatgcccccttctaggtctaaaacaccacctctcgctccagcgccccagggaccaccagaagctacccaattctctctgcagtgggagtcctatgtgaaacgctttttagacatcgcggattgccgcgaacggtgccgcctgcctagcgaacttgacgcaggcagcgtgcgcttcaccgtggaaaagcctgacgaaaacttcagctgcgcctcaagcctctccgctctggcgcttcacgaacattatgtgcagcaggatgtggaactcagattgctgccgagcgcctgtccggagagaggaggaggggcaggaggagcgggccttcactttgcaggccaccgcaggcgagaggagggaccagcccctaccggctcgcgcccacgtggcgctgccgatcaggagctcgaactcttacgagaatgcctgggcgccgctgtgccagcccgcctcagaaaagtggccagtgctttagtgcctgggcgccgggcgctccctgttcctgtctacatgcttgtgcccgcgccagcaccagcacaggaggatgactcttgcaccgacagcgccgagggtacccctgtcaacttcagcagtgccgcttctctgagcgatgagacactccaaggccctccccgcgaccagcctggggggccagccggccgacagcgcccgactggaagacccaccagcgcaagacaggcaatgggccatcgccacaaagcggggggggcaggccggagtgccgaacaaagtcggggagccggaaagaacagggccggattggagttgccgttgggcagaccgccctcagctcctgccgataaggatggcagtaagccaggcagaaccagaggggacggtgccctccagagtctctgcctgaccacccctactgaagaagccgtctactgtttctacgggaacgattcagacgaagagccgcctgccgccgctcccacaccgacgcaccgccggactagcgccataccaagagcatttactagggagcgcccacagggcagaaaggaggcacctgctccctctaaggccgccccagccgctccaccaccagctaggacccagccaagcttgattgcagacgagactccaccctgctacagcctaagcagtagtgccagttccctctcagagcccgaaccatccgaaccacctgcggtgcacccacgggggcgggagcctgcagttacaaaagaccctggccccggcggaggacgtgactctagcccctctccacgcgccgctgaagagctgttgcagcggtgtatttcatccgccctccccagaagaaggccacccgtttctggcctccggcggaggaagccaagggctacccgactggacgagaggcctgccgaagggagcagggagcgaggtgaagaggccgccggctctgatcgcgcaagcgaccttgattccgtagagtggcgcgccattcaagaaggggctaactcgatcgtgacttggctgcatcaagcggctgctgcaacccgcgaggcttcctccgaaagtgactccatcctgtccttcgtctctggtctgagtgtgggctcgaccctgcaacccccaaagcatcggaagggacggcaggccgagggggaaatgggatctgctcggcgccccgaaaaaaggggggcggcgagtgtgaagacctctggttctccaagaagccccgccggccctgagaagccaaggggcacacagaagacaaccccgggcgttcccgctgtgttgagaggcaggactgtgatctacgtaccatctcctgccccaagagctcagcccaaaggaacacctggacccagagctacgcctcgcaaggtggctcctccttgccttgcacagccagctgctcctgccaaagtcccatctccgggccagcagcgttcccggtcgttgcaccggccagctaagacatcagagctagcaacactgagccagccacccaggtctgctaccccgccggcccgtcttgccaagacgccatctagtagtagctcgcagacctcgcctgctagtcagcctttgccgaggaagcggcccccggtgacacaagcagcaggagcactgccaggacctggcgcgagccctgtgccaaaaacaccggcgcgcacccttctggcaaagcaacacaaaacgcaaaggtcccctgtgcggatcccttttatgcagcgccctgcccgcagaggaccccccccactggctcgggcggtgccagagcccgggcccagaggcagggccggcacagaagcaggccctggagcccggggtggccggctagggctcgtgagagtggcctcggccctttcctctggaagcgagtcttccgacaggtctggattccgacggcagctgacttttatcaaggagtctcccgggctgagacgccgtaggtcggaattgagctccgccgaatcggctgctagcgcccctcagggagcatcaccacgacgcggacgccctgctctgcccgccgtgttcctgtgcagtagtcggtgcgaagaacttcgtgctgccccgcgtcagggacccgctccagctcggcagagacctcccgctgcccgaccctcgcccggtgagaggcccgcccgacgcacaacctcagagtcaccttccaggctgccagtcagggctcctgctgctcggccggagaccgtcaaaaggtatgcgtcactgccgcacattagtgtggctcgtcgcccagacggggcggtgcccgctgcccctgcctctgcagacgcagcacgccgttcatccgacggagagccacggcctttgccccgagtggccgctcccggaaccacttggcggagaatccgcgacgaagatgtcccccatatactgaggagtaccctgcctgccacagcccttccgctgcgggggagtacgcccgaggatgcgcccgccggtccccctccaagaaaaacgtccgacgctgtcgtgcagacggaagaagttgctgcacctaagaccaactccagcacttcaccttctttagaaacgagagaacctccaggggccccggcgggaggccagctgagccttctggggagcgatgttgatggcccaagtcttgcgaaagcccctatcagcgcaccctttgtgcacgaaggactcggggtggctgtcggagggttccccgccagcaggcatgggtctccctcgaggtccgcgcgcgtgcctccatttaactacgtgccgtctccaatggtggtggccgcaacaactgactccgctgccgagaaggcacccgctacagcctccgcaacgttgctggagtag

SEQ ID NO: 178202 - DNA, 6912 bp, synthetic construct
  misc_feature 1..6912: note = Description of Artificial Sequence: Synthetic coding sequence
  source 1..6912: mol_type = other DNA
atggccagcagcgtggccccctacgagcagctggtgcggcaggtggaagccctgaaagccgagaactcccaccttagacaggagctgagagacaactctagccatctctccaaactcgagaccgagacatctggcatgaaggaggtgctcaaacacctgcaggggaagttggagcaggaggcacgcgttctcgtgtcgagcggccaaacagaagtgctggaacagctcaaagccctgcagatggacattacctctttgtacaatctcaaattccagccccctaccttaggacccgagcccgcagccagaacacccgagggttctccagtgcacggcagcggaccttcaaaggactcctttggtgagctctcacgcgcaacaatacggctcctggaggaattagatcgggaaagatgctttctcctgaatgagatcgagaaagaagagaaagaaaagctctggtactatagtcagctccaggggctgtctaaacgcctggacgagctccctcatgtggaaacacagttctctatgcagatggatctgattcgacagcagctggaattcgaggcccagcacatcaggtctctgatggaggaacgcttcggtactagtgatgagatggtgcaacgcgcccagatccgagcctcccgcttggaacagatcgacaaggagctgctggaagcccaggacagggttcagcagactgagccacaggccctcttagcggtgaaatctgttccggtggacgaagaccctgagacggaggtgcctacacatcccgaagacggcacaccacaaccaggaaactcaaaagtggaagtagttttctggcttttatcaatgctggctacacgggaccaggaggacaccgcccgcactctgctggccatgtcatcatcaccggaaagttgcgtggctatgagaaggagtggctgtcttccactactgctccagatcctccatgggacagaagccgccgccggagggcgcgccggcgcccctggtgctcccggcgcgaaagacgctcggatgagggctaatgccgctctgcataacatcgtcttttcacagccagatcaggggttggcccgcaaggagatgagagtgcttcacgtattagagcagattagagcttactgcgaaacgtgttgggactggttgcaagccagagatggcggacctgaaggcggaggggccgggagtgccccgattcccattgagccacagatctgtcaggctacctgcgcggtaatgaagctgagcttcgatgaggagtaccgacgggctatgaacgagctggggggcctgcaagctgtggcagagctgctccaggtcgactacgaaatgcacaaaatgacacgcgaccccttaaatctggctctgaggagatacgccggtatgaccctaactaacctcaccttcggagatgttgcaaacaaggcaacgctgtgcgcacgacggggctgcatggaggcgatcgtagcccagttagcctcagactccgaagaactgcaccaagtggtgtccagtatcttaagaaatctgtcctggagagctgatattaacagcaaaaaagtgttgagggaggcgggatctgtgaccgcccttgtccagtgcgtgcttagggctactaaagaatctaccctcaagtccgtactgtccgcactgtggaacctatccgcacactccactgagaataaggcggcaatctgtcaagttgatggagcgttaggatttctggtctccacactaacctataagtgccaaagcaacagcctggctatcatagagtcaggggggggtattcttagaaatgttagttccctcgtggccacaagagaggactatcggcaagtattgcgagaccacaattgtcttcagacattattgcaacatctaacgtcccattcactcaccatcgtcagcaatgcttgtggaaccctctggaatctcagcgcaaggtccgcgcgggaccaagagttgctctgggacctgggggctgtcgggatgctccggaacctggttcacagtaaacataagatgattgccatgggttcagccgccgccctcagaaatctgctggcacatcgcccagcgaagcatcaggcagctgccactgctgtgtccccggggtcttgtgtcccatctttgtacgtgcgcaagcagagagccttggaggctgagttggatgcgcgccacctcgcccaagccctagagcacctggaaaagcagggtccacctgctgcagaagctgccacgaaaaaacctctgcccccactgaggcatctggacggtctggcacaggactatgcgtccgattcagggtgctttgatgacgacgacgccccatcttccctcgcagctgctgctgctacaggggaaccggcgtcacccgctgccctaagcttattcctcggcagtcctttcctgcaaggacaggctctggcaagaacacctcccacacgcaggggagggaaggaagctgagaaagatacatctggcgaggctgccgtcgccgctaaagccaaagccaaactggctctcgccgtggcacggatcgatcaactggtcgaagatattagcgccttacatacaagcagcgatgacagctttagcttgtcgtcaggagatccaggccaggaggccccgagggaggggagggcacagtcatgttccccctgccgcggaccagagggcggacgtcgggaggctgggagcagggcccatcccttgctgcgcctgaaagccgcccacgcctcattgagtaacgattctttaaattccggatcagcatccgacgggtattgtccccgggagcacatgctcccatgccccctcgcagccttggcatcccgtagggaggatccccggtgcggacagccccgaccaagcagactggatctcgacctgcccgggtgtcaggccgaaccgccggccagagaagccacctcagctgacgccagggtgcggactatcaagctgtccccaacataccagcatgtgcctctgctcgaaggcgcatctcgggccggagccgaacctctcgccggccctggcatttctccaggggcgaggaaacaggcttggctcccggcggatcacttgagcaaagtcccagagaagttggcggccgcacccctatctgtggccagcaaggccctccagaaactggccgcccaggaaggccccctgagtctgtcccggtgctctagtctctccagtttgagcagcgcaggccgccctggaccctctgaagggggagatctggacgacagtgactcatccctggaaggattggaagaagcaggaccgagcgaggctgagcttgattctacctggcgggctcccggcgcaacttcactccctgttgctattcctgccccgaggaggaacaggggtcgggggctgggagtggaagacgccactccatcttcttctagcgaaaactacgtgcaggagactcccctcgtgctgtctagatgtagttccgtgagctcgctggggagtttcgagtctccaagtatcgcgtcctcaatccccagcgagccctgtagtggccaaggctccggaactattagccctagtgaactccctgacagtcctggccagactatgcccccatcccggtcaaagacccccccgctggcccctgccccccaggggccacccgaggccacccagtttagcctgcaatgggagagttacgtcaaacggttcctggacatagccgattgtagagagaggtgtcgcctgcctagcgagctggatgcgggatccgtgcgatttactgtggagaagcctgatgaaaattttagctgcgcttcatcgctctcagcactggcactgcacgagcattatgtccagcaggatgtcgagcttcggctcctaccttctgcgtgccccgagcgtgggggtggagcaggtggagcgggcttgcactttgccggccatcgtcggagggaagaggggccagcccctaccggttctagaccgaggggggctgccgatcaggagttggaactgctccgggagtgtctaggcgccgctgtgccagctcgattacggaaggtggcgtctgctttggtccctggcaggcgtgccttaccagtgccagtatacatgctggtgccagcccctgcccccgcccaggaggatgattcatgcaccgactccgccgaaggcacccctgtcaatttcagttctgccgcgtctttatctgatgagaccctacagggcccacctagggaccaacctggcgggccagccgggcgtcagcgccctaccgggaggcctaccagtgcacgccaggcaatgggccatagacacaaggcgggtggcgccggaaggagtgctgagcagtcacgcggcgccggaaaaaaccgcgctgggcttgagttgcctctcgggagaccaccctccgctccggccgacaaagatggttcaaaaccggggaggacccgcggtgatggcgctctacagtcactttgtcttacaactcctacagaggaagccgtttattgtttttatggtaacgacagcgacgaggagcccccagcagctgcccccacccctacccaccggagaacctcagcaattccaagggcgtttacccgcgaacgtccacagggacgcaaggaggctcccgctccaagtaaagcggctccggccgccccgccccctgctcggacccagccatccttaattgccgatgagaccccaccatgttacagcctgtcgagcagtgcctcaagcctgagcgagccagagccctcagagccacccgccgtacacccacgcggaagagagcctgcggttactaaggatcctggtccaggcggcgggcgggattcatctcccagccccagggctgccgaagagctgctgcagcgctgcatatccagtgccctacctcgcaggcggccaccggtttcaggcctccggcgaagaaaacccagagctactcgcctggacgagaggcctgctgagggcagccgcgagcgcggagaggaagcagctggtagtgatcgtgcttctgacctggactccgtggaatggcgagcaattcaagaaggcgccaactctattgtcacctggctccaccaggcggccgccgccacacgggaggcttcatcggaatccgattcaattctatcgtttgttagcggcctctcagtgggatctacccttcagccacccaaacaccgtaaaggaagacaggctgaaggagagatggggtccgctcggaggccagagaaaagaggcgctgcatcagtcaagacttcagggtccccccgaagtcccgccgggccggaaaaacctcgcggaacgcaaaaaacgacgcctggcgtgcctgcggtacttaggggtagaactgttatttacgtcccctcacctgccccccgtgctcagccaaaaggcactcccggtccaagggccacccccagaaaggtggcccctccatgtctggcccagccagcggcaccggccaaggtacccagccctgggcaacagcggtccagaagtctacaccgtcccgccaaaaccagcgaactagctacactttcacagcctccacggagcgcaacaccgcctgcacgactcgcaaaaactccatcctcttctagttcccagacatcccctgcctcacaaccgctgccaagaaagcggcccccagttacccaggcagctggagcccttccagggccaggcgcatctcccgtccccaaaaccccagccagaaccctcctcgcaaaacagcataagactcagaggtcaccagttcggatacctttcatgcaacgacccgcgaggcgtgggccacctccactggcaagggctgtgccagagccaggaccacgaggcagagcagggaccgaagctggaccaggcgccagagggggcagactcggactggtacgggtcgctagcgccttaagctccggcagcgagagctcagacaggagcggattcagaagacagctgacatttataaaagagagtcctggcctgcgccgaaggcggtcagagctaagctccgcagagtcagcagcgagtgctcctcagggtgcctcccctagacgaggcaggccggcgctgcccgcagtcttcctctgttcttcccggtgtgaggaactcagggccgcaccccggcaaggcccagcccctgcccggcagcgacccccggccgccaggccgtcccccggggagcggccagcccggcggacaacgtcagagtcaccatcgcgccttcccgtgcgtgcacccgccgcccgcccagaaactgtcaagcggtatgcttctctgccacacatttcagttgctcggcggccggacggagctgtgccagctgccccagcttctgccgatgctgcgcgtcgaagctcagatggcgagccaagacccctgccccgggtcgctgctccaggtaccacttggcggcgtattcgtgatgaagatgtgccccacatcctgagaagcaccttacccgcaaccgctctaccactgcggggttccacacccgaagatgcccctgctgggcctccacccagaaagacctcagacgccgtagttcaaactgaggaagtggctgctccgaaaacaaactcctccaccagcccctcattggaaaccagggagccccccggagcccccgctgggggtcagctttccctcctggggtcagacgttgacgggccctccctcgccaaggctcctattagcgctcccttcgttcacgaaggactgggagtagcggtgggcggcttccctgcgtcgaggcatggatccccgtcccggtcggcccgcgtcccccccttcaactacgtaccctctcctatggtcgttgccgctacaaccgacagtgctgccgaaaaagcgcccgcaacagctagcgctaccctgttggagtag

SEQ ID NO: 178203 - DNA, 1545 bp, synthetic construct
  misc_feature 1..1545: note = Description of Artificial Sequence: Synthetic coding sequence
  source 1..1545: mol_type = other DNA
atgagctggccccggcggctgctgctgcggtacctgttccccgcccttctcctccacgggttgggagaggggagtgcactcctgcaccctgatagccggagccacccgcgcagcctcgaaaaatctgcttggcgtgcattcaaggaaagccagtgtcatcacatgctgaaacacctgcacaacggggcgagaatcaccgtacaaatgccacctactatcgaaggccactgggtatcaacaggctgcgaggtccgctctggaccagagtttatcacacgtagctataggttctatcataacaatactttcaaggcatatcagttttattacggctccaaccggtgcaccaaccccacttatacactcattatcagaggaaagatccggctgcgacaggcaagctggattatccggggtggaacagaggcggactaccagcttcataatgttcaagtcatatgccacacggaagccgtcgccgaaaagctggggcaacaggtgaatcgaacctgtccggggttcctggctgatgggggtccatgggtgcaggatgtggcctatgatctttggagagaggagaatggctgtgaatgcacaaaggcagtgaacttcgctatgcacgaactccagctaatccgcgttgagaaacaatatctgcaccacaatttggaccacctggtggaggaactttttctgggagacattcacacagacgctacacagcgcatgttctaccgcccgagctcttaccaaccacccctacaaaacgcgaaaaaccacgatcacgcttgtattgcttgccgaattatttacagatcagatgagcaccatccccccatcttaccgccaaaggccgaccttacaattggccttcatggggaatgggtctcccagaggtgtgaggtgaggcccgaggttctgtttctgaccagacattttatattccacgacaataacaatacttgggaggggcactactaccattacagtgaccctgtatgcaagcatcctacattctcgatctacgcgagagggaggtattcgagaggcgtcctgtctagcagagttatgggggggacagaattcgtgtttaaggtgaatcacatgaaggtgacccccatggacgccgcaactgcgagcctgcttaacgtgtttaatggtaacgaatgcggcgccgaaggctcttggcaggtggggattcagcaggacgtgacacataccaacggttgcgtggcattaggtattaaactaccccacaccgagtatgagatctttaaaatggagcaggacgcccgaggaaggtatttgttgttcaacggacagaggcccagcgacgggagctcccctgaccgtcctgaaaaacgggcgactagttaccagatgccacttgtgcagtgcgcatcgtcatccccgcgcgcggaagacctcgccgaagactctggttccagcctttatggcagagccccgggtaggcatacgtggtcactactgctggccgcccttgcctgtctggtgcccttgttacactggaacatccggcggtag

SEQ ID NO: 178204 - DNA, 1698 bp, synthetic construct
  misc_feature 1..1698: note = Description of Artificial Sequence: Synthetic coding sequence
  source 1..1698: mol_type = other DNA
atgaagcggcggtgcagctgcggcggcggcggcggccactgcagcagcgaacgtagacgcaccagacccgaagctgaggggcgagcgcgggcgcaactccccggccatcagattggagcccgaagggctggcggtccccgggcggggctggagatgtcttggccgcgcaggcttctactgaggtacctgtttccggccctgcttcttcacggactcggagagggttctgctttattgcaccccgattcaaggagccaccctcggtctctggagaagtccgcatggcgggccttcaaagaaagccaatgccatcacatgttgaagcatctgcacaatggcgctcgaattaccgttcaaatgccccccactatcgaaggccactgggtttccacaggatgtgaggtgcggtctggccctgaattcatcactcggagctacaggttctatcataacaacaccttcaaagcatatcagttttattacggatcaaaccgttgtacgaatcctacgtatacgctgatcatcaggggcaaaatccgcctcaggcaagcctcctggattatcaggggcgggacagaggccgactatcagttacacaacgttcaggtaatatgtcacactgaggctgtcgctgagaagctgggccagcaagtgaacagaacttgtccgggctttttagccgacggagggccttgggttcaggatgtggcttacgacctgtggcgagaagaaaacggatgtgagtgcactaaggccgtaaattttgccatgcacgaactgcaactcattagggttgagaagcagtatctgcaccataacctggaccacctcgttgaggaactgttcttgggggatatccataccgacgctactcagcggatgttttaccggccaagcagctaccaaccccctttgcagaacgcaaagaaccatgaccatgcttgtatcgcctgccgtattatctatcgcagcgacgagcaccaccctcctatcctaccaccaaaggctgacttgactatcggcctccatggggaatgggtgtcacagcgctgtgaggttcgtccagaggtgctttttcttacccggcactttatctttcacgacaacaacaacacatgggaagggcactactatcactactctgacccggtctgcaaacaccctacattttcaatatatgcccgtggacgctattcaaggggagtgctctccagcagagtgatggggggaacggagttcgtattcaaggtcaatcacatgaaagtaacaccaatggacgcagctaccgcaagcctgttgaacgtcttcaatggaaatgaatgtggggcggagggctcatggcaggtgggaatacagcaagatgttacgcacactaatggatgtgtggctctcggaattaagctgcctcacacggaatatgagatctttaaaatggagcaagacgcccgaggccggtatctgctgttcaatggtcagaggcctagcgacggcagctctccagatcggcccgaaaagcgggcaaccagctaccagatgcccttggtccagtgtgcgagcagctcccctcgcgctgaagacttagctgaggacagtggatctagcctgtatggaagagccccaggacgacacacttggtccttactgctggctgccctggcctgcctggtgccactgcttcactggaatattcgacggtag

SEQ ID NO: 178205 - DNA, 981 bp, synthetic construct
  misc_feature 1..981: note = Description of Artificial Sequence: Synthetic coding sequence
  source 1..981: mol_type = other DNA
atgccccccagcatcagcgccttccaggccgcctacatcggcatcgaggtcctgatagcgctggtaagtgttccagggaatgtgctagtgatatgggctgtgaaggtgaatcaggctctgcgggatgctaccttttgtttcattgtcagcttggcagtggctgatgttgcggtaggagccttggttattccactggcaatcctgataaatatcgggcctcagacgtacttccacacctgtctgatggtggcgtgccccgtgcttatcctgactcagtcatccatactggcgctgctggctatcgcagtggaccgctatcttagggtgaaaatcccgctgcgctataagatggtggtcacacctcggcgtgctgccgttgctatagctggttgctggatcctaagcttcgtcgtgggattaacgccaatgttcggatggaataatttaagtgcagtggagcgggcctgggccgccaacggatcaatgggcgagccagtgattaagtgcgagtttgagaaggtgatctccatggaatatatggtgtattttaactttttcgtttgggtgctgcctcccctgcttcttatggtgcttatctacttggaggttttctacttgattcgcaaacaacttaacaagaaggtgagtgcttcttccggcgatccccagaagtactacgggaaggagctcaagatcgctaagtcgttggctttgatactcttcctcttcgccctgagttggctccctctgcatatccttaactgtattaccctgttttgcccctcgtgccataagcctagcattctcacctacatcgccattttcctgacacacgggaattccgctatgaatccgatagtttacgcctttaggattcagaagttcagagtcactttcttgaaaatttggaatgaccactttcgctgccagcctgcacctcctattgatgaggatttaccagaagagcgccctgatgattag

SEQ ID NO: 178206 - DNA, 981 bp, synthetic construct
  misc_feature 1..981: note = Description of Artificial Sequence: Synthetic coding sequence
  source 1..981: mol_type = other DNA
atgccccccagcatcagcgccttccaggccgcctacatcggcatcgaggttctgatcgcccttgtaagcgttcccggtaatgttctcgtgatctgggctgtcaaagtcaatcaagccctcagagacgccaccttttgtttcatcgtgtctctcgcagtagccgacgtcgccgtcggagctcttgtgatacccctcgccattctcataaatatcggcccccaaacatacttccacacatgcctcatggtggcttgccccgtgcttattctcacgcaatcctctattcttgcactgctcgccatcgctgtcgacaggtacctcagagtgaaaatcccactccgttataagatggttgtaaccccccgtagggctgccgtggcaattgcaggttgctggatcttgtctttcgtggttggattgacgcctatgtttggttggaataatctgagtgctgtagagagggcatgggccgccaatgggagcatgggcgagcctgtgataaaatgtgaattcgagaaagttatcagtatggagtacatggtgtacttcaactttttcgtgtgggtgttaccccccctcctcttgatggtgctgatttatcttgaggtgttttacctgattagaaagcagctgaataaaaaagtcagcgcctcatcaggcgatccccagaagtactatggaaaggaacttaaaatcgcgaaatccctggccttgatcctgtttttgtttgctctgagttggctgccattgcacatcctcaactgcattactctgttctgcccttcttgccacaagccaagtatcttgacatatattgccattttcctgacacacggaaactccgcgatgaacccaatagtctacgcctttcgcatccaaaagtttcgagtcacatttctgaagatttggaatgatcacttccgttgccagcccgccccaccaatcgacgaggacctgcccgaagagcgaccggatgactag

SEQ ID NO: 178207 - DNA, 378 bp, synthetic construct
  misc_feature 1..378: note = Description of Artificial Sequence: Synthetic coding sequence
  source 1..378: mol_type = other DNA
atgccccccagcatcagcgccttccaggccgcctacatcggcatcgaggtgttgatcgccctggtttctgtgcccgggaacgtactcgtcatttgggccgtgaaggtgaaccaggccctacgcgacgccacattttgttttatcgtgtcacttgccgtcgctgacgttgccgtgggggcactcgtcattccactcgcaatcctcatcaacattggcccccagacttacttccacacctgcctcatggtcgcctgccccgtgttgatcctcactcagagcagtatcctggccctgctggcaatagctgtagaccgatacttaagagttaaaatcccactgcgtcggatatctcagtgcatggcgagcaccaagtcctag

SEQ ID NO: 178208 - DNA, 981 bp, synthetic construct
  misc_feature 1..981: note = Description of Artificial Sequence: Synthetic coding sequence
  source 1..981: mol_type = other DNA
atgccccccagcatcagcgccttccaggccgcctacatcggcatcgaggtgctgattgcacttgtgtcggttccggggaacgtgttagtaatttgggctgtgaaggttaatcaggctctgcgggacgccaccttctgtttcatcgtgtctctagcagttgccgatgttgcagtaggcgcgttggtaatcccactcgctattctaataaatattggccctcagacttatttccacacgtgcctcatggtggcatgtccggtgttgatcctgacccagtctagcatcttggccctcctggcgatcgccgtagatcggtacttgcgcgtgaaaataccgctcagatataaaatggtcgtcaccccacggagagccgctgtggccatcgcagggtgctggatcctttcgtttgtggtgggactgacaccaatgttcggttggaacaatctctccgctgttgagcgggcatgggctgcgaacggtagcatgggcgagccagtgattaagtgtgagttcgaaaaggtaatctctatggaatacatggtttactttaattttttcgtatgggtgctgcctcccctgttgttgatggttctgatctatcttgaggtgttctatctcatccgcaaacaactcaacaaaaaagtatccgcctcatccggagatccgcagaagtattatgggaaggaattgaagattgccaaatcactggccctcatactatttctgttcgctctatcctggctcccactgcacatcttgaattgtatcacattgttctgcccatcatgccataaaccttcaatcctgacctacatcgccatatttctgacccacgggaactccgcaatgaacccgatagtgtacgcctttcgcatccagaagttccgcgtgacttttctcaagatctggaacgaccactttagatgccagcctgcccctcccatcgacgaagacctgcccgaggaacgtcccgatgattag

SEQ ID NO: 178209 - DNA, 1239 bp, synthetic construct
  misc_feature 1..1239: note = Description of Artificial Sequence: Synthetic coding sequence
  source 1..1239: mol_type = other DNA
atgcccatcatgggcagcagcgtgtacatcaccgtggagctggccattgccgtactcgccatcctcggaaacgtgttagtatgttgggcagtttggttgaatagtaatctgcagaacgtgacaaactatttcgtggtgagcctcgctgctgcagatattgccgtgggggtgctagccatcccttttgcaataaccatctcaacaggtttctgtgccgcgtgccacggatgcttgtttattgcgtgtttcgttctggtcctgacccagagtagtatcttctcgctgcttgccatcgccatcgatcggtacatagccatccgcatcccacttagatacaacgggttagtgactgggactagagccaagggcatcattgctatatgctgggtgctctcgtttgctatcggcctgacgcccatgctcggatggaacaattgtggacagccaaaggaaggaaaaaatcactcccagggatgtggtgaaggccaggtggcctgtttgttcgaggatgtcgtgccaatgaattatatggtgtactttaacttctttgcctgtgttctggtgcccctacttctgatgttaggggtctacctgaggatcttcctggcggcgcggagacaactcaaacagatggaatcccagcccttgcctggcgaacgggcccgttctaccctgcagaaagaagtccacgctgccaagtcgcttgctataatagtagggctgttcgctctgtgctggctgccccttcacattatcaattgctttacttttttttgccccgactgttcacacgcgcctctgtggctgatgtatctggctatcgtattatcacacactaactctgttgtgaatcccttcatctacgcctacaggatcagagagttcagacagactttccgcaagatcattcgtagccacgtactgcgacagcaggagccatttaaagcagctggtacgtccgcccgggtattggcagcccacggatcagacggcgaacaagtcagccttcggctgaatggtcacccacccggtgtgtgggctaatggttctgcgccacacccagaacggcggccaaatggctatgcattggggcttgttagtggcggcagcgcgcaggaatcccagggcaacaccggactccccgacgtggagctactgagccatgagcttaagggggtgtgccccgagccccccggactggacgatccgctagcacaggatggagcaggtgtaagctag

SEQ ID NO: 178210 - DNA, 1239 bp, synthetic construct
  misc_feature 1..1239: note = Description of Artificial Sequence: Synthetic coding sequence
  source 1..1239: mol_type = other DNA
atgcccatcatgggcagcagcgtgtacatcaccgtggagctggccatcgctgtgttggctattttgggaaacgtgttagtgtgctgggccgtttggctgaattcgaatctgcagaacgtgactaattacttcgttgtgagtctggcagctgcagatatcgccgtgggagttcttgctatcccttttgctatcacaatctctactggattctgtgcagcttgtcacggttgcctgttcattgcatgttttgtcctggtcctcactcagtcatcaatcttttcactgctcgccattgctattgatcggtatatcgcgatcagaatccccctccggtacaatggactcgttactggcaccagggccaaaggtattatcgcaatttgctgggtgctctcatttgctattggtttgacccctatgttgggctggaacaattgtgggcagcctaaggaaggaaagaaccactcccagggatgcggggaggggcaggtggcttgcctattcgaagacgtggttcccatgaactacatggtgtatttcaatttttttgcgtgtgtgctggtgcccctcctcttgatgctgggcgtatacctgcggatattcttagcagcccgacgacagctgaagcagatggagtctcagccactgccgggcgaaagggcccgctcaacactacagaaagaggtccacgcagctaagagtctggctatcattgtcggattgttcgccttatgctggctccctctccatatcattaattgcttcactttcttctgtcctgattgttcccatgcgccgctgtggttgatgtatttggctattgtcctgtcccacactaacagcgttgtgaacccgtttatctacgcataccgcatccgcgaatttaggcagactttcaggaagatcattcggagccatgtactgcgccagcaggagcccttcaaggctgcaggaacttcagctcgcgtgctggctgctcacggctcagacggggagcaggtctctctgcgcttaaacggccaccctcctggcgtgtgggctaacggctccgcccctcatcctgaacgaagaccaaatggttacgcccttggccttgtaagcggcgggtctgctcaggaatctcagggcaacaccggcctccctgacgtggaactcctatcacatgagttgaaaggtgtatgcccagagcctccaggacttgatgacccgctagcccaggacggggccggggtgtcctag

SEQ ID NO: 178211 - DNA, 267 bp, synthetic construct
  misc_feature 1..267: note = Description of Artificial Sequence: Synthetic coding sequence
  source 1..267: mol_type = other DNA
atgcccatcatgggcagcagcgtgtacatcaccgtggagctggccatcgctgtactcgccatcctgggtaatgtgttagtgtgctgggcagtgtggttaaatagcaatttacagaatgtgaccaattatttcgtggttagccttgccgctgcagacattgctgtgggagtgctagcgataccctttgctattaccatctccactggcttttgcgccgcttgccacggctgtctgtttattgcgtgcttcgtgctggtactgacttag

SEQ ID NO: 178212 - DNA, 195 bp, synthetic construct
  misc_feature 1..195: note = Description of Artificial Sequence: Synthetic coding sequence
  source 1..195: mol_type = other DNA
atgcccatcatgggcagcagcgtgtacatcaccgtggagctggccatagcggtcttggccatcttaggtaacgtgcttgtatgttgggctgtctggttaaactccaaccttcaaaacgtcaccaactacttcgtggtgtccctcgccgccgccgatatcgccgtgggcgtgttggctatacccttcgcaatctag

SEQ ID NO: 178213 - DNA, 231 bp, synthetic construct
  misc_feature 1..231: note = Description of Artificial Sequence: Synthetic coding sequence
  source 1..231: mol_type = other DNA
atgcccatcatgggcagcagcgtgtacatcaccgtggagctggccattgctgtgttggctatcctcggcaatgttttagtgtgctgggctgtctggctcaacagcaacctgcaaaacgtgacgaactattttgtggtatccctcgccgcggcagacattgcagtcggagtgctggccattccatttgctatcacaatatctaccggtttttgcgccgcatgtcacggctag

SEQ ID NO: 178214 - DNA, 1098 bp, synthetic construct
  misc_feature 1..1098: note = Description of Artificial Sequence: Synthetic coding sequence
  source 1..1098: mol_type = other DNA
atgcccatcatgggcagcagcgtgtacatcaccgtggagctggccatagcggtgcttgcaatcctgggaaacgttctggtgtgttgggctgtctggcttaattcaaacctccagaacgtcaccaactacttcgtcgtgagcctagcggcggctgacattgcggtgggggtgctggcaatcccattcgccattacgattagcaccggtttctgcgctgcatgccacggatgtttatttattgcctgtttcgtgcttgtgttgacacaaagctctatcttctccctcttagccatcgctattgataggtatatagctatccgaatcccactgcgatataacgggcttgtcactgggaccagagccaagggcatcatcgctatttgttgggttctctcattcgccattggcctgaccccgatgctaggatggaacaactgtgggcagccaaaggagggcaagaaccatagtcagggatgcggagagggacaagtcgcgtgtctgtttgaggacgtcgttcccatgaactacatggtatacttcaatttcttcgcgtgtgtcttagtacctctgctattgatgctcggcgtctacctccgaatttttctggctgctcgacggcagttgaaacagatggaaagccagcccctccccggcgaaagggcaagaagtacacttcagaaagaagtccacgccgctaaatccctggccattatcgtggggctatttgccctatgctggctcccactgcatatcataaattgttttaccttcttttgtcctgattgttctcatgccccactctggctcatgtatctggccattgtgttgagccatactaactcagttgtgaacccgtttatttatgcgtaccgaataagggagtttagacagacttttcgaaagattatcaggagtcatgtgctgaggcagcaagaaccgttcaaggccgcaggcacctccgctagagtccttgctgctcacggatccgacggggaacaggtgagccttcgcctaaatggacatcctcccggtgtgtgggcaaacgggtcggctccgcacccagagaggcgccctaacggatatgccttgggcctctag

SEQ ID NO: 178215 - DNA, 1239 bp, synthetic construct
  misc_feature 1..1239: note = Description of Artificial Sequence: Synthetic coding sequence
  source 1..1239: mol_type = other DNA
atgcccatcatgggcagcagcgtgtacatcaccgtggagctggccatcgcggtgctggccattctcgggaacgtgttagtgtgttgggccgtgtggctgaattcaaatcttcaaaatgtcacaaactattttgttgtttctctcgccgccgccgatatcgcagtgggggtcctggccatcccattcgcaatcaccatctcgaccgggttttgcgctgcttgtcatggctgcctgtttatcgcttgcttcgtgctagtgctgactcagtcaagcattttctctttgctcgcaatagccatcgatcgttacatagccatacggattccattacggtataatgggctggtaacgggcacacgggcaaaaggaatcatagcaatctgctgggtgctgtccttcgcaatcggcttaactcccatgctcggatggaataattgcggtcagccaaaagaaggaaagaatcactctcagggatgcggcgaaggacaggttgcctgcctgtttgaggacgttgttcctatgaactatatggtttactttaactttttcgcatgtgttttggtgcccctgctgctgatgttgggagtgtatctaagaatcttcctggctgcccgacgtcagctgaagcagatggaaagccagccattgcccggggaacgcgccagatcaaccctccaaaaggaagtgcatgcagccaagtccttggcgatcatcgtgggactgttcgccctgtgttggctaccactgcatattatcaattgtttcaccttcttctgtccagattgcagtcacgcccccctgtggcttatgtacctggcaatagttctcagccatacaaattccgtggtgaatccttttatatacgcctataggattcgagaattccgccaaaccttccggaaaatcatcaggagccacgtcctgcgccagcaggagccctttaaagccgctggaacgagcgcacgtgtgctggctgcccacggttccgacggcgaacaggtttcgctaaggctaaacggacatccccccggtgtatgggccaatgggtccgccccccaccccgagcgacggcctaatggttatgctctggggctggtttccggtggatctgctcaagagagccagggcaacactggcctgccagacgttgagttgctgtctcatgaacttaagggggtttgtcccgaaccccctggccttgacgatccgcttgcccaggacggtgcaggcgtgtcctag

SEQ ID NO: 178216 - DNA, 999 bp, synthetic construct
  misc_feature 1..999: note = Description of Artificial Sequence: Synthetic coding sequence
  source 1..999: mol_type = other DNA
atgctgctggagacccaggacgccctgtacgtggccctggagctggtcatcgcggcgctttctgttgcaggcaatgtcctggtttgcgctgccgtggggacagctaacaccctgcagacgcccaccaattatttcttggtttctttggcagcagccgacgtggccgttggcttattcgctatcccatttgctatcacgatttctttgggattctgtacagacttctacgggtgcctgttcctggcatgctttgttctcgtcctgacgcagagcagcatattctccctgctcgctgttgccgtggacaggtacttagccatttgcgtaccactgcggtacaaaagcctggtaacaggaactcgcgctagaggcgtgatcgcggtgctctgggtgctggcatttggcatcggactcacacccttcctcgggtggaacagtaaagactctgccaccaataactgcacagagccttgggatggtacgaccaacgagtcgtgctgcctagtcaagtgcctcttcgaaaacgtggtgccaatgagttatatggtatactttaatttttttggttgtgtgctacctcctctgctaataatgctagtgatttatatcaagattttcttagttgcctgtcgccaacttcagcgaactgagctgatggaccacagccggactaccctccagcgggagattcacgccgcgaagagcctggcaatgattgttggaatctttgctctgtgctggctccccgtgcacgcagttaactgtgtgacactgtttcaacccgcccaaggcaaaaacaaacccaagtgggctatgaatatggctattttgttaagtcacgctaactccgtggtgaacccaatcgtttacgcttacagaaacagagactttaggtacaccttccacaagatcatatcaaggtacctgctgtgccaggctgacgtgaaaagtggaaatggccaggccggcgtgcagccagcactcggtgttgggctgtag

SEQ ID NO: 178217 - DNA, 957 bp, synthetic construct
  misc_feature 1..957: note = Description of Artificial Sequence: Synthetic coding sequence
  source 1..957: mol_type = other DNA
atgcccaacaacagcaccgccctgagcctggccaacgtgacctacatcacaatggagattttcatcggcctttgtgcgattgtgggcaatgtactcgtcatttgtgtcgtgaagttgaatccgagcctccagactaccaccttctacttcatcgtttctctagcactggccgacatcgctgtgggggtgctcgtgatgcctttagctatcgtggtgtctctggggattactattcacttttactcttgcctgtttatgacctgtctactgttgattttcacacatgcgtctatcatgagtctgcttgccatcgccgttgaccggtatcttcgcgtcaaattaacggtgcggtacaaaagagtgactacccacagacgcatctggctggcactggggctctgttggctcgttagcttcttggttggattgacaccaatgtttggctggaacatgaaactcacaagcgaatatcacaggaacgtgacctttcttagctgccaatttgtgtccgtcatgcggatggactacatggtgtacttctcatttctaacgtggatctttatcccactggttgtgatgtgcgctatctacctggacattttttacattataaggaacaaactgagtctgaacctcagcaattccaaggaaacaggcgctttctacggtagggagttcaagaccgctaaatccctctttttggtcctgtttctgttcgcattgtcctggctccctctctccattatcaactgtatcatctacttcaatggagaggtaccccagctcgtcctttacatgggaatcctattgagtcacgcgaacagtatgatgaaccctatcgtgtacgcatataaaatcaaaaagtttaaggagacctatctgctcattctgaaagcttgtgttgtttgccatccgagtgatagcttggacacttccatcgagaagaactctgagtag

SEQ ID NO: 178218 - DNA, 537 bp, synthetic construct
  misc_feature 1..537: note = Description of Artificial Sequence: Synthetic coding sequence
  source 1..537: mol_type = other DNA
atggagggcagccccgccggccccatcgagcagaaggaggcccggtgggaatcgagttgggaagagcaaccagactggactctgggctgcctgtcccctgagagccatacaaatcatgtggctctgagagatacgggaaaccagttgatcgttactatgtcatgtctgaccaaagaagacaccggttggtactggtgcggaatccagcgtgactttgctcgcgacgacatggacttcaccgaactgattgtaaccgatgataaggggacactagcaaatgatttctggagcggtaaagatctgtccgggaataagacccgtagctgtaaagctcccaaagtggtgagaaaggcagatcgcagcaggacttcaattctcatcatctgcatccttataaccggcttaggaattattagcgtgatttcacacctgacaaagagacggagaagtcagagaaacagacgggtcggaaataccttaaaacctttcagccgggtgcttactcccaaggagatggcccctactgaacaaatgtag

SEQ ID NO: 178219 - DNA, 1044 bp, synthetic construct
  misc_feature 1..1044: note = Description of Artificial Sequence: Synthetic coding sequence
  source 1..1044: mol_type = other DNA
atgcccaacaacagcaccgccctgagcctggccaacgtgacctacattactatggaaatctttattggcctgtgtgctatcgtgggcaacgtactggtcatatgtgtggtgaaactgaacccttctttgcagacaaccaccttctactttatcgtctcgctggcacttgccgatattgccgtgggggtgctcgtgatgcctctggcgatcgttgtctcactgggaattactattcatttctactcctgcctgttcatgacctgcttgctccttatcttcacacatgcgtctatcatgtcactcctggccatagccgtggacaggtatcttcgggtgaagctcacagttcgttttcggattccaggcctgccaggatgtatcctgtcctttcaactgaaagtatgctttcttcccgtgatgtggctgttcattctcctgagcctggcactgatcagcgacgcaatggtgatggacgagaaggtgaagcgatcgtttgtcctggatacagcctctgctatctgcaactataacgcacactacaagaaccacccgaaatactggtgtagaggttattttagggactactgtaatatcattgccttctcgcccaactcaacaaaccacgtcgccctgagggataccggaaatcagttgatcgtgactatgtcctgtctcacaaaagaggatacggggtggtactggtgcgggatccagagagacttcgcacgagatgatatggacttcactgaactgatcgtgactgacgacaaagggacccttgcgaatgacttttggtccggcaaggatctctcggggaataaaacaagaagctgcaaagcccctaaggtggtgcgaaaggcagaccgcagccgaacatccattctcatcatttgcattctcatcacaggattaggcatcatttccgtaatctctcatctcactaagagaagacggagtcagcgcaaccggcgcgtggggaatacactcaagcccttctcaagagtgcttacgcccaaagagatggcccctactgagcaaatgtag

SEQ ID NO: 178220 - DNA, 801 bp, synthetic construct
  misc_feature 1..801: note = Description of Artificial Sequence: Synthetic coding sequence
  source 1..801: mol_type = other DNA
atggagggcagccccgccggccccatcgagcagaaggaggcccggtgggagagctcttgggaagaacagccagattggacactcggatgcttgtctccggagagtcaatttcggatcccggggcttcctggctgcatcctatccttccaactgaaagtctgcttcctgccagttatgtggctcttcatcctgctctctctagctcttatctctgacgctatggtgatggacgaaaaagtgaaacgctccttcgttctggacaccgcctctgcgatttgtaattacaacgcacactataaaaaccaccctaagtactggtgtcgcgggtacttccgcgattactgcaatattatagcgttcagccctaattcaaccaatcatgtcgccctgagagacaccgggaaccagctgatagtgactatgagttgtttaacaaaagaggacaccggatggtactggtgcgggattcagagggattttgcgcgggacgatatggatttcacggagctcattgttaccgatgacaaagggacattggcgaacgacttctggagcggaaaagacctgtcaggaaataaaacccgatcatgtaaggctcctaaggtggtgagaaaggcagatagaagtcggacaagcattttgatcatctgtatactaattactggactgggcattatttctgtgatctcacatctgactaagagacggcgctcccaaaggaaccgacgggttgggaacactttgaagcctttctctagagtactcacgcccaaggagatggcacctacagagcagatgtag

SEQ ID NO: 178221 - DNA, 624 bp, synthetic construct
  misc_feature 1..624: note = Description of Artificial Sequence: Synthetic coding sequence
  source 1..624: mol_type = other DNA
tgaccccaggccctgcagggcccccccagcagcaacgacgccatggttatggatgagaaagtgaaacggagtttcgttttggataccgcttccgctatttgtaattacaacgcacattataaaaatcaccctaagtactggtgccggggatacttcagagattactgcaacatcatagccttttctcccaattcaaccaaccacgttgcacttcgggataccggaaaccaactcattgttacaatgagctgcctgacaaaagaagatactggttggtactggtgcggcattcaaagagattttgctcgcgacgacatggatttcactgaactgattgtgacagatgataaagggaccctcgccaatgacttctggagcgggaaggatttatcaggcaataaaacccggagttgcaaagcgcctaaagtggtccgcaaagctgaccgcagccgcacatccatattgatcatatgcatcctgatcactggactgggtattatttccgtgataagccacctcactaaacgcagacggtcccagagaaatcggagagttggaaacacgctgaagccttttagtcgcgtgctgactccgaaggagatggctcctaccgagcagatgtag

SEQ ID NO: 178222 - DNA, 348 bp, synthetic construct
  misc_feature 1..348: note = Description of Artificial Sequence: Synthetic coding sequence
  source 1..348: mol_type = other DNA
tgacccagcagccacgtggccctgcacagcaccctgctgggcagccattttagcacaaatcacgtggcactgcgagataccggcaatcaactgattgtcacaatgtcgtgcctgacaaaagaggacacgggctggtattggtgtggaatccaacgggactttgcccgagatgacatggacttcactgagctcatcgtgactgacgataagggtactctagctaatgatttctggagcggcaaggacttatccgggaataagacccgctcatgtaaagcaccgaaagtggtgcgaaaagcagaccgctccaggacttccatcctgataatctgcattttaattacatag

SEQ ID NO: 178223 - DNA, 519 bp, synthetic construct
  misc_feature 1..519: note = Description of Artificial Sequence: Synthetic coding sequence
  source 1..519: mol_type = other DNA
ggccccatcgagcagaaggaggcccggtgggagagcagctgggaggagcagccggactggaccctggggtgcctgtcaccagagagccacaccaaccacgtggctctgagggacaccggaaatcaactgatcgtcacaatgtcttgtctcacaaaggaggataccggctggtactggtgcgggatacagcgggacttcgcccgtgacgacatggattttaccgagttgattgtcacagatgacaagggcacactggccaacgacttttggtcaggcaaggatctgtccgggaacaagaccaggtcctgtaaggcccctaaggtcgtgcgaaaggccgacagatcccgtacatccatattgattatttgcattttaattaccggtctggggatcataagcgtgattagtcacctcacgaagcggaggcgaagccaaagaaacaggcgcgtgggtaatacactgaaacccttttctcgtgtactgacacccaaagagatggccccaaccgaacagatgtag

SEQ ID NO: 178224 - DNA, 1092 bp, synthetic construct
  misc_feature 1..1092: note = Description of Artificial Sequence: Synthetic coding sequence
  source 1..1092: mol_type = other DNA
atggcccagacccccgccttcgacaagcccaaggtggagctgcacgtccatctcgatggaagtatcaagcccgaaaccatcctctactacggtagacgtcgaggaattgctttacccgcaaacactgccgagggactactcaatgtaataggcatggacaaacccctcacattacctgactttttagccaagttcgactactacatgcctgccattgccgggtgtagagaagctataaagaggatcgcctatgagttcgttgagatgaaagccaaagagggagtggtatacgtagaggtccgctactccccacatttgctcgccaattccaaagtggagcccattccttggaaccaggccgagggcgatctgactccagatgaagtcgttgctctggtgggccagggcttgcaggagggcgagcgcgatttcggggttaaagcacgttctatcttatgctgtatgagacatcagccaaattggagtcccaaggtagtcgagttgtgcaaaaagtaccagcaacagaccgtggtggcgatcgatctggctggggacgagacgatccctggaagctctttactcccaggccacgttcaggcttaccaggaggccgtcaagtccggcatacaccgcaccgtgcacgcaggtgaggttggcagtgcagaggtggtaaaggaggcagtggacattttaaagactgagcggcttggccacgggtaccacactttagaagaccaagccttatataaccgcctgcgacaggagaatatgcacttcgaaatctgcccctggtcatcttatctcacaggagcctggaagccggatactgagcatgccgtcattaggctcaaaaatgaccaggcaaactatagtctgaatactgatgatcctctgatctttaaatcgacgctagatactgattatcagatgaccaaacgcgacatgggctttactgaggaggagttcaagcgcctgaatattaatgcagcaaagtcctcgtttctgcccgaggacgagaaacgggaacttttggatctgctgtacaaagcctacgggatgcccccatccgcatcagccggccagaacttgtag

SEQ ID NO: 178225 - DNA, 1731 bp, synthetic construct
  misc_feature 1..1731: note = Description of Artificial Sequence: Synthetic coding sequence
  source 1..1731: mol_type = other DNA
atggccagcaacaaccactggttccagagcagccaggtgcccagctttgcccagatgctgaaaaaaaatctacctgtccaaccagccactaagactataacaacccctacaggatggtcctctgagagttacgggctgtcaaaaatggctagcaaagtgacacaggtcactgggaacttcccggagccactgttatccaaaaatttgtctagcatctctaaccccgtgcttccacctaaaaaaatccccaaggagtttattatgaaatataaaagaggagagatcaatccagtgagcgctctgcaccagtttgctcagatgcagagagtgcagctggatctgaaagaaaccgtgaccactgggaacgtaatgggaccatattttgctttctgcgcggtagtcgatggaatccagtacaaaacaggtctcggccagaataagaaggagtctcgttccaacgcggctaagctagcacttgacgaactgttgcagttagatgaaccagaacctcgaatactggagacaagcggtccgccaccttttcccgcagagccagtggtgttgtcagaactcgcctacgtgtccaaggtccactatgaggggcgccacatacaatacgcaaaaatatcacagatcgtgaaggaaagatttaatcagcttatcagcaaccgttccgaataccttaaatattcaagctccctggccgctttcatcatagaacgggctggacagcacgaggtggtcgccatcgggacaggtgagtacaattacagccaagacattaagcctgacggccgagttcttcatgatactcacgctgtggtcacagcaagacggtctttgctgcggtacttctataggcagctactgctgttctactcaaagaacccagccatgatggagaaatcgatattttgcaccgaacctacgtccaaccttctaactctgaaacagaatataaacatttgtctgtacatgaatcagcttccgaagggcagcgctcagattaagtcccagctccgcctgaacccacatagcatctccgcatttgaagccaatgaggaactgtgtctgcatgtagcggtcgaagggaagatatacctgaccgtttactgcccaaaggacggagttaatcgcatttcaagcatgtcctcatccgataaactgacaagatgggaagtactcggggtgcaaggcgccctgctcagccactttattcagcctgtctacatcagcagtattctcattggggacggcaactgtagtgacactcggggactggaaatcgccattaaacagcgcgttgacgacgccttaacgagtaagttgccgatgttttacctcgtgaacagaccacatatcagcctcgtcccgtcagcataccccctgcagatgaatctggaatataagttcctgagcctgaattgggctcagggcgacgtgtcccttgaaattgttgacgggctgtccggaaagattactgaatcttcaccctttaaatccggaatgtccatggcaagcagattgtgtaaggccgccatgctgtccaggtttaaccttttagctaaagaggccaaaaaggagctactcgaagctggaacgtatcacgccgccaagtgcatgagtgccagctatcaggaggccaagtgcaaactgaagtcctaccttcaacagcacggttacggctcctggatcgtgaagtctccctgcatcgagcagttcaacatgtag

SEQ ID NO: 178226 - DNA, 1698 bp, synthetic construct
  misc_feature 1..1698: note = Description of Artificial Sequence: Synthetic coding sequence
  source 1..1698: mol_type = other DNA
atggccagcaacaaccactggttccagagcagccaggtgcccagcttcgcccagatgctgaaaaagaacctccctgtgcagcctgccacaaagacaatcactacgcccacaggttggagctccgagagttacggtctgtctaagatggcttctaaggtgacacaagtcacaggaaattttcctgagcctctgctcagcaagaatctgtcatctatctcaaatccagtgttgcctcctaagaaaatccctaaagagtttattatgaaatataaaaggggcgaaattaatcccgtgtctgcactgcaccaattcgctcagatgcagcgcgtgcagctcgatcttaaggagacagtgactacaggcaatgttatgggaccctacttcgccttttgtgctgtggtggatgggatccagtacaaaacaggcctgggccagaacaagaaggaaagccggagtaacgctgccaaattggccctcgacgagctcttgcaattggatgagcctgagcctcgcattctggaaacgtcgggaccgcctcctttcccagccgagcccgtcgtgttatctgagctggcctatgtctctaaagtacactacgagggcagacacatccaatacgcaaaaatctctcagatcgtcaaggaaaggttcaaccaactcatctccaatagatccgagtatttaaaatactctagctccctagccgccttcatcatcgagcgggctggacagcacgaggtagtcgccatcggtacaggcgagtacaattactcacaggacattaagccggacggacgagtcttacatgacacccacgccgttgtcactgctcggaggagcctgcttagtaaaaatccagcaatgatggaaaagtcaattttctgtaccgagcccactagcaatctgcttaccctcaagcagaatatcaatatatgcctatacatgaaccagctccctaagggcagtgctcaaatcaagtcccaactccgactgaatccccattctatcagcgccttcgaggcaaacgaagaactgtgtctgcacgtagccgtcgagggaaaaatctacctgacagtgtattgcccaaaagacggcgtcaacagaatatcttccatgagcagctctgataaattgaccaggtgggaagttcttggggtgcagggcgcacttttgagccactttatacagccagtctatatcagcagtatcttgataggggacggaaactgctcagatacaagagggctggaaattgccattaaacagcgcgtggacgacgccttaacttcgaagttgcctatgttctatcttgtgaatcgtcctcatatttccctagtcccctccgcctatcccctgcagatgaatctggagtacaagtttctgtctctgaattgggcccaaggggacgtgtcgctggaaatcgtggacggtctgagcgggaagatcacagagagctccccctttaagtctggcatgagcatggctagtcggctctgcaaggcagccatgctgtctagatttaacttgctggccaaagaagctaaaaaggagttgttggaagcaggaacataccacgcagccaagtgtatgtcagcaagctatcaggaagcgaaatgtaagctgaaaagctatttacaacagcacggatatggtagctggatcgttaaaagtccatgcatagagcaatttaacatgtag

SEQ ID NO: 178227 - DNA, 726 bp, synthetic construct
  misc_feature 1..726: note = Description of Artificial Sequence: Synthetic coding sequence
  source 1..726: mol_type = other DNA
atggccagcaacaaccactggttccagagcagccaggtgcccagctttgcccaaatgctcaaaaaaaacctcccagtccagccagctactaagaccatcacgacaccaaccggctggagctctgagtcctatggtctgagtaaaatggcaagcaaagttacacaggttacaggcaatttcccagagccgctgttgtccaaaaacctttcctctatatccaatccagtcctgcctccaaagaagataccaaaggagttcattatgaagtacaagagaggagaaatcaaccccgtgtcagcgctgcatcagttcgcccagatgcaacgcgtgcagttagatctgaaagagacagtgactacaggcaacgttatggggccgtacttcgccttttgcgccgtggtggacgggatccaatataagactggcttggggcaaaacaaaaaagaatcccgcagtaatgcagccaagctggccctggatgagctgctgcagctggatgaacctgagccaagaattcttgaaactagtggaccaccaccttttcccgccgaacccgtagttcttagtgaactggcctacgtcagcaaggtccactatgagggccggcatattcagtacgcgaaaatctcccagattgtaaaagagaggtttaatcagctaattagtaaccgatcagaatatctgaagtactcttcaagcctggctgcattcattatcgagagatag

SEQ ID NO: 178228 - DNA, 471 bp, synthetic construct
  misc_feature 1..471: note = Description of Artificial Sequence: Synthetic coding sequence
  source 1..471: mol_type = other DNA
atggccagcaacaaccactggttccagagcagccaggtgcccagctttgcccagatgctcaagaaaaacctcccggttcagcctgcgaccaagactattaccacccctaccggttggtcatcagagtcatatggcctgtccaaaatggcgagcaaggtgacccaagtgacggggaatttcccggaacccctgctgagcaaaaacctgtcatctatttccaacccagtcctgcccccaaaaaaaatccccaaagagtttatcatgaaatacaagcgaggagaaatcaacccagtgagcgcacttcaccagtttgctcagatgcaacgtgtacagctggatctgaaggagaccgtgactacggggaacgtgatgggaccttacttcgcgttctgcgccgtggtggacggcattcagtataagacagggttgggtcagaacaaaaaggagagcaggtcaaatgccgccaagtag

SEQ ID NO: 178229 - DNA, 1677 bp, synthetic construct
  misc_feature 1..1677: note = Description of Artificial Sequence: Synthetic coding sequence
  source 1..1677: mol_type = other DNA
atgctgaagaagaacctgcccgtgcagcccgccaccaagaccatcactacccccaccggctggtcctccgagtcatacggactcagcaaaatggctagcaaggtgactcaggtgacggggaattttcctgagcccctgttgtctaagaatctgagctcaatcagcaatcctgtgctaccccccaaaaaaattccaaaggaattcattatgaaatacaagcggggggagattaatcccgtctctgcgttgcaccaatttgcacagatgcagcgagtgcaactggacctgaaagaaacagtcaccacgggaaacgtcatggggccttacttcgcattctgcgctgtcgtggatgggattcagtacaaaacagggttaggccagaataaaaaagagtccaggtccaacgctgccaagttggctctcgatgaattactgcagctcgatgagccggagccacgtattctggaaacttctggaccccccccctttcctgcggagccggtggtgctcagtgagctggcctatgtgagtaaggtccattacgaaggaagacatattcagtacgccaaaataagtcaaatcgtgaaagagaggtttaaccagctcatttccaatagatccgaatatctgaaatattcgagctcactcgctgccttcattattgagcgagctggccagcatgaggttgtagccatcgggaccggggagtacaattatagccaggacatcaaaccagacggaagagtcctgcatgacactcacgccgttgtcaccgcgagacggagcctgttacggtatttctaccgacagctactgcttttttactctaagaatcccgccatgatggagaaaagcatattttgtacagagcctacctccaacctgctcacactcaaacagaatatcaatatctgcctgtacatgaatcagctgccaaagggtagcgcacaaataaagtctcaactgcgtttaaatccacacagcatatccgcctttgaggccaacgaggaactatgcttacacgtggccgttgagggaaaaatctatctcactgtgtactgccccaaggatggagttaatagaatttcatcgatgagcagctcagacaaacttaccagatgggaagtgctgggcgtgcaaggggcactcctttcgcacttcattcagcctgtctatatcagcagtattttgatcggggatggaaattgttctgacacgcggggacttgagattgccatcaagcaacgcgtggacgatgctctgacgagcaaattacctatgttttaccttgtgaataggccacatatctctctggtgcccagcgcatacccactccagatgaacctggaatacaaattcttgagtctgaactgggctcagggggacgtgagtctggagatagtcgatgggctatcaggaaagatcaccgagtcttctccctttaagtccgggatgtccatggcaagcagattgtgtaaagccgcaatgctatcccgattcaacctactcgcgaaggaagccaagaaggagctcctggaggccggcacgtatcacgccgccaaatgcatgtccgccagctaccaggaagccaagtgcaagttgaagagctacctgcagcagcatggatatgggtcatggattgttaagagtccatgcattgagcagttcaacatgtag

SEQ ID NO: 178230 - DNA, 3810 bp, synthetic construct
  misc_feature 1..3810: note = Description of Artificial Sequence: Synthetic coding sequence
  source 1..3810: mol_type = other DNA
atgatgagccccatctgcgaccagaccatcgacagccggctgaaggtggaaaaagctacttggtggggtcgcgtaggcggcggcagcagaccacattggcagagccctggtgtgaggccatgcccagaggaagttcaggaccccggatacagcctgtcaggctattatacacaccctttccagggatacgagcaccgccagctgcgctaccagcagcccgggccaggaagttcgccttcctccttcctgctgaagcagatcgagtttctcaaaggtcagctgcctgaagctcccgttatcggcaagcaaacaccaagcttacctcctagtcttccagggctgcggccccggtttccggtgcttctcgcctcaagcacaaggggtcgccaagtggatattcgcggcgtgcctcgaggcgtacatcttaggtcccaaggattacagcgtgggtttcaacacccttcacctagaggaagatcactgcctcagcggggcgtagattgcttatccagccactttcaggaactgagtatataccaggaccaggagcagcgtatccttaaatttcttgaagagttgggtgaggggaaggctacaactgcgcacgatctatctggcaagctggggacacctaagaaggagatcaatagagtgctgtatagcttggctaaaaagggcaagctgcaaaaggaggccggtaccccaccactgtggaaaattgcggtgtctacacaggcttggaatcagcattctggcgtagtccgcccagatggtcatagccaaggagcacccaactctgacccctctcttgaacccgaagacagaaactcgacttccgtttctgaggaccttctggagccctttatcgcggtatctgcccaggcgtggaaccagcactccggagtggttagacctgactctcacagccaaggatccccaaacagtgacccaggtctcgaacctgaggattcaaactctacatccgccctcgaggatcctctggagttcctagacatggcagaaatcaaagagaaaatctgcgattacctgtttaatgtcagtgacagctccgccctcaatctggctaagaacatcggactgactaaagcccgggacatcaatgctgttttaatcgatatggagagacagggagacgtgtaccgtcagggtacaacaccacccatctggcacttgactgataaaaagcgggagaggatgcagattaagcggaacaccaattctgttccagagacagcccctgctgcaatcccagaaaccaaaaggaatgccgaattcctgacgtgtaacattccgacaagtaatgcttccaacaacatggtgacgaccgaaaaagtcgagaacggccaagagcccgtaattaagctggagaacaggcaggaggccaggcccgaaccagctcgacttaaaccgcccgtccattacaacggtcccagcaaagctggttacgtcgatttcgaaaacggccaatgggccaccgatgacatccccgatgatctaaatagtattagagctgcccccggcgagtttcgggccatcatggaaatgccttcgttctacagccacggcttgcccaggtgtagtccgtataagaagctgaccgagtgtcagttgaagaatcctatatcgggactgctagaatacgcacagttcgcatctcagacctgtgagtttaacatgatcgagcaatctggcccacctcatgagccccgctttaaattccaagtagtcattaatggaagagagtttcctccggcggaagctggcagcaagaaggttgcgaaacaggacgccgccatgaaggcaatgactattctgttagaggaagccaaggcaaaggattctggaaagagtgaggagtccagccactactcaacagaaaaagagtcggaaaagactgcagagtcacagaccccaacccctagcgcgacgtctttcttctctggaaagtcccccgtgactacattactggaatgcatgcacaagctgggcaacagctgtgaattccgactcctgagcaaagaaggcccagcccacgaacctaaattccaatactgcgtggcagtcggagcacagaccttcccttccgtttctgccccttctaaaaaagtggccaagcagatggcagccgaggaagccatgaaggcgctccatggggaggccaccaactccatggccagtgacaaccagccagagggcatgatctccgagtcattagacaatctggaatctatgatgcccaacaaagtgcggaagattggtgaattggtgcggtatttgaatacaaaccctgtgggcgggctgctagaatacgccaggtcccacggattcgctgccgagttcaaactggtcgatcaaagcggccctcctcatgagcctaagtttgtatatcaggccaaggtgggaggccgctggttccccgcggtatgtgcccattccaaaaaacaaggaaaacaagaagcagcagacgccgcattgcgcgtgcttattggggagaacgagaaagccgaaaggatgggctttaccgaggtgactcctgtgacaggggcaagcctccggcgaactatgctcctactgagtagatcacccgaggcacagcccaaaactctgcccttaaccgggtcaacgttccacgatcagattgccatgctttctcatcgctgtttcaatactctgacaaattctttccagccctcactgctgggccgcaagatcttggcggctattatcatgaagaaggattcagaagatatgggcgtcgtggtctccttgggaaccggcaatcgctgcgtgaagggggattctctttcactgaaaggtgagactgtcaacgattgtcacgctgaaatcatcagtcgccgcggatttatcaggtttctgtacagtgagctcatgaagtacaattctcagacagccaaggattctatctttgaaccagcgaagggaggcgagaaactgcagatcaaaaagaccgttagtttccacctgtacatctctacggcaccatgcggagacggggcactgtttgataagagctgtagcgacagagccatggagtcaaccgagagtcgccactaccccgtttttgaaaatccaaaacagggcaagttgcggacaaaggtcgaaaacggtgaagggaccatcccagttgagagctcagatatcgtcccaacctgggacggcattcggttgggcgagcggttgcggaccatgtcctgctccgacaaaattttacggtggaacgtgctaggcttgcagggcgcattactcacccattttctgcagccgatttacctcaagtcagtcacactgggctacctatttagtcaggggcacctaacacgcgcaatctgttgccgggtcactcgtgacggctctgctttcgaggacggcctgcgccatcccttcatcgtgaatcaccctaaagttggaagagtttccatctatgattctaagcgccagagcggaaagacaaaggagaccagtgttaattggtgcctcgctgatggttatgacctggagattctggatggtactagagggaccgtcgatggcccccggaacgagttgtcccgagtcagcaaaaaaaatatcttcctgctgttcaagaaactgtgttcattcagatatcgacgagatctcttacgactgtcttacggagaagccaaaaaggccgccagggactacgaaaccgccaaaaactactttaaaaagggtctgaaagatatggggtatggcaattggatctcaaagccacaggaagagaaaaacttctatctttgccctgtgtag

SEQ ID NO: 178231 - DNA, 159 bp, synthetic construct
  misc_feature 1..159: note = Description of Artificial Sequence: Synthetic coding sequence
  source 1..159: mol_type = other DNA
atggccaacgagcacaccctgatccaccccgccagcatcgaggacccgctcgaggctaggccgatgtccgacgaggatcccgaagatgaggacgccttaccggctcggtggaaaaaggaaatgggccgaaaacgtaagcgcacgattgcaacattgtag

SEQ ID NO: 178232 - DNA, 2106 bp, synthetic construct
  misc_feature 1..2106: note = Description of Artificial Sequence: Synthetic coding sequence
  source 1..2106: mol_type = other DNA
atggacatcgaggacgaggagaacatgagcagcagcagcaccgacgtcaaagaaaatcggaacctggacaacgtgagtcccaaagacggttccacccccggccctggtgagggaagtcagttaagtaacggtgggggaggcgggcccggcagaaaaagaccgctggaagaggggtctaatgggcatagtaagtaccgcctgaagaagagacgcaaaacacctggacctgtcctgccgaaaaatgccttgatgcagctgaatgagatcaaacccggtctacagtatacactcctttcccagactggcccggtccatgcaccactgttcgttatgtccgtggaagtgaacggccaggtgttcgaaggcagcggccccacaaagaaaaaggccaagcttcacgcggcagagaaggctctgcgttcgtttgttcagtttccgaatgcctccgaagcccatctcgcaatggggcgaacactgagcgtaaataccgattttactagcgaccaagccgatttcccagatacactgtttaacggttttgagacgcccgataaagccgagcctcctttttacgttgggtcaaacggagacgacagcttctcaagcagcggagacttgagtctctcagctagccccgtgcctgcctctcttgcccagccaccactgccggtgttgccgcccttcccaccacccagcggcaaaaatcctgtgatgattctgaatgagctgcggcccgggttaaagtacgacttcttgagtgaatcaggcgaatctcatgcaaagtccttcgtgatgtccgtcgtggttgatggccagttttttgaaggaagcggccgaaataagaagctggccaaggctcgggccgcccagagcgctctggccgctattttcaatcttcacttagaccagaccccatcgaggcagcccatcccttcagaaggcctacagctgcatctacctcaggtgcttgctgacgctgtgtcacgccttgtcctcggaaaatttggtgacctaacagataacttctctagcccacatgcccgtaggaaagttttagctggcgtcgtgatgactacaggtacggacgtcaaggacgccaaggtgatctccgtgtcaaccggaacaaagtgtatcaacggggagtatatgagtgatcgaggcctagctctgaatgactgtcatgccgaaattatctcaagacgtagtctcctcagattcctctatacccagttagaactctacctgaataataaggatgaccagaaaaggtccatttttcagaagtcagagagggggggattcagactgaaggagaacgtgcagttccacctgtacatcagcacttcaccctgtggtgatgccagaatcttttctccccatgaaccaatcctggaggagccagcagataggcaccccaacaggaaggccagagggcaactcaggaccaagatcgagtctggggagggtacaattccagtgcgctcgaacgcctctatccagacatgggatggcgttctgcaaggcgagagactgctgacaatgtcctgcagcgataaaatagccaggtggaatgtggtgggcatacagggcagcctgctgtcgatttttgttgagcctatttacttcagtagtatcattctggggagcctgtaccatggagatcacctgtcccgtgccatgtaccagaggatatccaacattgaggatctccctccactctacaccctgaataaacccttgctctccggaattagcaacgcagaagctcggcagcctgggaaagcccccaattttagcgtcaactggaccgtgggtgacagtgccatcgaggtcattaatgccactactggaaaggacgagttgggccgcgcaagtcggctttgcaaacacgccctgtactgtaggtggatgcgagttcatggcaaagtcccaagccacctgctcaggagcaaaatcactaagcccaacgtgtatcacgaatcaaagctcgccgccaaagagtatcaggctgccaaggcaaggctattcactgccttcattaaggctggtctgggcgcatgggtagagaagccgactgagcaggaccagttctccctcaccccatag

SEQ ID NO: 178233 - DNA, 2226 bp, synthetic construct
  misc_feature 1..2226: note = Description of Artificial Sequence: Synthetic coding sequence
  source 1..2226: mol_type = other DNA
atggacatcgaggacgaggagaacatgagcagcagcagcaccgacgtaaaagagaacaggaacctggataacgtctcacccaaggatggatctactcccggtcccggcgagggatcacagctgagtaacggggggggagggggacctggtaggaagcgccccctcgaagaaggttcgaacgggcatagtaagtaccggctgaagaagcggcgaaagactcctggccctgtgctgcctaagaatgctctcatgcagctgaacgaaataaagcctggtcttcaatacactcttctgagccagaccgggcccgtgcacgctcctctctttgtgatgtcggtggaagtgaacggccaggtgtttgaaggctcgggccccacgaaaaaaaaggccaaacttcatgccgccgagaaagcactgagaagcttcgtccaattcccaaatgcatctgaagctcacctagctatgggaaggactcttagcgttaacaccgatttcacgtcagatcaggctgacttccctgacactctcttcaatgggttcgaaactcctgacaaagccgagcctcccttttacgttggttcaaatggagatgacagtttttctagcagtggagatctctcactgtcagcgtctcccgtgcccgcctcactcgctcaaccaccattaccagtacttcccccatttccccccccctctggtaaaaaccccgtaatgatcctgaatgagttgcgccccggcctgaaatatgactttctcagcgagtccggggagagtcacgcgaaatcattcgtgatgtctgtggtcgttgacggccagttcttcgagggcagcggtagaaataagaagctagccaaggcccgggctgcccagtctgcacttgccgctatcttcaacttgcatctcgatcagactccatcccggcaacccatcccctcagagggtctccagctccacctcccccaggtcctggcggatgcagtgtcacgcttagtcttgggcaaatttggggatcttacagataacttcagctctcctcacgcccggcggaaggtgctggccggtgtggtgatgacaacaggtacagatgtgaaggatgccaaagtaatatctgtatcaacagggaccaaatgtattaatggcgagtatatgtccgacaggggcctggccctaaacgactgtcatgctgagataatatctcgccggtctctgcttagatttctttatacccagctcgaactctatctgaacaataaagatgatcagaagcgcagcattttccaaaagagtgaacgaggaggtttccgcctaaaggaaaatgtgcaattccacttgtatatctcaacaagcccctgtggggatgctcgcattttcagcccacacgaacccattttagagggttctcgatcttatacgcaggcaggcgtgcagtggtgtaaccatggatccctccagccaagaccgcccggcctcctatccgatccaagtacttcaaccttccaaggcgctgggacgacggagcccgcagacagacaccctaatcgtaaggcccgtgggcagctgcggactaagatcgagtctggggagggtaccattcctgtgaggtctaatgcgtccattcaaacatgggatggcgtcttacagggagagcggctgctgaccatgagttgttccgacaaaatagcccggtggaatgtcgttgggattcagggtagcctactgtcaatctttgtggagccaatttattttagttccataatcctggggagcttatatcatggggaccatctgagccgagctatgtaccagagaatctcgaatattgaggacctccctccattgtatacactgaacaagcccttgctctcagggatttctaatgccgaggccagacaaccggggaaggcaccaaacttctcagtgaattggacagttggagatagtgcaattgaggtgattaacgccactacggggaaggatgagctgggtagagccagtaggctctgcaaacatgcgttatactgcagatggatgcgtgtacacggtaaggtgccatcccatctgcttagatccaaaattacaaaaccaaacgtgtatcatgagtcaaagttagccgccaaagaataccaggcagctaaagcaaggctgtttacagcatttattaaggcaggcctgggagcttgggtggagaaaccaacagagcaggatcagttctctctgacaccttag

SEQ ID NO: 178234 - DNA, 2145 bp, synthetic construct
  misc_feature 1..2145: note = Description of Artificial Sequence: Synthetic coding sequence
  source 1..2145: mol_type = other DNA
atggacatcgaggacgaggagaacatgagcagcagcagcaccgacgttaaggagaataggaacctggacaatgtttcccccaaagatgggtccactccgggccccggagagggctctcagctctctaacggaggcgggggcggcccaggaagaaagcgcccactggaggagggcagcaatggtcacagcaagtataggctcaagaaaaggaggaaaacgcccggccccgtacttccaaaaaacgctctgatgcagcttaatgagattaagcctggcctgcaatatacgctcctatcacagactgggcctgtgcatgctcctctctttgttatgagtgtagaagtgaacggacaagttttcgagggctcgggcccgactaaaaagaaggcgaaattgcacgccgctgagaaagcactgagatccttcgttcaattccctaacgcctcagaggcccacctcgccatgggtcggaccctctcagtcaacactgattttaccagcgaccaggcggatttccccgacaccctgtttaacggcttcgagactcctgataaagcagagcccccattctatgtgggatcaaatggggatgattcgttctcctctagcggcgatctctcactgtccgcatcccccgtgccggccagtctggcccagcccccgttaccagtcctcccccctttccctccaccttcaggtaaaaatcccgttatgatcctgaacgaacttcggccgggtctgaaatacgactttctgtcagagtccggcgagtctcacgcaaaatcattcgtgatgtcagtggttgtagatggccagttttttgaggggtccgggcgtaacaagaaattagcaaaagcccgcgcggcccaatccgccctagccgctatttttaatctccatctggatcagactccttcccgacagccaataccgtcagaggggcttcagctgcacctgcctcaagttctcgctgacgcagtcagtaggttagtccttggcaaattcggagatctgacggacaatttttcgtcaccgcacgctcgtagaaaggtgctagcaggcgtcgtgatgaccaccgggacagacgttaaggatgctaaagtcatctcggtgagcaccggtacaaaatgcattaacggtgaatacatgagcgacaggggtctggccctgaacgactgccacgctgaaatcatctcaagaaggtccctgctgcggtttctgtatacacagctcgaactctatttgaataataaagatgatcagaagagatccatattccagaaaagtgagagaggcgggttccgcttgaaagaaaacgtccagtttcatctctatatctctacctctccctgtggggatgctcgtatcttctctccacacgagcctatcctcgagggctccaggtcctacacacaggcaggggtgcagtggtgtaaccatggttctttacagccacggcctccgggcctgctcagcgacccaagcacttcaaccttccaaggcgctgggacaacagagcctgccgacagacacccaaatcgaaaagcccgaggacagttgagaacaaagattgaatccggcgaggggacaattccggtgagatccaacgcatctattcagacatgggatggggtgttgcagggcgagaggttgttaaccatgtcctgtagtgacaagatcgctaggtggaatgtcgtgggtatccagggcagcctcttgtcaattttcgtggagcccatttatttttccagcattatcttggggtccctctatcatggcgatcatctgtctcgagccatgtatcagcgaatatctaatatcgaggatttgcctccactatacaccctgaacaaacccctgctctctggtatcagcaacgccgaagccaggcagccagggaaagcccccaacttttctgttaattggacggtgggagattccgctatcgaagtgattaatgcaaccaccggaaaggatgagctagggcgggccagtcgcctttgtaaacacgccctttattgccgctggatgagggtgcatggcaaggtgccttcacacctcctccgcagcaaaatcactaaaccaaatgtctaccacgagagcaaactggctgccaaggaatatcaggccgccaaggtgcattag

SEQ ID NO: 178235 - DNA, 39 bp, synthetic construct; identical to SEQ ID NO: 72041
  misc_feature 1..39: note = Description of Artificial Sequence: Synthetic coding sequence
  source 1..39: mol_type = other DNA

SEQ ID NO: 178236 - DNA, 426 bp, synthetic construct
  misc_feature 1..426: note = Description of Artificial Sequence: Synthetic coding sequence
  source 1..426: mol_type = other DNA
atggacatcgaggacgaggagaacatgagcagcagcagcaccgacgtgaaggagaaccgcaacctggacaatgtgtctcctaaggatggctccacacctggcccaggggaagggagccagcttagtaacggcggcggggggggcccaggtagaaagcggcctcttgaggaagggagcaatggacactccaaataccggctgaaaaagcgacggaagacccctgggcccgtccttcctaaaaacgcactcatgcaactgaacgagataaaacctggcctccagtacacactactctctcagaccggtcccgtgcacgcacctttgttcgtcatgagtgtggaggtgaacggccaggtttttgagggctccggcccgaccaaaaagaaagccaagctgcacgcagccgaaaaggccctgcgaagctag

SEQ ID NO: 178237 - DNA, 2226 bp, synthetic construct
  misc_feature 1..2226: note = Description of Artificial Sequence: Synthetic coding sequence
  source 1..2226: mol_type = other DNA
atggacatcgaggacgaggagaacatgagcagcagcagcaccgacgtgaaagaaaacagaaatttagacaacgtgagtcctaaggatggctctactccaggtccgggcgaaggctcacaactgagcaatggtggcggaggcggtcctggcaggaagcgccctctcgaggagggatccaacggccattctaagtacaggctgaaaaagagacgaaaaacgccaggcccagtgctcccaaaaaacgcgctgatgcagctgaacgaaattaagcccggacttcagtatacgcttctgtcccaaactggcccggtacatgcacccctgtttgtgatgtcagtcgaagtcaacggtcaagtatttgaaggatccgggccaaccaagaaaaaggccaaactccacgctgcagagaaggctctcagatcatttgtgcagtttccaaacgcttctgaagctcacctggcaatgggacgaaccctgtcagtaaatacagacttcaccagtgaccaggcagactttccggataccttgttcaacggattcgagaccccagacaaggccgaaccgccattttacgtcggaagcaacggcgacgatagtttttcgtcctcgggagatctctctctgagcgcgtcccctgtgccagcatctctggcacagccaccgctgcctgtacttcccccatttcctcccccaagtgggaaaaatcctgtgatgattctgaacgagctgagacccgggctgaaatatgatttcttgtctgaaagcggagaatcccatgccaagtcttttgtgatgtctgtagtcgtagatggccaattttttgagggctctggcagaaacaagaagcttgctaaagcacgcgctgcccagagtgctcttgccgcaatttttaaccttcacctggaccagaccccaagcaggcagcccataccttcggagggtctccagctgcatttgccccaagttttagctgacgctgtgagtcggttagtgctgggaaagttcggcgacttgaccgacaacttctcctctccacacgccagaaggaaagtcctcgcaggtgtcgtgatgaccaccggtaccgatgttaaggatgcaaaggtgatttcagtcagcacgggaactaagtgcatcaatggggaatatatgtctgataggggcctggctctgaatgattgtcacgctgagattatcagccgcagatcactgctcaggttcctgtacacacagctcgaactgtatctgaacaacaaggatgatcagaaacgtagtatctttcagaaatcagagaggggcggatttcggctgaaggaaaatgtacagtttcacctttacatctccacgagcccatgcggcgatgcacgcatttttagcccccatgagcccatcttagaaggtagtcgctcctatactcaagcaggcgtgcagtggtgcaatcacggtagtctccagccacggcctcctggtctgctctctgatccttcaacttcaactttccagggcgccggaactactgaacccgctgatcggcaccctaaccggaaggcgcgcggtcagctgagaacaaaaatagagagcggggaaggcaccatccccgtcaggtcaaacgcctctattcagacctgggacggggtgcttcagggggaaaggctgctgacaatgtcctgctccgataagatagctaggtggaacgtggtcggaattcagggatctttgctgtccatctttgtggaacccatctatttcagcagcattatcctgggctctctttatcatggggatcacctaagtcgggctatgtaccagcggatctcaaacatcgaagatttgccacccttgtataccttaaataaacctctcctgagcgggatatctaacgccgaggcgagacagcctggcaaggctccgaattttagtgtgaactggaccgtgggggactcggctatcgaagtgatcaatgctactaccgggaaggatgaacttggccgagcatcaagattgtgcaaacacgcactgtactgccggtggatgagagtgcacggcaaagtaccaagccacttgcttcgatccaaaatcacaaaacccaacgtctaccacgagagtaaattggctgctaaagagtaccaagccgcaaaggcccggctgttcaccgccttcattaaagcaggcttaggagcctgggtggagaaacctactgagcaggaccagttcagcctcactccttag

SEQ ID NO: 178238 - DNA, 2226 bp, synthetic construct
  misc_feature 1..2226: note = Description of Artificial Sequence: Synthetic coding sequence
  source 1..2226: mol_type = other DNA
atggacatcgaggacgaggagaacatgagcagcagcagcaccgacgttaaagaaaatagaaatctggataatgtatcacccaaggacggctccactcccggccctggggaagggtcacagctgagcaacggcggaggagggggccctgggaggaagcggccccttgaagagggaagtaatggacactccaagtaccgcctgaagaaaagacgaaagactccaggaccggttttgccaaaaaatgcactcatgcagttaaatgaaatcaagcctgggctgcaatataccttgctcagtcagacagggcccgtgcatgccccgctatttgtgatgtcggtggaagtcaacgggcaggtgtttgaaggctctgggccaaccaaaaagaaagccaagctgcacgccgccgagaaggcactgagatcttttgtgcagtttccaaatgcaagcgaggctcatctggctatgggtaggaccctgagcgtgaacaccgacttcacgtcggaccaggccgattttccagacaccctctttaacggcttcgagactccagacaaagctgagcctccattctacgtggggagcaacggggatgatagcttctccagttcaggagatctgtccttgagcgcctctccagtgcccgccagtctggctcagccccccctgcctgtgctcccaccttttccgccaccatccggcaagaaccccgttatgatccttaatgaacttagaccaggcttaaagtatgatttcctgagtgagtcgggtgaaagccacgccaagtccttcgtgatgtccgttgttgtagacggacagttttttgaaggctccggacgcaacaagaagcttgccaaggcaagggcagcacagagtgcactcgccgccatcttcaatctacatctcgaccaaaccccctcaagacaacctatcccaagcgaaggactacaattgcacctgcctcaggtgctggctgatgccgtgagccgcctggtgctgggaaagttcggcgacctgaccgacaacttctcgtcccctcatgctcgacgcaaggtattggcaggagtcgttatgaccactggaaccgatgtgaaagacgccaaagtaatctctgtgtctactgggacaaagtgcattaacggcgaatatatgtcagaccggggtctggccctgaatgattgccacgcagaaattatcagccgccgatctctgcttcgttttctgtatactcagctcgagctgtacctgaacaacaaggatgatcagaagcgttcaattttccaaaagagcgaacgaggcggattcaggctgaaagaaaacgttcagtttcacctgtacatctcaacctcgccttgcggggacgcgcggatcttttctccccatgagcccatcctggagggatctagatcatacactcaagccggtgtacagtggtgcaatcacggctcccttcaacccagacctcccggacttctatcagacccttcaacctctacttttcagggcgcagggacgacagagcctgcagaccgacatcctaaccggaaagctagaggtcagcttaggacgaagatcgagtctggagagggaacgattcccgtgcgcagtaacgcctccatacagacctgggatggagtgctgcagggggaacgactgctgacaatgtcttgttctgacaagatcgcaaggtggaatgttgtgggcatacaaggttctctcctgtctatcttcgtggagcccatttacttttcctctattattctgggatcactctatcacggcgatcatctgtcccgagcgatgtaccaaaggatctctaacatagaggacctgccacccctctacacacttaacaagcctctactttccggcatttccaacgccgaagctcggcaacccggcaaagctcctaactttagcgtcaattggaccgtcggggactccgcaatcgaggtcattaatgcaactactgggaaggatgaactcggtcgcgccagcaggttgtgtaaacacgcactgtactgccggtggatgcgagtgcacgggaaggtgcctagtcacctcctgagaagcaagataactaaacccaacgtttaccatgaatctaagctggcagccaaggaataccaggccgccaaggctcggctgttcaccgccttcataaaggccggtcttggcgcatgggtcgagaaacccactgaacaggaccagttctctttgacaccctag

SEQ ID NO: 178239 - DNA, 2097 bp, synthetic construct
  misc_feature 1..2097: note = Description of Artificial Sequence: Synthetic coding sequence
  source 1..2097: mol_type = other DNA
atggacatcgaggacgaggagaacatgagcagcagcagcaccgacgtcaaagaaaacagaaacctcgacaacgtctcccccaaggacgggtccactccaggcccaggcgagggcagccagttgagcaacggaggtggcgggggacctggtcggaagaggcctctggaagaagggagtaatggccattctaagtatcgcctgaaaaaacgcaggaagacaccaggaccagtattgcctaaaaacgcactgatgcagctgaacgaaattaaacccggcttgcaatataccttgctcagccagacaggcccagttcacgcacccctgttcgtgatgtcggtggaagtcaatggtcaggtgttcgaggggagtggacccacaaagaagaaggcaaagctgcatgccgcggagaaagccctcaggagtttcgttcagttcccaaacgcgagtgaggcgcacctggcaatggggaggaccttatctgtgaacacggacttcacatccgaccaagccgacttccctgacaccctctttaatgggtttgaaacaccggacaaggccgagccccctttctacgtcggctccaatggggacgactcattctcttcaagtggtgatctgagcctcagcgcatcccccgtgcctgccagccttgcccagccgccattgcctgtcctgcccccatttccccccccatctgggaagaatccggtaatgattctcaatgagttgcggcctggcttaaaatatgatttcctgtcagaaagcggggagtcccacgccaaaagcttcgtgatgtcagtggttgtcgacggccagtttttcgagggcagcgggcgcaataaaaagcttgcaaaggcccgcgcagcccagtctgcactggcggcgatttttaacctccatctcgaccagacaccatcacgacaaccaatcccctccgagggtctgcagctgcatttgcctcaggtgcttgccgatgccgtctcaaggctcgtgctaggcaagtttggcgatcttacagacaatttttcatccccccacgcccggcgcaaagtcctggcgggggtggttatgacaaccggtacagacgtcaaagacgctaaggtgatttccgtttctaccggtacaaagtgtattaacggggaatacatgtccgacaggggcctagccctgaatgactgtcacgctgagattatttccaggcgttcactgctgcggtttctctatacccaactcgaactctacctgaataacaaagatgatcaaaagcgctccatattccaaaaaagtgagcggggtggcttccgactgaaagaaaatgtacaattccacctgtacatatccacttctccatgcggagacgccaggatcttctcacctcatgaacccatcttagaggggagccgcagctatacacaggcaggggtgcaatggtgtaatcacggcagtctgcaaccaagaccaccaggcctgctgtctgaccctagcacttcaacatttcagggagctggtactacagagccagctgataggcaccccaaccggaaagcaaggggacagctgagaaccaagattgaatctggggagggtacgatacctgtcaggagcaatgcatccatacagacttgggatggagtgttgcagggtgaacgtctccttaccatgagctgtagtgacaagattgctcgatggaatgtagttgggatacagggctccttgctgagcatctttgtggaaccaatctatttttcatctataattcttggctccctctaccacggagatcatctgtccagggcaatgtatcagcggataagtaatatcgaagacctgcctcctctctacactctgaacaaacccctcctcagtggcatctccaatgcagaagctagacagcccggaaaggcccctaatttttctgtcaactggactgtcggcgactcagcgattgaggtgataaatgcaacaactggcaaggacgagctggggagagcatctagactctgtaagcacgcattgtactgccgctgggcctgtgcgagacaaggctccctccccctgaccaccttacaggactaccaggctcagcgcgtgccttag

SEQ ID NO: 178240 - DNA, 426 bp, synthetic construct
  misc_feature 1..426: note = Description of Artificial Sequence: Synthetic coding sequence
  source 1..426: mol_type = other DNA
atgagccaccggatggagggcgtgggccagctgcccgccagctacaggcataaccgacccttactctccggcgtgtctgacgctgaggcccgacaacccggtaaatctccaccgttcagcatgaattgggtcgttggatccgctgacctcgagattattaacgctaccaccgggcggcggtcctgtggcggcccgagccggttgtgcaaacacgtcttatcagcccgttgggcgaggctttacgggcgcctgtcaaccagaaccccttccccaggcgacacacctagtatgtattgtgaagccaagctgggggcccacacctatcaatccgtgaagcagcagctatttaaggcctttcaaaaagctggattgggcacctgggttcgcaagccccctgaacagcaacagtttctgcttactctgtag

SEQ ID NO: 178241 - DNA, 747 bp, synthetic construct
  misc_feature 1..747: note = Description of Artificial Sequence: Synthetic coding sequence
  source 1..747: mol_type = other DNA
atgggcctgtggagccccgtgcccggcaacagcgtgccccgggcccctgtgatggccggcctcggactgggacattcccagggcgcaccccaagggccacatgacggtaaaactgaccggtcatccggacccggaaggagacgcactgagaggactcgactcccagggctgctcgggggcgctccactgacagccggtagtccacacaggtggaacgtgctgggattacagggcgccctgctctctcacttcgtggagcctgtgtatttacagtcaattgtggtgggctcgcttcaccacacaggacaccttgcgagagtcatgtcccaccggatggaaggagtcggccagctcccagctagctatcgacacaataggccgttactgtctggagtgagcgatgccgaagcgaggcaacctggaaaatcccccccattttctatgaattgggtggtggggagcgcggaccttgaaattatcaacgccactacaggccgccggagctgtggcggcccaagcaggctctgtaagcacgtgttaagcgcccgctgggcaagattgtatgggagactatcaacacggacaccttctcccggagacacaccctcaatgtactgtgaggcaaaacttggagctcacacctatcagagtgtgaagcaacaattgttcaaggcgtttcagaaagccggcctgggaacttgggtaagaaaaccaccagagcaacagcagttcctacttacactttag

SEQ ID NO: 178242 - DNA, 2220 bp, synthetic construct
  misc_feature 1..2220: note = Description of Artificial Sequence: Synthetic coding sequence
  source 1..2220: mol_type = other DNA
atggccagcgtgctgggcagcggccggggcagcggcggcctgagcagtcaactcaaatgtaaatccaaacgcaggaggcgcaggagaagcaagcgaaaggacaaggtaagcatcctttcgaccttcctggcaccttttaagcacctgagcccaggaatcaccaacacagaggacgacgacacactgagtacctcatctgctgaagtaaaagaaaacaggaatgtgggcaacctggccgctagaccaccaccctctggtgaccgggcccgtgggggcgcccctggagccaagcgaaaacggccgctggaggagggcaatggcgggcacctctgtaaactccagctggtttggaagaaactgtcgtggagcgtggctcctaaaaacgctctcgtccagctccatgaacttcggccagggttgcagtatagaacggtttctcagaccggacccgtgcacgctccagtgtttgccgtggcagtggaagtaaacggattgacctttgaggggacaggccccacgaaaaagaaggcaaagatgagggcagccgaactggcactgcggagcttcgttcagtttcctaacgcctgtcaggctcacttggctatgggcggcgggcccggcccgggtacagattttaccagcgaccaggccgactttcctgatacactatttcaggaattcgagcctcctgcaccccggcccggtctagccgggggccgcccaggcgacgctgccctgctgtccgcagcctatggaagaaggcggctgctgtgccgggctctggacctggtcggtcctacccccgctactcctgccgcgcccggagaaaggaatcctgtggtgctcttaaataggttgcgcgccgggcttcgctatgtctgccttgccgaaccggccgaacgaagggcccggtcattcgttatggccgtgagcgtggacggccggacatttgaaggttctggcagaagtaaaaagttggcacgtggtcaggccgctcaggccgcactgcaggaacttttcgatatccagatgcccggccacgcgcctgggagggcccggaggacccccatgccacaggagtttgctgactcaattagtcaattggtgacccagaaatttcgcgaagtgactactgacctcactcccatgcacgcccgtcataaagcacttgcagggattgttatgaccaaaggcctggacgcacgacaggctcaagtcgtggcattgagcagcggaactaagtgcatttctggcgaacacctgagcgatcagggtctcgtagttaacgactgtcacgcagaagttgtggccagaagggcctttctgcatttcttgtacacacagctcgagctacacttgtctaagcgacgagaagactctgagagaagcatcttcgtacgactgaaggaggggggttaccgcctgcgggagaacatactattccacttgtacgtgtcgacatctccatgcggtgatgcccgtctccattccccgtatgagatcacaaccgatttacactcttccaagcacctcgttcggaagtttcggggccatctgcggacgaagatcgaatctggcgagggtaccgtgcccgttcgggggccttctgccgtgcaaacgtgggacggagtgttgctgggtgagcagttgatcaccatgtcttgcactgataagattgccaggtggaacgtattggggttgcaaggagccctgctgtcccacttcgttgagccagtctatttgcagtccatagtcgtgggttcattgcaccacacagggcacctggcaagagtgatgtcccaccggatggagggggtgggccagctccccgcaagctaccgtcacaaccgtcccttgttatccggagtcagcgacgcagaggcacgccaacctggcaagagccccccatttagcatgaactgggtagttggcagcgcggatctcgagataattaatgcaactactggccgccgaagttgtggagggccaagtcggctgtgcaaacatgttcttagtgctcgctgggctagattgtacgggcgattgtcaacacgcacaccttccccgggcgatacccccagcatgtactgtgaggcaaagcttggcgctcacacctaccaatcagtgaaacaacagttgtttaaggctttccaaaaagccggcttggggacctgggtccggaagccccccgagcagcagcaattcctgctcaccctttag

SEQ ID NO: 178243 - DNA, 1509 bp, synthetic construct
  misc_feature 1..1509: note = Description of Artificial Sequence: Synthetic coding sequence
  source 1..1509: mol_type = other DNA
atgtggaccgccgacgagatcgcccagctgtgctacgagcactacggtatacgtctgccaaaaaaaggtaaaccagaacccaaccacgagtggaccctgcttgcagctgttgtgaagatccagtctccagctgacaaagcctgtgacacccccgataaacccgtccaggttacaaaggaggtggtctcaatggggacaggtacaaaatgtataggacaaagtaagatgcgaaaaaacggcgatatcctgaacgattcccacgctgaggtgatcgctcggcggtcttttcaaaggtatctcctgcatcagttgcaactcgcagcaactctcaaagaggattcaatcttcgtgcccggcactcagaagggcgtgtggaaactcagaagggatcttatctttgtattttttagcagtcataccccatgtggggacgccagcattattccaatgttagaattcgaggatcagccttgctgtcctgttttcagaaactgggctcataattcttcagtggaagcatcttcgaacctggaagcaccagggaatgagcggaagtgcgaggacccagactctcccgtgactaagaaaatgaggctcgaacctggaacggctgcccgggaagtaaccaatggggcggcccaccatcaaagtttcggaaaacagaaatcaggcccaatttctccagggattcattcgtgtgatctgactgtcgagggactcgcaacagtgacacgcatagcaccggggagcgctaaagtgatcgatgtgtatcgcaccggtgctaagtgtgtgcccggagaagccggggacagcggtaaaccaggagccgcatttcatcaggtgggacttctgcgggtcaagcctggccgaggggatcgaacacgctcaatgtcttgtagtgacaagatggctagatggaacgtgctggggtgtcagggtgcgctcctcatgcatctccttgaagagcctatttacctttctgccgtggtcatcggcaaatgtccttatagtcaggaagccatgcaacgcgctctgatcggacgctgccagaatgttagtgctctgccaaagggctttggggtacaggagctgaagatactgcagagtgaccttttgtttgaacagagccgcagtgccgtccaggccaagagagcggacagccccggccgtttggtgccatgcggcgccgccatctcctggtctgctgtccccgaacagcctctggatgtcacagcgaacggttttcctcagggcaccactaagaagaccattggatccctgcaggcaagatcacaaatttctaaagtagaactcttccgttcttttcagaaattactgagccgaatcgcacgggacaagtggccacactctttacgggtgcaaaaacttgatacttatcaggagtacaaggaagcagcctcttcctaccaggaggcatggagtacacttcgcaagcaggtgttcggctcatggattaggaacccccccgactaccatcagtttaagtag

SEQ ID NO: 178244 - DNA, 1422 bp, synthetic construct
  misc_feature 1..1422: note = Description of Artificial Sequence: Synthetic coding sequence
  source 1..1422: mol_type = other DNA
atgtggaccctgctggccgccgtggtgaagatccagagccccgccgacaaggcgtgcgatacacccgacaaacccgtgcaggtgactaaagaggtcgtctcaatgggcaccggaactaagtgtattgggcagagcaagatgcgaaagaacggtgacattctcaacgattcccacgcggaggttatcgcccgccggagtttccagcgctacctgctccaccaactgcaactggcggcaaccctcaaagaagatagcattttcgtgcccgggacacagaaaggcgtatggaaattaagaagggatctcatatttgtcttctttagtagccacacaccttgtggggacgcctcaatcatccctatgcttgagtttgaagaccagccctgctgcccagtgtttcgtaattgggcccacaacagttctgttgaggcaagctccaacttagaggcaccagggaacgaacgcaagtgcgaggatcccgattcaccagtcacaaaaaaaatgaggttagagcccgggaccgccgcccgtgaagtcacaaacggggcagcccatcaccagtcattcggaaagcagaaaagcggccccatcagtccaggtatccactcatgcgatctgaccgtggaggggttagctacagtgacgcggattgctccagggtcagccaaagtgatcgacgtctatagaacaggcgctaagtgcgtgcctggggaggctggagattcgggcaaacccggagcggctttccatcaggttggcctgctgagagtcaaacccggcaggggggacaggactagatctatgagttgttcagacaaaatggcgcgttggaacgtcttgggctgccagggtgcactcctgatgcacctgctcgaagagccaatctacttgagtgctgtagtcatcggcaaatgcccctacagtcaggaggcaatgcaaagggctctcattggaagatgccagaatgtgtccgccctgccaaagggcttcggcgtgcaagaactgaaaatcctgcagagcgacctcctgttcgagcagagccgatccgcggtgcaggctaaaagggccgactctccaggccgcctggttccatgcggggcggcaattagctggtctgctgtgccagaacagccactagacgttactgcgaatggatttccacagggcaccaccaagaagaccattggctctctccaggcgcgctcccagatatctaaggttgaacttttccgctcatttcagaagctgctgtctaggatcgcccgagacaagtggcctcattccttgagggtgcagaaactggacacgtaccaagagtacaaagaggccgctagttcttaccaggaggcgtggtccacactccgcaagcaggtgttcggaagctggatcaggaatcctcccgactatcaccagttcaaatag

SEQ ID NO: 178245 - DNA, 1089 bp, synthetic construct
  misc_feature 1..1089: note = Description of Artificial Sequence: Synthetic coding sequence
  source 1..1089: mol_type = other DNA
atggccgccgccgaggaggagcccaagcccaagaagctgaaggtggaggcaccccaggcattgagggaaaacatcctcttcggaatgggaaaccccttgctggatatctcggccgtggttgacaaagactttctggataaatattctctgaaacccaacgatcagatcttggccgaggacaagcacaaggagctcttcgatgaacttgtgaaaaaatttaaggtcgagtaccatgcgggcgggtccacccagaactcgattaaagtcgcccaatggatgatacagcaaccacacaaggctgctaccttttttggctgtattgggattgataagtttggcgaaatcctgaagcgaaaagcagccgaagctcacgttgacgcacattattatgaacagaatgagcagcctactggaacctgtgccgcatgtatcacgggagataaccgttccctgatagcaaaccttgcagctgccaattgctataaaaaagagaagcatcttgatctggaaaagaactggatgctggttgaaaaagcacgcgtgtgttatattgcaggtttcttcctaaccgttagtcccgagtcggtccttaaagtggcccaccacgcctctgaaaacaatcgtatatttaccctgaacctgtcagcacctttcataagtcagttctataaggagagccttatgaaggttatgccttatgtggacattctatttggcaacgaaacagaggctgccacgtttgctcgggagcaaggtttcgagacgaaggatattaaggagattgctaaaaagacacaagctttgccgaagatgaacagcaaaaggcagcggattgttattttcacacaggggcgggacgacaccattatggctaccgaaagcgaagtgactgcctttgccgtgctcgaccaggaccagaaagaaatcatagataccaacggcgctggtgacgccttcgtcggcgggtttctatcacagcttgtcagcgataagcctcttacagagtgtattagggctggacattatgcggccagtataatcatccggaggacaggctgcacattcccagagaaacccgattttcactag

SEQ ID NO: 178246 - DNA, 1038 bp, synthetic construct
  misc_feature 1..1038: note = Description of Artificial Sequence: Synthetic coding sequence
  source 1..1038: mol_type = other DNA
atgaccagcgtgcgggagaacatcctgttcggcatgggcaaccccctactggacattagtgccgtggtggataaggatttcctggacaagtattctttaaagcctaacgatcagatattagctgaggataagcataaagagctgttcgacgagctagtgaagaagtttaaagtagagtatcatgcaggcggctctacacaaaactccatcaaagtggcccagtggatgattcaacagcctcataaggcagctacctttttcggatgcatcggaatcgacaagttcggagaaatcctgaaacggaaggccgcggaagcccatgttgatgcgcattactacgaacagaacgaacagcccactggaacgtgtgccgcctgtatcaccggtgataatcgtagcctgattgctaatctggccgctgctaattgttataagaaggagaaacatctggacctggagaagaactggatgttggtcgaaaaagccagagtgtgctatattgccggctttttcctaacggtgtccccagagagtgttctgaaggtggcacaccatgcctcagaaaacaatagaatttttacactgaatctttccgctccattcatctcacagttctataaagagtcattgatgaaggtcatgccctatgtggacattctgttcggaaatgagacggaggccgcgacattcgccagagaacaaggttttgaaacaaaggacatcaaggaaatcgccaagaagactcaggccttaccaaagatgaacagcaaacggcagaggatcgtgatttttactcaggggcgagacgacactatcatggcaaccgagtccgaggtgactgcctttgccgtgctcgatcaggatcagaaggagattattgatacgaatggggccggcgatgcctttgtcggcggctttctttcacagctggtgagcgacaaacctttgacagagtgcatcagggcgggtcattacgctgcatccatcatcattcgccgtactggttgcacttttcccgaaaagcctgactttcattag

SEQ ID NO: 178247 - DNA, 918 bp, synthetic construct
  misc_feature 1..918: note = Description of Artificial Sequence: Synthetic coding sequence
  source 1..918: mol_type = other DNA
atggccgccgccgaggaggagcccaagcccaagaagctgaaggtggaggctccacaggccctccgagagaatatcttatttgggatggggaaccccctgttggacatttccgctgtcgtggacaaagactttctggataaatactctttaaagcccaatgatcaaatactcgccgaagacaagcacaaggagctcttcgacgagctggtgaagaagtttaaagtggagtatcacgctgggggaagcacacagaacagtatcaaagtggcccagtggatgatacaacagccacacaaggccgcaacattcttcggttgcatagggatcgacaagttcggggagattctaaagcgaaaagcagccgaagcccatgttgatgctcactactacgaacagaatgaacagcccaccggaacttgtgcagcctgcatcacaggagataaccgttcccttatcgcgaacttagccgctgcaaactgttacaagaaggaaaagcacctggatttagagaagaattggatgcttgtcgagaaggctcgggtgtgttatatcgcagaggcggcaacttttgcccgtgagcagggctttgagaccaaggacattaaggagattgcgaagaagacccaggcactgccgaaaatgaactctaagcgccaacggattgtgatcttcacacaaggccgggatgataccattatggccacggaatcggaagttacggccttcgccgtgttggaccaggaccagaaagagattatagacactaatggtgctggtgacgcctttgtgggaggtttcctgagtcaactcgtgtcagataagcctttaacagagtgtatcagagccggacattacgccgcctctatcatcatccgacgtacagggtgcacgttccctgagaagcccgactttcactag

SEQ ID NO: 178248 - DNA, 984 bp, synthetic construct
  misc_feature 1..984: note = Description of Artificial Sequence: Synthetic coding sequence
  source 1..984: mol_type = other DNA
atgaccagcgtgcgggagaacatcctgttcggcatgggcaacccccttcttgacatcagcgctgttgtcgacaaagacttcttagataaatttgacgaactcgtcaagaagtttaaagtggaataccacgccggcggctcgacacagaattccataaaggtcgcgcagtggatgatccaacaaccacacaaagccgcaacttttttcgggtgcatcgggatcgacaaattcggagaaattttgaagagaaaggccgctgaggcccacgtagatgctcattactacgaacagaacgagcaaccaacagggacctgtgccgcctgcattacaggggacaatcgtagcctcattgccaatctggccgccgcgaattgttacaaaaaagaaaaacaccttgatttagagaagaattggatgctcgtggagaaggcccgcgtttgctatattgcagggttcttcctcaccgtgagtccggagtccgtgctcaaggtggcccaccacgcgtcagagaacaaccgaatcttcaccctcaacctgtccgccccgtttatcagccagttctacaaggagagcctgatgaaggtgatgccttatgtggacattctgtttggtaacgagacagaagccgcaacttttgcgagagagcaaggctttgagaccaaagatattaaggaaatcgccaaaaaaactcaggcactccctaagatgaatagtaaacgacaacgaatagtgatttttactcaggggcgggacgatacaattatggccacagagtctgaagtaactgcattcgccgtacttgatcaagaccagaaagaaattattgacacaaacggcgccggtgatgccttcgtgggggggttcttgagccaattggtttccgacaaaccgctgacagaatgtatacgagcaggccattacgcagcctccatcatcatccggcggaccggttgcacctttcctgagaaacccgattttcactag

SEQ ID NO: 178249 - DNA, 2244 bp, synthetic construct
  misc_feature 1..2244: note = Description of Artificial Sequence: Synthetic coding sequence
  source 1..2244: mol_type = other DNA
atgcccctgttcaagctgcccgccgaggagaagcagatcgacgacgcaatgcggaatttcgctgaaaaggtttttgcgtctgaggtcaaggatgagggcggacggcaggagatatcgcctttcgacgtagacgaaatctgtccaattagccatcatgagatgcaagcacatatattccacctcgaaaccctcagcacctcgaccgaagcgagacgaaaaaagcgcttccagggtcgtaaaacggtaaatctatcgattcctctgagtgagacctcttccacaaagctctcccatatcgatgagtatatcagttcctcccctacttaccagactgtcccagattttcagcgcgtccaaatcaccggagactatgcaagcggcgtgaccgtggaagacttcgagattgtatgtaaaggtctttacagagctttgtgcatcagagagaaatatatgcaaaagtcatttcagagattcccaaagaccccgtccaagtacttaagaaacatcgatggagaagcctgggtggccaacgagagtttttatccagtgttcactcctcccgtgaaaaaaggagaggatccattcagaaccgataatttgcccgaaaacctcggctatcacctgaaaatgaaggacggtgttgtgtacgtctaccctaatgaggctgctgtcagcaaagatgagcccaagccgctgccctaccctaatctggacacattcctggatgacatgaactttcttttggcactgatagctcaagggcccgtgaaaacctatacccatcgcagattgaagttcctatcctcaaaattccaggttcaccagatgctgaacgaaatggatgaactcaaggaactcaagaacaatcctcatcgggacttttacaattgtaggaaagtagacacccacatccacgcagcagcttgtatgaaccagaagcaccttctgcgattcattaagaaaagttatcagattgacgcggatagggtggtgtactctacaaaggagaagaatctcactttgaaggaactgtttgccaaactcaaaatgcacccctacgatctgaccgtagacagtctggacgttcacgctggccgccagacattccaaaggttcgataagttcaacgacaaatacaaccccgtcggtgcgtccgagctgcgagacctgtacctcaagaccgataactacatcaatggcgagtacttcgccacaatcatcaaagaggtgggggcagacctcgtggaggctaagtaccagcatgccgagccaaggttatctatctacggccgcagccctgacgagtggtctaagttgtcatcatggttcgtgtgtaaccggatccactgtcccaacatgacgtggatgattcaagtgccccgtatttatgatgtgtttagatcaaagaacttcctcccccattttggcaagatgttggaaaacatcttcatgcctgtctttgaagcaaccataaatccccaggcggaccctgaactgtcagtgtttctgaagcatatcactggatttgattccgtggacgacgagagtaagcattctgggcacatgttctcctctaagtcccctaagccacaagaatggactcttgagaaaaatccctcctatacatattacgcttattatatgtatgccaatattatggtgctcaactcccttaggaaagaaaggggcatgaatacttttttgttcagaccccattgtggagaggctggcgcgttaacacacttgatgacggcctttatgattgctgatgacatcagccacggactcaatctcaagaaatctcctgtactgcaatacctgttctttctagctcagatcccaattgcgatgagccctctgtctaacaatagtctgtttctggagtacgcaaaaaacccattcctggacttcttgcaaaaaggcctgatgatctctcttagcacagacgaccctatgcagtttcacttcaccaaagagcctctgatggaggaatatgccatcgccgcacaggtgttcaaattgtcaacttgcgacatgtgtgaggtggctcggaattccgtgttacagtgtgggattagtcacgaagagaaggtgaaattccttggagataattacctcgaggaaggaccggctggcaatgacataagaagaactaacgtggcccagatacggatggcatatcgctacgagacttggtgctatgagctgaatctgattgccgagggcttgaagagtacggagtag

SEQ ID NO: 178250 - DNA, 2343 bp, synthetic construct
  misc_feature 1..2343: note = Description of Artificial Sequence: Synthetic coding sequence
  source 1..2343: mol_type = other DNA
atgaacgtgcggatcttctacagcgtgagccagagcccccacagcctgctgtcactgttgttttactgcgctatcctcgagtctaggatctctgcgacgatgccactttttaagctgcccgccgaggaaaagcaaatcgacgatgcaatgcggaatttcgccgagaaagtgtttgcctcagaagtgaaggatgagggtgggcggcaggaaatctcacctttcgacgtggacgagatttgcccgatttcccaccatgagatgcaggcacatatcttccacctggaaacattatcaacaagcaccgaagctcgccggaagaagagatttcaaggcaggaagacagtgaacttaagcatcccactctccgagaccagcagtactaagctgtcgcacattgatgagtacatcagcagcagccctacgtatcagactgtgcccgattttcagcgggtgcagattacaggagactatgctagtggcgtgactgtggaagatttcgaaatcgtatgcaagggtttgtatagagctctgtgcatccgagagaaatacatgcaaaaatcttttcagcgcttccccaagacgccgagcaagtatctacgtaacattgatggagaggcctgggtggctaacgaatctttttacccagtgttcaccccccctgtgaagaagggtgaagatcctttcaggacagacaatctgccagagaacttaggctaccatctaaagatgaaggacggcgtagtgtacgtttatcccaacgaggccgcagtctcgaaggacgagcccaagcctctgccatacccaaatttggatacgttccttgacgacatgaatttcttattggcacttatcgcccaaggtcccgtgaagacctacacgcaccgtcggctgaaatttctgtcttccaagttccaggtccaccagatgttgaatgagatggacgagctgaaggagctaaagaacaaccctcaccgggatttctataattgtcgaaaagtggatacacatattcatgccgccgcttgtatgaatcagaagcacttacttcgcttcattaagaaatcctaccagattgacgctgatagggtggtgtactctaccaaggagaaaaacttgactctgaaagagctgtttgctaaactgaagatgcatccctacgacctcactgtcgattccctcgatgtgcacgccgggaggcaaacatttcagcgctttgacaagtttaacgataaatataacccggtcggcgcctcggaactgcgagacctgtatctgaagactgataattacattaatggcgagtacttcgctacaatcataaaagaggtcggcgccgacttggtcgaggctaagtatcagcacgccgaaccacggctgtctatatatggtcgctcacccgacgagtggtccaaactgagttcttggttcgtctgtaacagaatacactgtcccaatatgacatggatgatacaggtcccccgcatctacgatgtgtttcgtagtaagaattttctgccccactttgggaagatgctagagaacatttttatgccagtctttgaggccacaatcaacccacaggcagaccccgagctgagtgtatttctgaagcatatcactgggtttgattcggtcgatgacgagtcaaagcattcaggccatatgtttagtagtaagagcccaaaacctcaagaatggaccttggaaaagaacccttcctatacttactatgcctattatatgtacgcaaacattatggtcttgaactcactcaggaaagagcgggggatgaacacattccttttcagaccgcactgtggggaggctggggcactcactcacctgatgaccgccttcatgattgctgacgatattagtcatggattgaacctgaaaaagtcacctgtccttcagtatttgttctttctggcacagattcctattgcgatgtcaccactttctaataactctttatttctcgaatacgctaagaacccatttctggacttcctccaaaagggactgatgatcagcttatccaccgacgatcccatgcagttccacttcaccaaggagccactaatggaagaatatgccatagccgcccaggtctttaaactttccacctgtgacatgtgcgaagtggccaggaactcagtgttgcaatgcgggataagtcacgaagagaaggtgaagttcttaggtgacaattacttggaggaaggaccagccgggaacgatatccgcagaacaaatgtggcccagatccgaatggcatatcggtacgagacatggtgctatgagctgaatctgatcgccgaggggcttaaatcaactgagtag

SEQ ID NO: 178251 - DNA, 2331 bp, synthetic construct
  misc_feature 1..2331: note = Description of Artificial Sequence: Synthetic coding sequence
  source 1..2331: mol_type = other DNA
atgaacgtgcggatcttctacagcgtgagccagagcccccacagcctcctgtcccttcttttctattgtgcaatcttggaaagccggattagtgctaccatgcctttgttcaagctgccagagattgatgacgcgatgcggaacttcgctgagaaggtctttgcatctgaggttaaagacgaaggcggccgccaggaaatttctccattcgacgtcgacgagatctgccctataagtcatcacgaaatgcaagctcatatctttcacctggaaacactgtctacgagtaccgaggcgcgacgcaagaagagattccagggacgcaagaccgtcaacttgtctatcccactatcggaaacatccagcacgaaactgtcacatatagacgaatatatttcaagctcgcctacctatcagactgtacccgatttccagagggttcagataacaggggattacgcctccggagtgacggtggaggactttgaaatagtatgcaaggggctctaccgggctctgtgcatacgcgagaaatacatgcaaaagtcttttcagaggtttcctaagaccccatctaagtacttgcgaaacatcgacggcgaagcatgggtggctaacgagtcattttatcccgtgtttacaccacctgttaagaagggcgaggacccttttcgcactgacaatctgcccgagaacctcgggtatcacctgaaaatgaaggacggcgtggtttacgtgtatcctaacgaagcagccgtctcaaaggatgaacctaaaccattgccataccctaaccttgacaccttcctagacgacatgaattttctcctggctctcatagcacaggggccagtcaagacctacacccacagaagactaaagtttttgtcctcgaaatttcaggtccatcagatgctgaatgagatggacgaactgaaggagctgaaaaataatccccatcgcgacttctacaactgcaggaaagtagatacgcatatccatgccgcagcttgtatgaatcagaagcatttactaaggttcattaaaaagtcataccaaatcgatgctgaccgggttgtgtactccacaaaagagaagaatctaacccttaaagagctgttcgcaaaactgaagatgcacccgtacgatctaaccgtagactctctggatgtccatgccggtcgccagaccttccagaggtttgacaagttcaatgacaaatataatccagtgggggccagcgaactgagggacctgtaccttaaaactgataattatattaacggagagtacttcgccacaattatcaaggaagtgggggccgatctcgttgaagccaaataccagcatgccgaaccccgtctgagcatttatggtcgatcgcccgatgaatggtctaagctttcgagctggttcgtctgcaatcgcattcactgccctaatatgacttggatgattcaagtccctagaatatacgacgtgttccgaagtaaaaattttctgccccatttcggtaagatgctggaaaacattttcatgcccgtgttcgaggcaacaattaacccacaggccgacccggaactatccgttttcctgaaacatatcacaggattcgattccgtagacgatgaaagcaaacattctggccacatgttcagcagcaagagccctaagccccaggaatggactcttgaaaagaatccctcttacacatactacgcatactatatgtacgcaaatatcatggtgctcaatagcctcagaaaggagaggggcatgaacactttcctgttcagaccgcattgcggtgaggctggcgctttgactcatcttatgacagcctttatgatagcagacgacatttcccacggcttgaacctcaagaagtccccagtgctgcagtacctgttctttctggcccaaatcccaatcgccatgtctcctctgtcaaataatagtcttttcctggagtatgcgaaaaatccgtttttagatttccttcagaaagggctaatgatcagcctgtctacagacgatccgatgcagtttcatttcaccaaggagcccttgatggaggagtacgcgattgcggctcaggtgttcaagctttccacatgcgacatgtgcgaagtggcaaggaactccgttcttcagtgtgggatctctcacgaagaaaaagtaaaatttctgggagataattacttagaggagggccccgccgggaacgatataaggcggaccaatgtagcccagatccgcatggcctatcggtatgaaacctggtgctatgagctgaatctaatcgccgagggcttaaaaagcaccgagtag

SEQ ID NO: 178252 - DNA, 2640 bp, synthetic construct
  misc_feature 1..2640: note = Description of Artificial Sequence: Synthetic coding sequence
  source 1..2640: mol_type = other DNA
atgcggaaccggggccagggcctgttccggctgcggagccggtgcttcctgcaccaatccctgcctctgggcgccggtagaagaaaaggactggacgtagccgagccagggccctctaggtgccgctccgattcccctgctgtagcagcagtggtgcccgccatggctagctatcccagcggaagcggtaagcctaaggcaaagtatccattcaagaagagagcctcgctgcaggcatccaccgcagctcccgaagctaggggaggtctcggagccccacctctgcagtccgcacgaagccttcctgggcctgcaccttgtttaaagcatttccccttggacttgcggacgagtatggatggaaagtgtaaggaaatcgccgaagaattattcaccaggtctctggccgagagtgaactgcgttctgcaccctatgagttcccagaggagtctcctatcgaacagttggaggagagaagacaacggctggagcgccagataagccaggatgtcaaactggaacctgatattttacttcgggccaagcaggattttttaaagacggacagcgactctgatctgcagctctacaaagagcagggggagggccaaggtgaccggtccctcagggagagggacgtactggagcgagagtttcagcgcgtgaccatctccggcgaagagaaatgcggggtgccttttacagatctgctcgatgcagcgaagagcgttgtcagggctctgtttatccgggaaaagtacatggcccttagtctgcaatcattctgtcctacaacgaggaggtatttgcaacaattggctgaaaagccattagagacaagaacatatgaacagggaccagacactcccgtttctgcggatgctcctgttcatcctcctgctctggagcagcacccgtacgaacattgcgagccctctacaatgcctggtgatttgggcctgggcctgcgaatggtccgtggagtagtgcacgtttacacccgccgggaacctgatgagcactgctctgaggtcgaactgccatacccggaccttcaagagttcgtagcagacgtaaatgtcctcatggcgcttatcatcaacgggcccattaagtcgttctgttacagacggcttcagtacctatcctcgaagtttcagatgcacgtgctgctgaacgagatgaaggaactggccgctcagaaaaaagtgccccatcgggacttctataatatcagaaaagtggacacccatatacatgcttccagctgcatgaatcagaagcaccttctgcgtttcatcaagcgcgccatgaagcgacacctggaggagattgtccatgtggaacagggcagagaacagaccctacgggaggtgttcgaatctatgaacctgactgcttatgacttgagtgtcgatacgctggacgtgcacgccgatagaaacacatttcatcggttcgacaagttcaatgccaagtacaacccaattggcgaatcagtgctgagagagattttcataaaaactgataatcgagtgagtggaaagtatttcgctcatataatcaaggaggtgatgtcggacctggaagaatccaaataccagaatgcggagcttagactgtcaatctacggaaggtccagggacgaatgggataaactcgcacggtgggccgtgatgcatcgagtccattcgcccaacgtccggtggttggtccaggtccccaggctgtttgacgtctacaggaccaaagggcagttagctaactttcaggaaatgctcgagaacatattcctgccattgtttgaggccaccgtccatccagcgagtcaccctgagctgcacctttttctggagcacgtagacggctttgattctgtggacgatgaaagcaagcccgagaaccacgttttcaatctggagtctccactcccagaagcgtgggtggaggaagataaccccccatatgcttattacctttattacacgtttgcaaatatggcaatgctgaaccatcttagacgccagcgaggcttccacacattcgtgctgcggccgcactgtggcgaagcaggacccatacaccacctcgttagcgcgttcatgctggccgaaaatattagccacgggctcctgctcagaaaagctcctgtgcttcagtacctttactacctcgcacagatcggcatagcgatgtcccctctgtccaacaattcactttttctgtcctaccaccgcaatccactgccggagtatctctctagggggttaatggtaagtctaagtacagatgatcctcttcagttccatttcaccaaagaacctttaatggaagaatatagcatcgcgacccaggtgtggaagctttccagctgtgacatgtgtgagttagcaagaaatagcgtgttaatgagtggattttcccataaggtgaagtcccattggctagggcccaactacactaaagaaggcccggagggcaacgacatacggaggacaaatgtccctgatatcagggttggctaccggtatgagaccctctgccaagaattggccctgattacacaagccgtgcaatcggagatgctggagaccatccctgaggaagcagggatcactatgagcccaggcccccagtag

SEQ ID NO: 178253 - DNA, 2397 bp, synthetic construct
  misc_feature 1..2397: note = Description of Artificial Sequence: Synthetic coding sequence
  source 1..2397: mol_type = other DNA
atggccagcgaggcccggggcggcctgggcgccccccccctgcagagtgctcgaagcctaccaggtcctgcaccttgcttgaaacacttccccttggacctaagaacttctatggatggaaaatgtaaagagatcgcggaggagctgtttacacgatcactggccgagagtgagctgaggtccgccccatacgagtttcccgaagaatcgcccattgaacagctggaagagagaaggcagcgcctggaacgccaaatctcacaggatgttaaactagaacctgacattctgctcagggcaaagcaggacttcctaaaaaccgacagtgactccgacttgcagctgtacaaagaacagggcgagggacagggggatagaagtctgagagaacgtgacgtcctggaaagggagttccaaagagtgaccatctccggggaagagaagtgtggcgtgccattcacagatctgctggatgctgcaaagagtgtggtgcgagccctgtttattagggagaaatacatggccctgtccctgcagagtttctgccctaccacccgtagatacctgcagcagctggccgaaaaaccactggagacaagaacgtacgagcaggggcctgacacgcctgtcagcgccgatgctcccgttcacccgcccgccctggagcagcacccttatgagcactgtgagcccagcacaatgcctggcgatcttggccttggtctcagaatggttcggggcgttgtccatgtgtacacgagacgcgaacccgacgaacattgtagtgaagtagagcttccatatccagatctccaggaattcgtagccgatgtgaatgttcttatggcactcatcattaacgggcccattaagagcttttgctacagaagactgcagtacctctctagcaaattccagatgcatgtcctgctgaacgagatgaaagaactggctgctcagaagaaagtgccccatcgagatttttataacatacgtaaagtggatacccatattcatgcatcttcttgcatgaaccagaagcacctgctccgctttataaagagagccatgaagcgccatctcgaggaaattgtacacgtagagcagggcagagagcaaacattgagagaggtgtttgagagtatgaatttgactgcatatgaccttagcgtggatactcttgacgtccatgctgacagaaatacttttcatcggttcgataaatttaatgccaaatataaccctataggagagtctgttttacgcgaaattttcattaagaccgataaccgggtgagtggcaagtatttcgctcacattataaaggaagtaatgtccgacttggaggaatctaagtaccaaaacgcagagctgaggctgtcaatctatggaaggtcccgggacgagtgggacaagcttgctaggtgggccgtcatgcatagggtgcatagtccgaacgtgcggtggctggtccaagtccccaggctctttgacgtctatcgcaccaagggacagttagccaactttcaggagatgctcgagaacattttccttcccctgtttgaagctactgtccatccagcaagccatcctgagcttcacctgtttctcgaacatgtggatgggtttgacagcgtggatgatgagagcaagcccgaaaaccacgtattcaatctggagtcccccctccccgaagcatgggttgaagaagacaacccaccttacgcctactacctctattacacttttgccaacatggcaatgctgaaccacttaagacggcaaaggggattccatactttcgttctacgtccacattgcggggaggcaggtcccattcatcacctggtgtctgcctttatgctcgccgaaaatatcagtcatggccttctgctacgcaaggctcctgtgctccaatatttgtattacctggctcagatcggaatagccatgtcccccctcagcaacaattccctattcttgagttaccaccggaatccacttcccgagtatctgagcagaggactcatggtctccctctcaaccgatgatccattacagtttcatttcaccaaagagcctcttatggaagagtacagcatcgccacacaagtgtggaaactcagtagctgtgatatgtgtgagttagcccgtaactccgtcctcatgagcgggtttagccacaaggtgaaatcccactggctcggcccgaattacactaaggaaggacctgaaggaaatgacatcagacgcactaacgtgcccgacatcagagtaggctatcggtatgagacactgtgtcaggaactcgctctgattacccaggctgtccaaagtgaaatgctggaaaccattcccgaagaagcagggatcacgatgtcccctggcccccagtag

SEQ ID NO: 178254 - DNA, 2415 bp, synthetic construct
  misc_feature 1..2415: note = Description of Artificial Sequence: Synthetic coding sequence
  source 1..2415: mol_type = other DNA
atgtggcagagccaggcccccgccggcgccgcccagaccccccccctgtctccaccctggtcccaaccatggcaccccatccatctcgctctggcctcaccacgaccaaacatcccactgcggtcaggtccagcatgccgccctcccctgcagctgcaggaactattcacaagaagcctggccgaaagcgaactccgatccgctccatacgaatttcctgaagagagtccgatcgagcaactggaagagaggaggcagagactcgaacggcagatatcgcaggatgtaaagctcgagcctgacattttgctaagagcgaagcaagactttttgaagacagatagcgacagcgatctgcagctgtataaggagcagggggaaggacagggtgaccgatccctcagagaacgcgacgtgttagaacgtgaattccaaagagtgacaattagcggggaggaaaaatgcggggtgcctttcacagatctcctagatgcggctaagagtgtggtgcgcgccctgtttatccgcgaaaagtatatggctctgtctcttcagagcttctgtccaacgacccgccgctacctgcagcaacttgccgagaagcctctggagaccaggacgtatgaacaggggcctgatacccccgtgagcgccgacgctcctgtgcatccacctgcactggaacagcatccatacgagcactgcgagccatctactatgcccggtgaccttgggctgggccttcgcatggttcggggcgtcgtgcatgtgtacacgaggagagaacccgatgagcactgcagtgaagttgagctcccatacccagatctgcaggaattcgtggcggacgtgaatgtgcttatggctcttatcatcaacggacccataaaatcattttgttatcggagactgcaatatttgagttcaaagttccagatgcatgtgctcctgaatgaaatgaaagaactggcggcccaaaaaaaagtgccccacagggatttctataacataaggaaggttgacactcatattcatgcgtccagctgtatgaatcagaagcatcttctccggtttatcaagagggccatgaaacgtcacttagaggaaattgtgcacgtagagcagggcagagagcagaccctcagggaggtctttgagagcatgaacctaactgcctacgacctaagcgtcgatactttggacgtgcacgccgataggaataccttccacagattcgataaattcaacgcaaagtataatcccatcggcgagagcgtgctgagggagatattcattaagactgacaatagggtgtctggtaagtacttcgctcacatcataaaagaagtgatgagcgacttggaggaaagcaagtatcagaatgccgaattacgactgagcatttatggaaggtctcgagatgagtgggacaaactagctcgctgggctgtgatgcatagggtccactcccctaacgtcagatggctcgtgcaggtgcctagactttttgatgtgtaccgcacgaagggtcagttagctaacttccaggaaatgttggaaaacatctttctacctctgtttgaggctacggtgcatcccgcatcacaccccgaactccatctgttcttagagcatgtcgacggctttgactctgtggacgacgaatctaaacccgagaaccatgtgttcaacttagaaagccctctgccggaagcgtgggttgaagaagacaacccgccctacgcctactacctgtactacacatttgccaatatggccatgctgaaccatctccggcgtcagcgcgggttccatacttttgttcttaggcctcactgcggggaggccgggcccatccatcatctggtgagcgcttttatgctcgccgaaaacatttctcatgggctgttattgaggaaggctccggtcttacaatacttatattatctcgcccaaattgggattgccatgtcacctctgtccaacaacagtttgtttctgtcctatcataggaacccacttcccgagtacctcagcagaggcctcatggtcagcctgagcaccgacgacccactccagtttcatttcactaaggagccactgatggaggaatattctatagctacccaggtgtggaagctctccagttgtgacatgtgtgaactggcgcggaactccgtcctgatgtctggcttcagtcataaggttaaatcccactggctgggcccgaattatacaaaggagggccccgaaggcaatgatatccggaggacaaatgttccagatattagagtcggttaccgctatgagacactgtgtcaagaattggcgctgatcacccaggctgtgcaatcagaaatgttggaaaccattccggaggaggccgggattactatgtctcctggtccacagtag

SEQ ID NO: 178255 - DNA, 2283 bp, synthetic construct
  misc_feature 1..2283: note = Description of Artificial Sequence: Synthetic coding sequence
  source 1..2283: mol_type = other DNA
atgctgaccttcctgcccagcccccaggagctgttcacccggagccttgcagagtcagaacttaggagtgcaccttacgagtttcccgaagagagtcccattgaacagctggaagagcgcagacagcggctggagagacagatctctcaagatgtaaagctagagccagacattctgcttcgggccaagcaggatttcctgaaaactgacagcgactccgacctacagctgtataaagaacaaggggaaggtcagggcgaccgctcacttcgcgagcgcgatgtgctggaaagggagtttcaaagagtgacgatcagcggtgaggagaaatgcggtgtgccattcacagatctgctggatgctgctaaaagtgtggtacgagcactgtttatccgagaaaagtatatggctctttccctgcagagtttctgccctacgacccggcgctacctgcagcagctcgctgaaaagcccttggagacacgcacctacgaacaggggccagatactcccgtctctgctgacgcccctgtgcatccccccgcgctggaacaacacccatatgagcactgcgaaccctccacaatgcctggggatttggggctcggcctccggatggtgaggggcgttgtgcacgtttatacgaggcgcgaacctgacgaacactgttcagaagtggagcttccttatccggatttgcaggaattcgtggctgacgtgaatgtcctgatggcccttattataaatggaccaatcaagagtttctgctatcggcgtctccagtatctctcttccaagttccaaatgcatgtcctactgaatgagatgaaggaactcgccgcgcagaagaaagtcccacatcgcgacttttataatatcaggaaggttgatacccacatacacgccagctcttgtatgaatcagaagcacctcctgcgcttcataaaacgggctatgaaaaggcacctggaggaaatcgttcatgtggagcagggcagggagcagacattgagggaggtgtttgagtctatgaatctgactgcctacgatctgtccgtcgacaccctcgatgtccacgctgatcgtaacacatttcatcgctttgacaaattcaatgccaagtacaaccccatcggcgagtcggtgctgcgcgagatctttatcaagacagataaccgtgtgtcaggcaaatactttgctcatattataaaagaggtaatgtctgacctggaagagtcaaaatatcagaatgcggagctcagactgtctatttacgggaggtcccgtgatgagtgggacaaattggcccggtgggctgtgatgcaccgcgttcattccccgaacgtccgatggctggtgcaagtgcctcgactgtttgacgtgtaccggaccaagggacaactcgccaacttccaggagatgctggagaatatcttcctaccactgttcgaggcaaccgtgcaccctgcatcccaccccgaactccacctgttcctggaacatgtggacgggtttgacagtgttgatgacgagtctaagcctgaaaatcatgttttcaacttggagtctccactcccagaagcttgggttgaggaggacaatcccccgtatgcgtattacctctactacaccttcgcaaacatggcaatgttgaaccatcttcggcgacaaaggggctttcacacatttgtcctgcgcccacattgcggggaggccgggcctattcaccaccttgtgtcagcctttatgctggctgagaatattagccatggattactgctacggaaagccccagtcctccagtatctttattacctggcccagatcggaatcgctatgagccccctgtcaaacaactccctctttctgagctaccatcgaaatcctctgccggagtatctttctagaggcctgatggtgtctctctccacggatgaccccctgcagtttcacttcactaaggaacctttgatggaggagtatagtattgctactcaggtatggaaactctcgtcatgcgacatgtgcgagctagcccgaaattctgtgctgatgtcgggcttcagccacaaggtgaaatctcactggctcggacccaattacacaaaggagggacctgagggcaatgacatcaggcgtacaaatgtccccgacataagagtcgggtaccgctatgagactctgtgccaggagcttgctctcatcacacaagccgttcagtcagagatgctcgaaacgattcctgaggaggccggcatcaccatgtcccctggaccccagtag

SEQ ID NO: 178256 - skipped

SEQ ID NO: 178257 - DNA, 2640 bp, synthetic construct
  misc_feature 1..2640: note = Description of Artificial Sequence: Synthetic coding sequence
  source 1..2640: mol_type = other DNA
atgcggaaccggggccagggcctgttccggctgcggagccggtgctttttgcaccagagcctgcccctgggcgccggtaggcgtaagggcctggacgtggcagaacctggtcctagcaggtgcagatctgatagccccgccgtggctgctgtggtgcccgcgatggcctcttacccaagtggctccgggaaacctaaagccaaatacccctttaagaagagagccagcttacaggcctctacagctgctcctgaagcaagggggggccttggagctccccccctgcagtccgcccgctcattgccgggcccagccccttgccttaagcatttcccacttgacctacgaacaagtatggacgggaagtgcaaagagattgcggaggaactgttcaccaggagtctggccgagtctgaattacgtagcgcgccgtacgagtttccagaggaatcacctattgaacagctggaagaaaggcgccagcgtcttgaacgacagatttctcaggacgtgaagctggagcctgatatccttctacgagctaagcaagactttcttaagacagatagtgactctgacttacagttatacaaagagcaaggcgagggccagggagacaggtccctgagggagagggatgttctggagcgcgagttccagcgggtcaccatttcaggtgaggagaagtgtggagtcccattcacggacctgctagatgcagccaaaagcgtcgtcagagccctattcataagagagaagtatatggctctgagtctgcagagcttctgccctactacaaggaggtacctgcagcagctggcagagaagccgctggaaacccgaacctatgaacagggtcctgatactcctgtttccgccgacgctcccgtgcatcctcccgcgctggaacagcatccctacgaacactgtgaaccttctactatgcctggcgatctgggattgggcctaaggatggtacggggcgtggtgcacgtgtatacccgcagagaacccgacgagcactgctcagaggtggagctgccctatcctgatctacaagagtttgtggccgatgtaaatgtgctgatggctctcatcatcaacgggcctatcaagtcattctgttatcggcggttgcagtatttgagtagcaagtttcagatgcatgtgctcttgaacgaaatgaaagaactggccgcccagaaaaaggttccccatagggacttttataatatccgaaaagtggacacgcatattcatgcctcctcttgcatgaaccaaaaacaccttctccggttcatcaagcgcgcgatgaagagacatttagaggagatcgtccacgttgagcaggggagagaacaaacccttcgggaggtatttgagagcatgaatctgacagcatacgatctgagcgttgataccctggatgtacacgcggatcgcaataccttccacagattcgacaaattcaacgccaaatacaatccaattggcgaatcggtgctcagggagatttttattaagactgacaaccgtgtctccggaaagtacttcgcccacataatcaaggaagtgatgtccgaccttgaagaatcaaaataccaaaatgctgaattacgattgagtatttatggtagatcgagagatgaatgggataagttggcccgatgggctgtcatgcatagagtacatagcccaaacgtgagatggctggttcaggtgcctcgcctgttcgatgtctataggacgaaaggacagctggccaatttccaagagatgcttgagaatattttcctccccttgttcgaggcgacagtacaccctgctagtcaccccgagttacatctgtttctggagcatgtggatgggttcgattcagttgacgacgagagtaagccagagaatcacgtctttaatctggaaagtcccttgcccgaggcatgggtggaagaggacaacccaccctatgcttattacttgtattatacctttgctaatatggcaatgttgaaccatttacgcagacagaggggctttcatacctttgttttacggccccactgtggcgaagcaggaccaattcaccacctggtttcagctttcatgctcgccgaaaatatctcacacggcctactgcttcgtaaggctccagtgcttcaatacctgtactatctggctcaaatcgggatagcgatgtcccctctgtctaataatagccttttcttgtcctatcataggaaccccttgcccgagtatttgtcaagaggattaatggtaagcctgtctacagacgatccactgcagtttcatttcaccaaagaacctttgatggaggagtactccatcgccacgcaggtatggaagttaagctcttgtgacatgtgcgaactagcgagaaattctgttttaatgagcggttttagtcacaaggtgaaaagccactggttgggccccaattataccaaagaaggccccgaagggaatgacatacgcaggacaaatgtgcctgatatccgggtcggctacagatatgagacactgtgccaagagcttgctttgatcacccaggcagtccagagcgaaatgctggaaacaattcctgaggaggccgggatcacaatgtctcccggaccacaatag

SEQ ID NO: 178258 - DNA, 312 bp, synthetic construct
  misc_feature 1..312: note = Description of Artificial Sequence: Synthetic coding sequence
  source 1..312: mol_type = other DNA
atggccagcgaggcccggggcggcctgggcgccccccccctgcagagcgctcgcagcctccccggacctgccccgtgtcttaagcatttccccttggatctgagaacaagcatggacggtaaatgcaaggaaattgctgaggagctgttcacgcggagcctggcagaatctgagctgcgctccgccccctacgagtttccagaagaatcaccaattgagcagctggaggagcgacggcagagactggaacgccagatttcccaagacgtgaagctggagcctgacattcttttacgcgcaaaacaggactag

SEQ ID NO: 178259 - DNA, 2304 bp, synthetic construct
  misc_feature 1..2304: note = Description of Artificial Sequence: Synthetic coding sequence
  source 1..2304: mol_type = other DNA
atgccccggcagttccccaagctgaacatcagcgaggtggacgagcaggtgcgcctgttggccgagaaggtgtttgcaaaggtgctacgcgaagaagactctaaggacgcccttagcctgtttaccgttccagaagactgccctatcggacagaaggaggccaaagaacgagagctgcagaaggaacttgcagagcagaagtccgtggagactgccaaacgcaaaaaatcatttaagatgattagaagtcagtccctgtcccttcagatgccacctcagcaggattggaaggggcccccggccgcctcgccagctatgtctcccaccacacccgtggtaaccggggcaacctcattaccaacacctgctccttatgcaatgcctgagttccagcgagtaaccatatccggcgactattgcgctggtatcacactcgaagactacgaacaggccgccaagagtctggccaaagcgctgatgatccgggagaagtacgccaggctagcatatcaccggttcccccgaatcacgtcacagtacctgggccatcccagggcagacacagcccccccagaagagggcttgcccgacttccacccgccacccctgccccaggaagacccatattgccttgatgatgccccccctaatttggattacctggtgcatatgcagggagggatcctctttgtgtacgacaacaaaaagatgctggaacaccaggagccccactctctcccctaccccgatctcgagacatacaccgttgacatgagccacatcctggctctgataaccgacgggcctacgaaaacatactgtcacagacgcctgaatttcctagaatcaaagttcagtctccacgagatgctgaacgaaatgtctgaatttaaggagctgaagtctaatccgcacagggacttttacaatgtccgaaaagtcgatactcatattcatgctgctgcttgcatgaaccagaaacatctccttaggtttattaagcacacctaccagacggagcccgatcgtaccgtcgctgaaaaaagaggcaggaaaatcacactgcgccaggtgttcgacggactccacatggacccttacgaccttacagttgacagcctggacgtgcacgccggccggcagacatttcaccggtttgacaaattcaattctaaatacaatccagttggagcctcggagctgcgcgatctgtatttgaagacggaaaactatctcggcggcgagtacttcgcgaggatggtgaaggaagtggctagggagctcgaagaaagtaagtaccagtacagcgagcccaggctgtcaatttatgggaggtccccagaggagtggccgaatctggcctactggttcatccaacataaagtgtattctcctaacatgcgttggataattcaagtgcctaggatttacgacattttcagaagtaaaaagctcctccccaattttggaaaaatgctcgagaacatttttctgcccctgttcaaggccacaatcaaccctcaggaccatcgagagttgcatctgtttttgaaatatgtgacgggatttgattccgtggatgatgagtccaagcactctgaccatatgttctccgacaagagtcctaacccagacgtgtggacgagcgagcaaaatccgccatattcctactatctgtattatatgtacgctaacatcatggtgttgaacaatctgagaagagagaggggcctatccactttcctttttcgccctcattgcggcgaggccgggtccataacacatctcgtcagcgcttttctcaccgccgacaatatttcacatggcctgctgctgaagaagagcccagtgctgcagtatctgtactacctggctcagatccccattgctatgtcccctttgtcaaacaacagcttgttcctggaatactccaaaaatcccttaagagagtttcttcataaaggcctgcacgtttctctgagtaccgacgaccccatgcagtttcactatacaaaagaggccctaatggaggaatacgccatcgcggctcaggtgtggaagttgagtacgtgtgacctgtgcgaaatagccaggaactctgtactgcagtcaggactgagccaccaggaaaaacagaagttcctgggccaaaactattacaaggagggccccgagggcaatgatatcaggaagacgaatgtggctcagattagaatggcctttagatatgagacgctgtgcaatgaactgagctttctttcagacgctatgaaatctgaagagataacagccctcacaaattag

SEQ ID NO: 178260 - DNA, 2331 bp, synthetic construct
  misc_feature 1..2331: note = Description of Artificial Sequence: Synthetic coding sequence
  source 1..2331: mol_type = other DNA
atggccctgagcagcgagcccgccgagatgccccggcagttccccaagctcaatatcagcgaagtggatgagcaggtgcgtctcctcgccgaaaaagtgttcgccaaggtcctgcgggaggaagactctaaggacgccctgagtcttttcacagttcccgaagactgtccaatagggcagaaagaagctaaggagcgcgagttacagaaagaactggccgagcagaagagcgtggagaccgcgaaacgaaagaagagctttaagatgattcggtctcagagcttgtccctgcaaatgcccccacagcaggactggaaaggtcctccagccgcgagtccagccatgagtccaacgacaccagtagtcactggggcgaccagtctgccgactcccgctccatatgcaatgccagaatttcagagagttacaatttccggcgattactgcgctggaataacgctggaagactacgagcaggctgccaagtctttggccaaagcattgatgatccgtgagaaatacgccagacttgcctaccatcgattccctaggatcacaagtcagtacctaggccatccccgggcagatactgcacctcctgaggagggcttgcccgacttccatccacctcccctccctcaggaggatccctactgtcttgatgatgctcccccaaatctggactacctggtacacatgcaaggcgggatcttgttcgtatacgataataaaaaaatgcttgaacatcaggagccccactccctgccctatcctgatctggagacgtacaccgtggatatgagccatatcctggcactgatcacagacggcccaacaaaaacctattgtcaccgcaggctgaatttcctggagtctaaattcagcctacatgagatgctcaatgagatgagtgaattcaaggaattaaagagtaatcctcaccgggatttttacaacgtcaggaaagtggacacacacatccatgctgccgcctgcatgaaccagaaacatcttttgagatttatcaagcatacttatcagaccgagccagatcgcactgtcgctgagaaaagggggcgaaaaatcacgttgaggcaggtgtttgatggactgcacatggacccttacgatctgacagtggactcgttggacgttcatgctggccgacagacctttcaccggtttgacaaattcaactctaaatataaccctgttggagccagcgagttgcgtgatctgtacttgaaaaccgagaattatctaggaggtgaatatttcgctcgcatggtgaaggaagtggcacgggaactggaggagtcaaagtatcagtattctgagcccaggctttcaatttacggccgttccccagaagaatggcccaacctcgcgtactggttcatccagcacaaggtgtacagccccaatatgaggtggattatccaggtacccagaatctatgacatattccgttcaaaaaagctactgcctaacttcggaaagatgctggaaaacatcttcttaccattgttcaaggctaccatcaatccccaggaccacagggagctgcacctgtttctgaagtacgttaccgggttcgacagcgtggatgacgagagcaagcacagtgaccacatgttttctgataaaagccccaacccagatgtctggactagtgagcaaaaccccccttactcgtattacctgtactacatgtatgctaacatcatggtgctaaataacttacgccgcgagagagggttgagtacctttttattccggcctcactgtggcgaagcgggctccatcacccacttagtgagtgcctttttaaccgccgacaatatctctcacggcctgttactcaagaagagccccgtcttacagtacttgtactatttggctcagattcccattgccatgtctccactcagtaataattcgctgttcctggagtattccaaaaatcccctgagggaattcttgcataaaggtctccacgttagccttagcaccgatgatcctatgcagttccactacactaaggaagctctgatggaagagtacgcgattgcggcccaagtgtggaagcttagcacttgcgatctctgtgaaatagctaggaacagcgttctgcagagtggtctgtcgcatcaggagaagcaaaaatttctcggtcagaattattataaggaaggtcctgaggggaacgacatcaggaaaaccaacgtggcccagatcaggatggccttccgctacgagaccctgtgtaatgaacttagctttttgtccgacgccatgaagtctgaggaaataaccgctcttaccaactag

SEQ ID NO: 178261 - DNA, 1827 bp, synthetic construct
  misc_feature 1..1827: note = Description of Artificial Sequence: Synthetic coding sequence
  source 1..1827: mol_type = other DNA
atgatccgggagaagtacgcccggctggcctaccaccggttcccccgcattacaagccagtacctggggcatccgcgagcggataccgcaccacctgaagaaggcttgcctgattttcaccctccacccctgcctcaagaggacccatattgtctagacgacgcccccccaaacctggattaccttgtccacatgcagggtgggatcctctttgtctacgacaacaaaaagatgttggagcatcaggaaccacactccctgccctaccctgatctggaaacttacacagttgatatgagtcacatcctcgccctgattacggatggcccgacaaaaacttactgtcatcgccgtctaaacttccttgaatccaagtttagcttgcacgaaatgctgaatgaaatgtctgaattcaaagaactgaagtccaatccacaccgagatttctacaacgtgagaaaagtagatactcatatccacgccgccgcatgtatgaatcagaaacacctcctgcggttcataaaacacacctaccagactgagcccgatcggaccgttgcagaaaaacgggggagaaaaatcacactacgccaggttttcgatggactgcatatggacccttatgatctgactgtggactccctggatgtccatgcgggccgccagaccttccaccgctttgataagtttaatagcaaatacaaccccgtcggggccagcgagcttagagacttatatctgaagacagagaattatctgggcggcgaatactttgctcggatggttaaagaggtggccagggaactggaggaatctaagtaccagtattctgaaccacggctcagcatctacgggagaagtccagaggaatggcccaacctggcctactggtttatccagcacaaagtgtattccccaaacatgcggtggataatccaagtgccccggatctacgatatatttcggtccaagaaactgttacctaattttggcaagatgctggagaacatctttcttcccctcttcaaggcaacaattaatccccaagaccacagagaactccatctctttctcaagtacgtcacaggcttcgacagtgtggacgacgaatctaagcattccgaccacatgttcagcgataaaagccccaaccccgatgtgtggaccagcgagcaaaaccccccttactcttactatctttactatatgtacgcgaatatcatggtcctcaacaatttgcggagggaaagagggctcagtacgttcctgtttcgcccccactgcggagaggcaggaagcataacacatcttgtgtctgcctttcttacagccgacaatatcagtcacggactgcttctcaaaaagagcccagtgttgcagtacctttactacttagcccagattcccatcgctatgtcaccccttagtaacaatagcctgtttctggaatattctaaaaaccccctgagggagtttctccacaagggactgcacgtctctttgtccactgacgaccctatgcagttccattacacaaaagaagcgctgatggaggaatacgccattgctgcccaggtatggaagctgagcacgtgcgacctgtgtgagatcgctagaaatagcgtcttacagtccggcctgtcccaccaagagaaacagaaatttctaggtcagaattactacaaagagggaccagagggcaatgacatcagaaaaaccaacgtcgcccagatccggatggcattccggtacgaaactctgtgtaacgagctcagcttcctcagcgatgccatgaagagtgaggagattaccgccctaacaaattag

SEQ ID NO: 178262 - DNA, 804 bp, synthetic construct
  misc_feature 1..804: note = Description of Artificial Sequence: Synthetic coding sequence
  source 1..804: mol_type = other DNA
atgccccggcagttccccaagctgaacatcagcgaggtggacgagcaggttcggctgttggctgaaaaggtcttcgccaaagtccttagagaagaagatagcaaagacgctctgtcactgtttaccgtgcccgaggattgtcctatcggccagaaagaggcgaaggaaagggaactccagaaggagctcgctgaacagaaatccgtcgaaacggcaaagcggaagaagtctttcaaaatgatcaggtctcagagcctgagtctgcagatgcccccgcagcaggactggaaaggtccaccagccgcgagtccggccatgagcccaacaacgcctgtcgtaactggagccactagcctgccgacgcctgcgccctacgccatgcccgaattccagcgagtgaccatttccggggactattgcgccggcatcacactggaggactatgagcaagccgcgaaaagcctcgccaaggcgctcatgataagggagaagtatgcaaggctggcctatcataggttccctcggataacctcccagtacctcggacatccaagggcggataccgccccacccgaggaggggctgccagactttcacccaccacctttacctcaggaggatccttactgcctggatgatgctccgcccaacctggattacctggtgcacatgcagggcgggattctcttcgtatacgataacaagaagatgctggagcaccaagaacctcactcccttccataccccgacctggaaacatacactgttgacatgtcacatattctggcgcttatcactgactag

SEQ ID NO: 178263 - DNA, 2325 bp, synthetic construct
  misc_feature 1..2325: note = Description of Artificial Sequence: Synthetic coding sequence
  source 1..2325: mol_type = other DNA
atggagcccggcagcgccgagatgccccggcagttccccaagctgaatataagcgaagtggacgaacaggtccggttattggcagaaaaggtgttcgcgaaggtactgagggaagaagatagtaaagacgcactgtccctgttcaccgtaccggaggattgccccataggacagaaagaggccaaagaaagggagcttcagaaggagctggccgaacagaaatctgtagaaactgcaaagagaaaaaagtctttcaagatgatccgatcccagtcactttccctgcagatgcccccccaacaggactggaagggccctccagctgccagcccagccatgtccccaaccacacccgtcgtgaccggcgccacctccctgcccactcccgcgccctacgccatgccggagttccagcgtgtgacaatttcaggtgactattgtgctggaattactctagaagactatgaacaggctgcaaagagcctggcaaaggcgttgatgatccgagagaagtacgcacggctggcttatcaccggtttccccgtataacgagccagtatctgggtcatccccgggctgatactgcaccccccgaagaagggctacctgactttcatccgccaccgctgcctcaggaagacccctattgtctggacgatgctccacccaacttagattatctagtccacatgcaggggggcatcctcttcgtttacgataataagaagatgcttgagcaccaggagccacattcactcccctatcccgatctagaaacgtatacagttgatatgtctcacatcttggctctcatcactgatggaccaacaaagacatattgccaccggagactcaacttcctcgaaagcaagtttagcttgcacgaaatgctgaacgagatgagcgagtttaaagaacttaagtctaacccacatagggacttctataatgtgcgcaaggtagacacacatattcatgccgcagcgtgcatgaatcagaaacacctgctcagatttatcaagcacacataccaaactgaacccgaccggacagtggcagagaagcgcggtcggaagatcactctgcgtcaggtgtttgacgggctgcatatggatccctacgacctgacagtcgacagtctcgatgttcatgccggtcgacagacctttcaccgattcgacaaatttaactctaagtataacccggtgggcgctagtgaactgcgggatctctacctaaaaacagagaattacctagggggcgagtacttcgctcgcatggtgaaagaagtggctcgggaactggaagaatctaagtaccagtacagcgaacccagattgtctatctacgggagatcccctgaggagtggccaaatctggcttattggtttatccagcataaggtctacagtcccaacatgagatggattattcaggttccaagaatttacgacatttttaggtctaagaagctgctccccaacttcggtaagatgcttgagaacattttcctccctttgttcaaagccactatcaaccctcaggatcacagagagttacatttatttttgaagtacgtgactggcttcgattcagttgacgacgagtccaaacattcggaccatatgttctctgataagagccctaaccctgatgtctggacatccgagcaaaacccgccctattcttattacctgtactacatgtatgctaacataatggtcttgaacaatctgcgccgcgaaagagggctcagcaccttcttattcaggccccactgtggagaggccggcagcataacccaccttgtgtccgctttcctgactgctgataatatatcccacggattgctcttgaagaagagcccagtcctgcagtatttatattatctggcccagatccccatagccatgtcccctctgtcaaacaacagcctgtttctggagtatagcaaaaatcctttgcgtgagttcctccataagggtctgcatgtctctttgagcaccgacgatcccatgcagttccattacactaaagaggctctaatggaggagtacgccatcgcagcgcaagtctggaaactgtctacttgcgacctctgcgaaattgcaaggaacagtgtgctccagtccggattgtcacaccaggagaagcaaaaatttctaggacagaattactataaagagggcccagagggcaacgatataagaaaaaccaacgttgcccaaattcgtatggcctttagatatgaaacgctttgcaacgagctgtccttcctgagcgacgctatgaagagcgaggagatcactgccctaaccaattag

SEQ ID NO: 178264 - DNA, 2304 bp, synthetic construct
  misc_feature 1..2304: note = Description of Artificial Sequence: Synthetic coding sequence
  source 1..2304: mol_type = other DNA
atgccccggcagttccccaagctgaacatcagcgaggtggacgagcaggtacgacttctggcggagaaagtgtttgcaaaggttctgcgcgaggaggacagtaaagacgccctatcgctattcacagtccctgaggattgtcccatcggccagaaggaggcaaaggagcgagagctccagaaggagctggcagagcagaaatcagtggaaactgcaaaacgcaaaaaaagtttcaagatgatcaggtcgcagtctctctctctgcagatgcctcctcagcaggactggaagggcccccctgctgcgtctcccgccatgtcacccacaaccccggtcgtgaccggcgccacctctcttccaaccccagcaccttacgccatgcccgaatttcagagggtgactatcagtggagattactgcgcaggcatcaccctggaggactatgagcaagcggcaaaaagcctcgcaaaagccctcatgatcagagaaaagtatgccagactcgcgtatcaccgattcccaaggatcacaagccagtacttgggccatcctagggcagacactgccccacccgaagaagggctgccggattttcatcctccccctctgcctcaggaggacccgtactgcttggacgacgccccccctaacctcgactacttagtgcacatgcagggtggaatcttgttcgtatacgacaataagaaaatgctggagcaccaggaaccacactcgctcccttaccccgaccttgagacctacactgtagacatgtcgcacatccttgccttaatcaccgacggcccaaccaagacttactgccatcgaagactgaactttctagagtctaagttctccttacatgaaatgctcaacgagatgagtgaatttaaggagctaaagagcaaccctcatcgggatttttacaacgtgcggaaagtggatactcatatccacgccgcagcctgcatgaaccagaaacacctactacgcttcattaagcatacgtaccagaccgagccagatcgtaccgtggctgagaagagaggccgcaagataaccttgcgacaagtcttcgatggacttcacatggacccatacgatttgacagtggactcactcgacgtgcatgctggccgccagacatttcacaggttcgacaagttcaactccaagtacaaccccgtcggagcttctgaattgagggacctgtacttgaaaacagagaattatctggggggcgaatacttcgctcgcatggtcaaggaagtagctcgggaactcgaagagagtaaatatcaatatagcgagccacgcctgagcatttacgggcgatctcccgaggagtggccaaacttggcctactggttcattcagcacaaagtctactcgcccaacatgagatggataattcaggtgcctcgcatttacgatatatttcgctccaaaaaacttctgccaaatttcgggaagatgttggaaaacatcttcctgccactgtttaaggccaccatcaacccacaagatcatagggaactccacttatttctcaagtatgtcaccggattcgacagcgtcgacgacgaatctaagcattcagaccacatgttctcggacaagtctccaaatccagatgtctggacttccgagcagaatccgccatatagctactacttgtactacatgtacgcaaacattatggtgctgaataacttgcgtagagaacgtgggcttagtacattcctgttccgcccacactgcggtgaagctggcagtatcacgcatctggtgtccgcttttctgacagctgataacattagtcatggcctcttgctcaaaaagtctcctgtgctgcagtatctgtattacctcgcacagatcccaatcgctatgtcccccttgtcaaacaattctttgtttttggagtactccaagaatcctctgagggaattcctacacaaaggcttgcacgtttccttgtcaactgacgacccgatgcagtttcactacaccaaagaagcactaatggaggaatatgctatcgcagcccaggtctggaagctgagcacatgcgatctttgcgaaatcgctcgcaactcggtgctgcagtcgggcctctctcatcaggaaaagcagaaattccttggacaaaactattataaggaggggcccgaggggaacgatatccgaaagactaatgtggctcagatcagaatggccttccgctatgaaaccttgtgcaatgagctgagcttccttagtgacgccatgaagagtgaagaaattacagccctgaccaactag

SEQ ID NO: 178265 - DNA, 336 bp, synthetic construct
  misc_feature 1..336: note = Description of Artificial Sequence: Synthetic coding sequence
  source 1..336: mol_type = other DNA
atgccccggcagttccccaagctgaacatcagcgaggtggacgagcaggtgagactgttagctgaaaaggtcttcgctaaggtactgcgcgaggaggacagtaaggatgcactgtcactgttcactgttccggaagattgtccgatcgggcagaaagaggccaaagagagggaactacaaaaagagcttgctgaacagaaatccgttgagactgctaaaaggaagaagtcattcaaaatgattcgatcacagtcattatctctgcaaatgcctccacaacaggattggaagggcccccccgctgcttccccggctatgtcacctactaccccatag

SEQ ID NO: 178266 - DNA, 426 bp, synthetic construct
  misc_feature 1..426: note = Description of Artificial Sequence: Synthetic coding sequence
  source 1..426: mol_type = other DNA
atggcccggcccctgtgcaccctgctgctgctgatggccaccctggcaggagcactggcatcttcaagcaaggaggagaaccggatcatccccggcggtatatatgacgctgatctgaacgacgagtgggttcaacgggccctgcactttgccatttctgagtataacaaagctaccgaagacgagtattaccggaggccccttcaggttctgagggcgcgggagcaaacatttggaggggtaaattacttttttgatgtcgaggtgggtagaaccatctgtacaaaatcccaaccgaacctggatacctgtgctttccacgagcagccagagctccagaaaaaacagttatgcagcttcgagatatacgaagtgccctgggaggatcgcatgtccctggtgaactcccgctgtcaggaggcctag

SEQ ID NO: 178267 - DNA, 1215 bp, synthetic construct
  misc_feature 1..1215: note = Description of Artificial Sequence: Synthetic coding sequence
  source 1..1215: mol_type = other DNA
atgcccggcctgatgcggatgcgggagcggtacagcgccagcaagccacttaagggagctcgcatcgctggttgtctccatatgacagtcgaaaccgctgtgctgatagagactctggtgacgcttggcgccgaagtgcagtggagctcctgcaacatttttagcacccaagaccacgctgccgccgctatagcaaaggcaggcatcccagtctacgcatggaagggagaaactgacgaagagtacctgtggtgtatcgagcaaacactgtacttcaaggatggccctctaaatatgattctggacgatgggggtgacctgaccaacttgatccacactaagtatccccagctgttgcccggcattaggggaatctccgaagaaactaccactggggtgcataacttgtataagatgatggctaacggaatcctaaaagtcccggcgattaacgtcaacgactccgtaacgaaaagtaagttcgataacctatacggctgccgtgagagtctgatcgacgggattaagagagctaccgatgtaatgatagctggtaaagttgcagtagtagccggatatggagacgtgggcaagggttgtgcccaggctctccgtggctttggcgctcgggtgattattacagaaattgacccgatcaatgcactccaggctgccatggaggggtatgaggtcaccaccatggatgaagcttgccaggaaggaaatatcttcgtgacaactacaggatgcatcgacataattctcgggagacacttcgagcagatgaaagatgacgcgatcgtgtgcaatattggtcactttgacgtggagattgacgtcaagtggttaaatgagaacgctgttgagaaggtaaatataaaaccacaggtggacagataccggctgaaaaatggacgcaggatcatcctgctggctgaaggccggcttgttaatctgggctgcgcgatggggcacccatccttcgtgatgtccaacagctttacgaaccaggttatggcccagatagagctatggacgcatcccgataagtacccggttggggtgcatttcctgcccaagaaactggatgaggctgtggctgaggcgcatcttggcaaactcaacgtgaagcttacgaagcttactgagaagcaggcccaatacctcgggatgagttgtgacggccctttcaagcctgaccactatagatattag

SEQ ID NO: 178268 - DNA, 798 bp, synthetic construct
  misc_feature 1..798: note = Description of Artificial Sequence: Synthetic coding sequence
  source 1..798: mol_type = other DNA
atgttcgtgagcaagcggcggttcatcctgaagacctgcggcaccactttgctacttaaggcactggtgccgttgctgaagctcgccagggactatagtggctttgacagtatccagtccttcttctatagccggaagaacttcatgaagccctcccatcaaggctatcctcatcggaattttcaagaggagatagaatttttgaacgccattttccccaacggggcagcctattgcatgggaaggatgaatagcgactgctggtatctctatacccttgacttcccggagagtagagtgatatcccagcccgaccaaaccctggaaatcttaatgtccgagctagatcccgctgttatggaccaattctacatgaaagacggggttacagccaaggacgtgacgcgcgaatccgggatcagagatctgattcctggttcagtcattgacgccacaatgtttaatccctgcgggtattccatgaacggtatgaagagtgatggaacctactggactatccacatcactccagaaccggaattctcttatgtgtccttcgagacgaacctgtcccagacctcttacgacgatctgattcggaaggtggtcgaggttttcaagcccggcaaattcgtgacgaccctctttgtgaatcagagcagcaagtgcagaacagtgctcgcctcgccccaaaagattgaaggtttcaagaggctcgactgtcaaagtgcgatgtttaacgactacaattttgtatttactagtttcgctaagaagcaacagcagcagcaaagctag

SEQ ID NO: 178269 - DNA, 918 bp, synthetic construct
  misc_feature 1..918: note = Description of Artificial Sequence: Synthetic coding sequence
  source 1..918: mol_type = other DNA
atggaggccgcccacttcttcgagggcaccgagaagctgctggaggtgtggttcagcaggcagcagccagacgcaaaccagggatccggggacctgcgcacaatacccagtgagagctcaatgtttgtgagcaagcgccggttcattctcaagacctgtggcaccacccttctgttgaaggcactagtccccctgttgaagctggctagagattacagtggttttgatagcatccagtccttcttctactcgcgcaagaatttcatgaaaccaagtcaccagggctacccccatcgcaacttccaagaagaaattgaattccttaacgccatcttcccaaacggagccgcctattgcatggggcgcatgaactccgactgctggtatctgtataccctggattttcccgaaagccgagtgatttctcagcctgaccagaccctcgaaatcctaatgtcagaacttgaccctgctgtgatggaccagttttacatgaaggacggtgtgaccgcgaaggacgtgacccgcgaatctggtattcgagatcttattccggggagtgtcatcgatgctacaatgttcaacccatgcgggtattcaatgaatggaatgaaatcagacgggacctactggacgattcatattacccctgagcctgagttctcttacgtcagttttgagaccaacttatcccaaaccagttacgatgatcttataagaaaggtggtggaagtctttaagcccgggaaattcgtcacaacactctttgtaaatcagagttcaaagtgcagaaccgtacttgcttccccacaaaagatcgaagggtttaaaagattggactgtcagtcagccatgtttaacgactacaacttcgttttcacatcatttgccaaaaagcagcaacagcaacagagctag

SEQ ID NO: 178270 - DNA, 561 bp, synthetic construct
  misc_feature 1..561: note = Description of Artificial Sequence: Synthetic coding sequence
  source 1..561: mol_type = other DNA
atgggccggatgaacagcgactgctggtacctgtacaccctggacttcccagagagccgagtcatctctcaaccggatcagacattggagattcttatgtccgagctggatccggcagtcatggaccagttttacatgaaagacggcgtaacggccaaagacgtaaccagggaatcaggcatccgggatttaattcccggaagcgtgatcgatgctactatgtttaacccttgcggttatagtatgaatggaatgaagagcgacgggacctattggacgattcacatcactcctgagccagagtttagctacgtgtcctttgaaaccaatctctcacaaacgagttatgacgatctgatccgcaaggtggttgaggtgtttaaacctggcaagttcgtcaccacactcttcgtgaatcagtcttctaagtgcagaaccgtcctggccagtcctcagaaaatagagggattcaagcgtctggattgccagtcagcaatgttcaacgactataacttcgtgttcacgtcattcgccaagaagcagcagcagcaacagagctag

SEQ ID NO: 178271 - DNA, 1005 bp, synthetic construct
  misc_feature 1..1005: note = Description of Artificial Sequence: Synthetic coding sequence
  source 1..1005: mol_type = other DNA
atggaggccgcccacttcttcgagggcaccgagaagctgctggaggtctggttcagcagacagcagcccgacgctaatcagggaagtggcgacttgcggacaattcctaggtctgaatgggacatcttgctgaaagacgtccagtgttcaattatcagtgtgacaaagacagacaagcaggaagcgtacgtcctctcggaatcaagcatgtttgtaagcaagcgtcgattcattctgaagacatgcgggacaacccttttgttgaaagctttggttcccctgttaaagctggcacgtgactatagtggcttcgatagcatccagagctttttctactcacgaaaaaatttcatgaaaccctcccatcagggctaccctcataggaatttccaagaggagattgagtttctgaatgccatctttcccaatggtgccgcttactgcatggggcgaatgaactctgattgttggtatctgtataccctcgactttcccgaatcacgcgtaataagccagccagatcagaccttggagattttgatgtctgagcttgacccggctgtgatggatcaattctacatgaaggatggggtgacagcaaaggatgtcacgcgcgagtcaggtatccgtgacctgatacccggttctgtgatcgacgccaccatgttcaatccatgcggctactccatgaacgggatgaagtctgacggaacatactggacgattcacattaccccagaaccagagttctcttatgtgagcttcgaaactaatctaagtcagactagctatgatgatcttatccgaaaagtggttgaagtgtttaaaccgggtaagttcgtgactacgctcttcgttaatcaatcctcaaaatgcaggacagtgctggccagccctcaaaagatcgaaggctttaagcgcttagactgccagagcgcgatgttcaacgattacaattttgtgtttacttcctttgcaaagaaacagcagcagcagcagagctag

SEQ ID NO: 178272 - DNA, 645 bp, synthetic construct
  misc_feature 1..645: note = Description of Artificial Sequence: Synthetic coding sequence
  source 1..645: mol_type = other DNA
atggaggccgcccacttcttcgagggcaccgagaagctgctggaggtatggttttctaggcagcagccagacgcgaaccagggctcaggtgacctccgtacaatccctcggtacctttacactctcgattttcctgagagtcgggttatttcccagcctgaccagaccctggagatcctgatgtccgagctagaccctgccgtgatggaccagttctatatgaaagatggggtgactgcaaaagatgtgaccagggaatctggaatcagggatttgatcccaggtagtgtgatcgacgctactatgttcaacccgtgtggctatagcatgaatggtatgaagtcggacggcacgtactggaccatacacattacccccgaacctgaattttcttatgtatccttcgaaacgaacctgtctcaaacttcatacgatgatctcatcagaaaagtcgtcgaggtgttcaagcccggaaaattcgtgacaaccctcttcgtgaatcagtcaagcaagtgccggaccgtactagccagtcctcaaaagatcgaggggttcaagagactcgactgtcagagtgcgatgttcaacgactataacttcgtgttcaccagctttgccaagaaacagcagcagcagcagagctag

SEQ ID NO: 178273 - DNA, 3360 bp, synthetic construct
  misc_feature 1..3360: note = Description of Artificial Sequence: Synthetic coding sequence
  source 1..3360: mol_type = other DNA
atggccggcgccccccggggcggcggcggcggcggcggcggcgccggggagcctggcggtgctgaacgagctgcgggtacgtcacgccggaggggcctaagagcgtgtgacgaagaattcgcctgcccggagttggaggccttattccggggctatacactcagactggaacaggctgccacactgaaggcactggccgtgctcagtctgttggcgggggctctggcactggccgaactcctgggtgcacctgggcccgccccaggcctcgctaaaggttcacaccccgtccactgcgtactctttcttgctctgcttgtggtgaccaatgtgcgctcgttacaagtcccgcagctgcaacaggtgggccaacttgccttgttattctccctcacattcgccttgctgtgttgtccctttgcactaggcggacccgcccgtggcagcgccggcgccgctggcggtcccgccacagctgaacaaggagtatggcaattactactggtcaccttcgtctcgtatgccctactgcccgtccgctctcttctggcaatcggcttcgggctggtagtcgccgctagccatttgctggtcacagccacgctggtgccagccaagaggccgaggttgtggcgtaccttaggcgccaatgcattgctgtttgtgggggtcaacatgtacggtgtgttcgtcaggatactgaccgagcggagtcaacgcaaggccttccttcaggcgcgtagttgtatcgaggatagactgaggctggaggatgaaaacgagaaacaggaacggctgctcatgagtctcctgccgagaaatgtggcgatggagatgaaggaagattttctcaaaccccccgagcggattttccacaagatctacatccagcgacacgacaatgtgagcattctgttcgctgacattgtggggttcaccggcctggccagccagtgcactgcccaggagttggtgaagctgctcaatgagttatttggtaagtttgatgagctggcaaccgaaaaccactgccggcgcattaaaatactcggcgactgctactattgcgtgagtggtctcacccaaccgaagacggaccatgcacactgctgcgtcgagatgggactggacatgattgacaccataacgagcgtcgccgaggcaaccgaggtggacttgaatatgagggtaggactccacaccggccgcgtcctttgtggcgttctcggtctgagaaagtggcagtacgatgtgtggtccaacgatgtaacattagcaaacgtaatggaagccgcaggacttcccggcaaagtgcatattaccaaaactaccctggcttgtttgaatggggattatgaagtcgagccggggtatgggcacgagcggaatagctttctgaaaacacataatatcgagaccttttttatagtgccatcacatcgcagaaagattttccctggcttaatcttgtctgatattaagcctgccaagaggatgaaattcaaaacggtgtgctatcttctggtacagcttatgcactgccggaaaatgttcaaggccgaaatccccttctcaaacgtaatgacatgcgaggatgacgataagcggagagcgctgcggacggcaagcgaaaagctgcggaacagaagttcgttctctaccaacgtggtgtacacaacccctgggacacgagtgaacaggtatatctctcgcctacttgaggccagacagacagagcttgaaatggctgatttgaacttcttcactctcaaatataaacatgtcgaacgagagcagaagtatcaccaacttcaggacgagtactttacttccgcggtggtactgaccctgatcctcgccgctttgttcggcctggtttatctgctcatcttccctcagagtgttgtggtcttactgcttttggtgttttgtatctgttttctagttgcttgcgtgctctacttgcatataacccgagtccagtgcttccccggttgcctgacaatacaaattaggaccgtgctttgtattttcattgtcgtactcatctacagtgtcgcgcagggatgcgtcgtgggctgtctgccctgggcgtggtcctctaagccaaatagtagtctggtggttctttcgtccggcggtcaacgcacggccctccctacactcccatgtgaatcgacgcaccacgccctactgtgttgcctcgttggaacacttcctctggctatattctttcgggtctcctcgctgccgaaaatgattctgctgtctgggcttactacttcctacatcctggttcttgaattaagtggatacactcgaaccggcggcggcgccgtgtctggacgctcctacgagcctattgtggccattcttctgttctcctgtgccttagctcttcacgctcgtcaggtcgacatccgattgaggcttgactacctgtgggcagcgcaggcagaagaggagagggaggatatggaaaaggtgaagcttgacaaccggaggatcctcttcaatcttctgcctgcacacgtggcacagcacttcctgatgtcgaaccctcgaaatatggacctctactatcaatcctactcacaggtgggggtgatgttcgcgtcgatcccaaatttcaatgatttctatatcgaacttgacggcaacaatatgggcgtggagtgtcttaggttgctcaatgaaatcatagcagatttcgacgaactgatggaaaaggatttttacaaagacattgaaaaaattaagactattggttctacctacatggccgccgtgggcctcgctccgacctccggcacgaaggctaagaagagcatttcgtcccacctctcaactctcgccgattttgctattgaaatgttcgatgttcttgatgaaatcaactaccaatcctataacgacttcgtgctcagagtggggattaacgtcggcccagtagtcgccggcgtgatcggggcccggagaccgcagtacgacatatggggaaacaccgtgaatgtggcttcccggatggactccacaggcgtgcaggggcgcattcaggttaccgaggaggtgcacagattgctgagacgatgcccttaccacttcgtgtgtcgggggaaggttagcgtgaaggggaagggtgagatgttgacctattttctggaggggcgcacggatggaaatggctcccagattcggagcctgggtctagatcgaaagatgtgccctttcggccgcgctgggctgcagggcagaagaccaccggtgtgccccatgccaggcgtgtctgtcagggccggactgcccccgcactctcccgggcagtatctgccaagcgccgccgcaggcaaggaagcctag

SEQ ID NO: 178274 - DNA, 3174 bp, synthetic construct
  misc_feature 1..3174: note = Description of Artificial Sequence: Synthetic coding sequence
  source 1..3174: mol_type = other DNA
atggccggcgccccccggggcggcggcggcggcggcggcggcgccggggaacccggtggtgccgagcgcgccgccggcaccagtcgacggcgcggcctaagggcctgcgatgaggagttcgcctgtccagagttagaggcacttttccgaggctacactttaagactggagcaggctgctactctgaaagctctcgcagtgctcagccttcttgcaggggccctcgccctggcggagctcttaggcgctcccggaccggccccaggtctcgccaagggtagccatccagtacattgcgtgttgttccttgctctgctggttgtcacgaatgtgcgatctttacaagtcccccagcttcagcaagtgggccagctcgcgcttctgtttagcctcacttttgcgctgctctgctgccccttcgccctgggcggccctgcccgggggagcgccggtgcagcaggcgggcccgcgaccgccgagcagggggtgtggcagcttctgctggtaacatttgtcagctatgcgcttcttccagtgcgaagcctcttggcaataggtttcggtctcgtcgtggcagctagtcacctcctagttacagctactctcgtccctgcaaagcgaccacgcctctggcgtaccctgggcgcaaacgctttactgtttgtgggagtcaacatgtacggagtctttgtgcgaatactcaccgagaggtcccagcgaaaagcattcctacaagcaaggtcctgtatcgaggatcgactgcgactggaggatgaaaatgagaagcaggaaaggctcctcatgagcctgctgccccgcaatgtcgccatggaaatgaaagaagattttttgaaaccccctgagcgcatctttcataagatctacatacaaagacatgacaatgtatccatcctgtttgccgacatcgtgggtttcacgggtttggcctctcaatgcacggcccaggaactggttaaactgttgaacgaactttttggtaaattcgatgagctcgcaaccgaaaatcattgtaggcgcataaaaatccttggcgattgttattactgtgtgagcgggcttactcagccgaagactgatcatgcccactgttgcgttgaaatgggcctggacatgattgataccatcacctcagtagctgaggccacagaggtggatctgaacatgcgggtgggcctccatacaggaagagtgctctgtggagtactcggcttgcgtaaatggcagtacgacgtgtggtctaatgatgtgaccctggcgaacgttatggaagcagctggtttgcccggcaaagtacacatcaccaaaaccaccctggcttgcttgaatggggattatgaagtggaaccaggatatgggcacgagcggaactcattcttaaagacacataatattgagactttctttattgtcccttcccatcggaggaaaatcttcccaggcctgattctgtcagacataaaacccgccaagcgcatgaaattcaagacagtatgctacctgcttgtgcagttgatgcattgtaggaagatgttcaaagccgagattcccttctccaatgtgatgacctgtgaggacgacgacaaacgccgcgcacttaggacagctagtgaaaagctaagaaatagaagctccttctccaccaacgtggtctatacaactccaggaacaagggtgaaccgatatatctcccggcttctagaggcccgccaaacagagctcgaaatggctgacctgaatttcttcaccctcaaatacaaacatgttgagagagaacagaagtatcatcagctccaggacgagtatttcacttccgccgttgtcctaaccctcattctagccgcattgtttgggctggtctacttactcatatttccccaatctgttgtggttctcttactgcttgtgttttgcatctgctttttggttgcatgcgttctgtacctacatataactagagtgcagtgttttcctggatgtctgactatccagatccgaaccgtcctgtgtatattcatcgtcgtgctgatatactcagtcgcccagggctgtgtcgtgggctgtctgccttgggcctggtcttcaaagcctaactcctccctggtggtgctttcttctggaggccagaggaccgccctgcccactctgccttgcgaatcaacacaccatgccttgctatgttgtctggtgggaaccctgccattggccatttttttccgggtcagcagcctccctaagatgatcctcctgtccggccttaccacctcgtatattctggtcttggagctgagcgggtacaccaggacagggggtggcgctgtcagcggccggtcttatgaacctattgtggccatcctcctcttcagttgcgcgctggcgttacacgctagacaggtagacataaggttgcggttagattacctttgggctgcccaagcagaagaggagagagaggacatggagaaggtcaagcttgataacagacggatattattcaacttgcttcctgctcatgtagctcagcactttctcatgtctaatcctagaaatatggacttatactaccaatcttactctcaggtcggcgtgatgtttgcatctatccccaactttaatgatttctacatcgaactggatggaaataacatgggagtggagtgtcttcggctcctgaacgagatcatcgccgatttcgacgagttgatggaaaaggacttttataaagatattgagaaaatcaaaaccatcggttccacctacatggccgcggtcggcctcgctccgacatctgggacaaaggcaaaaaagtccattagtagtcatctgtccaccctggctgatttcgcgatcgagatgttcgacgtgctggatgaaatcaactaccaaagctataatgacttcgtactgagagtgggcatcaacgtcggtccggtggtcgccggcgttatcggggcacgcagaccgcagtatgatatttgggggaatacggtaaacgtcgctagtcggatggatagtacgggagttcagggccggattcaggtgacggaggaagtacaccgtcttctgagaaggtgtcccccactgtgcgttcccaggcagtcgcagtgtcaggggcaaaggagggatgttgacatcctgtccaggagacaggactag

SEQ ID NO: 178275 - DNA, 3276 bp, synthetic construct
  misc_feature 1..3276: note = Description of Artificial Sequence: Synthetic coding sequence
  source 1..3276: mol_type = other DNA
atgtggcaggaggccatgcggcggcggcggtacctgcgggaccggagcgaagaggccgctggcggtggagacggacttcccagatctagagattggctgtacgagagttactattgcatgagccaacagcatccactgattgtcttcttgctcctcattgtgatgggcagttgcctggctctactcgctgtgtttttcgccctggggctggaagtggaagaccatgtagctttcctaatcaccgttcctactgccctcgcaatattctttgcaatcttcatcctcgtctgcattgagagcgtgtttaaaaaacttctgagattgttctctctcgtcatctggatatgcctcgttgccatggggtacctcttcatgtgcttcggcgggacggtgagcccttgggaccaggtgtcctttttcttgtttattatcttcgtcgtgtatactatgctgcccttcaacatgcgagatgccattattgcatcagttctgacttcctctagccataccatcgtgctcagcgtctgtctgtccgctacacccggtggcaaagagcatctagtgtggcagatcctggcaaatgttattattttcatttgcggcaatctggccggagcctatcacaaacacctgatggagttggcccttcaacagacatatcaggacacctgcaattgtatcaagagtagaataaagctggagttcgaaaaacggcagcaagagcgattattgttatctttactccccgcacacatagcaatggaaatgaaggccgagatcatccagcgactgcagggtcctaaagccggacagatggagaatacgaataacttccataatctatatgtgaaacgccataccaacgtgtctatcctctacgccgatatcgtcggattcacccggctggcttcggactgttctccaggagagctggtgcacatgctgaacgagctgttcggcaagttcgaccagatagcaaaggaaaacgagtgtatgcgcataaagattttgggagactgttactactgtgtgtccgggctgcccatctctctaccaaaccacgctaagaactgcgtgaaaatgggactggacatgtgtgaagctataaagaaggtacgggacgccacgggagtggatatcaatatgcgcgtaggcgttcattccggaaatgtgttatgtggggtcatcggtcttcagaaatggcagtatgatgtttggagccatgatgtgactctcgccaatcacatggaggccggcggggtgcctggacgggtgcatattagctccgtgactctggagcacctcaacggagcctacaaagtagaagaaggcgatggagacatccgcgacccttacctcaagcagcacctggtgaagacctactttgtgattaacccgaagggggagcgcagatctccccaacatctgttccgtccgaggcacaccctggacggcgcaaagatgcgcgcatcggtcagaatgacacgatatctggagtcctggggcgccgcaaagcccttcgcccacctacaccatcgagattcgatgacaaccgagaacggcaaaattagtacgacagatgtacctatgggtcagcataacttccagaaccggacacttcggacaaaatctcaaaagaagagattcgaggaggagctgaatgagcgcatgatccaagcaatcgacggtatcaatgctcagaagcagtggcttaagtctgaagatattcaaagaataagcttgctattttacaataaggtgctggagaaggagtatagagccactgctcttcccgcttttaagtactacgtgacttgtgcatgcttaatattcttctgcatcttcattgtccagatactggtgctgcccaagacttccgtcctgggaatcagcttcggagccgcctttctcttactcgctttcatcctcttcgtctgctttgctggccaactactacagtgtagtaaaaaagctagccccctcctcatgtggctgcttaaaagttccggaatcatcgccaaccggccctggccacggatctctttaacgattattacaaccgcgatcatcctgatgatggccgtttttaatatgttctttttgagtgactccgaggaaaccatccccccaacagcaaatactaccaatacctctttcagtgcctccaataatcaggttgccatcctccgggctcaaaatctgttctttctgccttacttcatatatagctgtattctgggcctgatttcatgtagcgttttcctccgggtaaactatgaacttaagatgctcatcatgatggtggcactggtcggctataacacaatcctcttacatacacacgcccatgtgctgggggattattcccaagtcctgtttgaaaggcctggcatctggaaagacctgaaaacaatgggcagcgtgagcctgagcattttttttatcacgttacttgtgctgggccgccagaacgagtactattgtcgcctcgacttcctatggaaaaataagtttaaaaaggagcgcgaggagattgaaaccatggaaaatctgaatcgagttctattggaaaatgtgctccccgctcatgttgccgagcacttcttggccaggtctctgaagaacgaggaactgtaccatcagtcatacgattgtgtgtgcgtgatgttcgcatcaatccctgattttaaggaattctacaccgagagcgacgtgaacaaggaaggtcttgagtgcctgagactcctgaatgaaatcatcgccgattttgatgacctcctgtctaagcccaaattctccggcgttgaaaaaatcaagactattgggagcacttatatggctgccactggcctgtccgcggtcccctctcaggaacactctcaggagcccgagagacagtatatgcatatcggaacaatggtcgagttcgcgttcgccctcgtcggcaaactggatgctattaacaagcattcctttaatgactttaagctcagagtcggaataaaccatgggcccgtcattgcaggtgtaatcggcgcccagaagccccagtatgatatctggggcaataccgtgaatgttgcctcccgcatggacagcacaggcgtactggacaagattcaggtcacggaagagacaagtctggtactgcagacactaggctatacttgcacatgccgcggcattattaatgttaagggaaaaggtgaccttaagacttatttcgttaatactgaaatgagtcgcagcctgagccaatcaaacgtggcaagttag

SEQ ID NO: 178276 - DNA, 612 bp, synthetic construct
  misc_feature 1..612: note = Description of Artificial Sequence: Synthetic coding sequence
  source 1..612: mol_type = other DNA
atggagaacctgaaccgggtgctgctggagaacgtgctgcccgcccatgtggcagagcatttcctcgcccgctctttaaagaacgaggagctgtatcaccagtcttatgactgcgtttgcgtcatgttcgccagcattccagacttcaaggagttttacaccgagagcgatgtgaacaaagagggccttgaatgtcttagattactgaatgaaatcatagccgactttgatgacctgctcagcaagccaaagtttagtggagtcgagaagattaaaacaattggatccacctacatggcagccactggccttagcgccgtcccctcacaggaacattcacaggagcccgagcggcagtacatgcatatcggcactatggtggagtttgcattcgctctggtaggaaagctggacgctatcaacaagcactctttcaacgattttaagctgagggtgggagtgaccgaggaaacttctttggtgcttcagacccttggatatacctgcacatgtagaggcatcattaacgtaaagggaaagggcgatttgaaaacctattttgtaaatacagaaatgtctaggtccctgtctcaaagcaacgtggcctcttag

SEQ ID NO: 178277 - DNA, 2736 bp, synthetic construct
  misc_feature 1..2736: note = Description of Artificial Sequence: Synthetic coding sequence
  source 1..2736: mol_type = other DNA
atggacctgcggtgggcccgggacctgcacctgcgggaggccagcagatccgttgccttcaccactctgcggttgggcgcagtgactaccgggctactaacctttagagaaccaggcgataaggaaaagagtgggaaaggtctaggaaagcggtggcgaatccaaagagaagaaagccaggaacggctgcttctaagcctactgcctgcgcacattgccatggagatgaaagcggaaattatacaacggttacagggacccaaggccggtcaaatggaaaatactaataattttcataacctgtacgttaaaaggcacactaacgtgtcaatcttatatgccgatatcgtcgggtttacccgcctggcgagcgattgttccccaggcgagctcgtgcacatgctgaacgagcttttcggcaagtttgaccaaattgcgaaggagaatgaatgcatgagaattaaaatactcggtgattgctattattgcgtcagcggactgcctattagccttcctaatcacgccaaaaactgcgttaagatggggctggacatgtgcgaagccatcaagaaggtgcgggatgctacgggcgttgatatcaatatgcgcgttggggtacactcggggaacgtcctttgtggtgtgatcgggctacagaagtggcagtatgatgtttggtcccatgacgtcaccctggcaaatcatatggaagctggtggggtgcctggacgcgtacacattagcagcgtcaccctggaacacctgaatggagcttataaagtcgaggaaggagatggagacatccgagatccatacctcaaacagcacctggtgaagacctattttgtcattaatccgaaaggagaacgaaggtcgcctcagcatttatttagacctcgacataccctcgatggggctaaaatgcgggccagtgtccgaatgaccaggtacctcgagtcttggggcgcagcaaaaccattcgctcacctacatcaccgggatagcatgactacggaaaatgggaagatctcgaccactgacgtgcctatgggccagcacaattttcagaaccgtactttgcggaccaagagccaaaagaagaggttcgaggaagagctaaacgagaggatgatccaagccatcgatggaataaacgcccaaaaacagtggctcaaatcagaggacattcagcggatctctctgctgttttacaataaggtcctggagaaggaataccgcgcaacagcactccccgcttttaagtactacgttacttgtgcctgccttatctttttttgtatcttcatcgtgcaaatcctagtgctgcctaagacttccgtgttaggcatttcctttggcgcagcttttttactccttgcctttatcctctttgtatgcttcgccgggcagcttcttcagtgctcgaaaaaggcctcccctttgctcatgtggttgcttaaatccagcggcattattgccaatcgtccttggccaagaatttcattgactataataactacagctatcatcctgatgatggcagtgtttaacatgttttttctgtcagacagtgaagaaacaatcccacctaccgctaatactaccaacacgtcgttctccgccagtaataatcaggtggcaattcttcgagctcagaacctctttttcctgccttattttatttatagttgtattctcgggcttatatcttgtagtgtcttcctgcgggtcaattacgaattgaaaatgctgattatgatggtcgctctggttgggtataacacaatcctattgcacacccacgcccacgtacttggcgactactctcaggttctatttgaacgtcccggtatctggaaggatctcaaaacaatgggttcggtctccctgagtatctttttcattaccttgctcgtgctaggccgccagaacgagtattactgtcgccttgatttcctttggaagaataagttcaagaaggagcgggaggagatcgaaactatggaaaaccttaatagggtgctgctggaaaacgtgcttccagcacacgttgctgagcattttctggctagaagcctgaaaaacgaggaactctaccatcagtcttatgattgcgtgtgtgtgatgttcgcatctatcccagattttaaggaattttacaccgaaagtgatgtcaataaggagggcctggagtgtttaagactgctcaatgaaatcatcgctgatttcgacgacctcctgagcaaacccaagttcagcggggtcgagaagatcaaaaccattggatcaacctacatggcggcaactggactctccgcagtaccgtcacaagagcattcccaagagcctgagcgacaatatatgcatatcggcaccatggtagaattcgccttcgcactggttgggaagcttgacgccattaacaagcacagtttcaacgacttcaagctgagggtaggcattaaccatggcccagtgatagcaggggtaatcggagcacaaaagccgcaatatgacatttggggaaacacggtgaacgtagcctccaggatggacagcacgggcgtcctggataagatccaagtgactgaagaaaccagcctagttctgcagaccctcggatatacctgcacttgccgagggatcataaatgtgaagggcaagggggacctcaaaacttacttcgtgaacaccgaaatgagcaggagcctgagccagagcaacgtcgcctcctag

SEQ ID NO: 178278 - DNA, 2775 bp, synthetic construct
  misc_feature 1..2775: note = Description of Artificial Sequence: Synthetic coding sequence
  source 1..2775: mol_type = other DNA
atgctgcccttcaacatgcgggacgccatcatcgccagcgtgctgacatcatcctcccacactatcgtattgtccgtttgcctctcagccactcccggggggaaagagcacctggtgtggcagatactggcgaacgttattatcttcatttgtgggaacctggccggcgcttatcacaagcatctgatggaactggccctgcagcagacctaccaggacacctgtaactgcatcaaaagccgaattaagctggagttcgagaagcgccaacaggaaaggctcctactcagcctgttgccagcccacattgcaatggaaatgaaggccgagatcattcaacgcctacagggaccaaaagccgggcagatggaaaacaccaataacttccacaacctgtacgtcaagcggcacactaatgtttctatactttacgctgatattgttggctttactcgactggctagcgattgctcaccaggggagttggtgcacatgctgaatgaactctttggcaagttcgatcagatcgctaaagagaatgagtgcatgagaataaagatcctcggagattgctattattgcgtctctgggctccccataagtctgcctaatcatgctaaaaattgtgtcaagatgggtctcgacatgtgcgaggccatcaaaaaggtgagggatgctacaggagtggatattaatatgcgtgttggagtccacagcggaaatgtactatgtggcgtaataggcctgcaaaaatggcagtatgacgtctggtcccatgacgtgaccctcgctaaccatatggaggcagggggcgtgcctggaagagtacatatttccagcgttactctagagcatctcaacggggcatacaaggtggaggagggcgatggggatattcgtgacccgtatctgaaacagcaccttgtcaaaacatattttgttatcaatcctaaaggtgagagacgcagtccacagcatctcttccgcccccgacacaccctggacggcgctaaaccctttgctcacttgcatcaccgggactctatgacaaccgagaacgggaagatatcaacgacagacgtacccatggggcaacataatttccagaataggactctgaggactaaatcccaaaaaaaaaggtttgaggaggaattaaacgagaggatgatccaggccatcgatggaataaatgctcaaaaacaatggctgaaatccgaggacattcagagaataagcctgctcttctacaacaaggtcctagagaaggagtaccgggccactgcgttgccagccttcaagtattacgtgacatgcgcctgcctgatattcttttgtatctttattgtccaaattctcgttctgcccaagacaagcgttctgggaatctcctttggcgccgcatttctgctcttagcctttattctgttcgtgtgttttgccggccagttgctgcagtgcagcaagaaagcctctcccctcctcatgtggttattaaaatcatcaggaattattgctaatcgcccgtggccccggatttctctgaccatcatcacgacagctataatcctgatgatggctgtttttaacatgttcttcctgtccgattctgaagaaaccatcccccccactgctaacacaacaaacacctcgttcagtgccagtaataatcaggtggccatactgcgcgcacagaacctgttcttcctcccatattttatttatagctgtattcttggcttaatttcctgctcggtctttctccgcgtgaactacgagctgaagatgttgatcatgatggtggcgctcgtgggatacaatacaatactactccatacgcacgctcacgtcctgggggactacagtcaggtgttattcgagcgacctggaatctggaaggatctgaagacaatggggtcagtatcactgtccatcttttttatcacgctgctcgtgctgggaaggcagaacgaatactattgtcgcttggactttctttggaagaataaattcaaaaaggagcgtgaagaaattgagacaatggaaaacttaaatagggtcctgttggagaacgtgctgccagctcatgtcgccgagcatttcctcgctcggtctctcaagaacgaagaactgtaccaccagtcctacgattgcgtgtgtgttatgttcgcctctattcctgatttcaaggagttttacacggaatccgacgtcaataaggagggattggagtgcttgagactgcttaatgagattatagccgattttgacgacctgctctcaaaacctaagttttccggtgtggagaagatcaagactatcggtagcacatatatggcggcgacgggcctgtccgctgtgccgtcacaggagcacagccaggagcccgagcgacaatacatgcatattgggactatggtagagtttgccttcgctctagtgggtaagctggacgccatcaacaagcattcctttaacgatttcaagctgagggtcggtatcaatcatggacccgtgattgctggcgtaatcggcgcccagaaacctcaatacgacatatggggaaacacagtgaatgtggcgtcgcgaatggactccaccggagtgctcgacaaaatacaggtgaccgaagaaacatcgctggtacttcaaacccttggctacacttgtacttgccgggggatcataaacgtcaagggcaaaggggatctgaagacctactttgtgaatactgaaatgagtagatctctgtcgcaatctaacgttgcatcatag

SEQ ID NO: 178279 - DNA, 3435 bp, synthetic construct
  misc_feature 1..3435: note = Description of Artificial Sequence: Synthetic coding sequence
  source 1..3435: mol_type = other DNA
atgccccggaaccagggcttcagcgagcccgagtacagcgccgagtactcagccgaatattcagtctccttaccttcagatccagataggggcgtgggccggactcacgaaatcagcgtgaggaactcagggagctgcctgtgcctgccaaggttcatgagattgacattcgtccctgaatcactggagaacttgtaccaaacttattttaagcggcagcgccatgagacgctcctggtcttagtcgtcttcgccgcactctttgattgttatgttgtggtgatgtgcgcggttgtcttttccagcgataaactggcctccctggccgtggcggggattggtttagtcctcgacatcattctttttgtcctatgcaaaaaggggctactcccagaccgcgtcacacgccgcgtacttccatatgtcttatggctgctgattacagcgcagatattttcttacctgggtctcaatttcgctagggcgcatgctgcgtcagacactgtggggtggcaggtcttcttcgtctttagcttcttcatcacactgccactttctctgtcaccgatcgtcatcatcagcgtggtcagttgcgtggtgcatacgctggtgctgggcgtgaccgtggctcaacagcagcaggaggaattgaagggcatgcagctactgcgcgagatactggccaacgtattcctgtacctgtgtgccatagcagtcgggatcatgtcatattacatggcagaccggaagcaccggaaggccttcctggaggcacggcagagtttggaagtgaaaatgaacctggaggaacagagccagcaacaggagaatctgatgctctccatactgccaaagcacgtggctgatgaaatgcttaaggacatgaagaaggatgagagccagaaggatcagcagcagttcaatactatgtatatgtatcggcacgaaaatgtgtccatattgtttgctgatatcgttggctttactcagctgagcagtgcctgttctgctcaggaattggtgaaactcctcaacgagttgttcgctcgcttcgataaactggccgctaaataccatcagctgcgtattaaaatcttgggagattgttactactgtatttgcggtctgcccgattaccgggaggatcatgcagtgtgttccattctcatggggctggctatggtggaggccataagctatgtgcgggaaaagacaaaaacaggggtggatatgagggtgggggtgcacaccggcactgtcttgggaggcgtgctgggccagaagcggtggcaatacgatgtctggagtacagacgtgaccgtcgccaacaaaatggaagcaggaggtatcccaggcagggtgcatatcagccagtcaaccatggactgccttaagggagaattcgatgtagagcctggggacggaggatcacggtgcgactacctcgaagagaaaggtattgaaacttacctgatcatcgcatcaaaaccagaagtaaaaaagaccgcaacccagaacgggttaaacgggagcgctcttcccaatggagcacctgcgagcagcaaaagcagctctcccgcgctgatcgaaacaaaggaacccaacggatcagcccacagcagcggaagcactagtgaaaagccagaggaacaggacgctcaggctgataacccaagcttcccaaacccccggagacgcctgaggttgcaagatcttgcagacagggttgtggacgcctctgaggatgagcacgaactgaaccaactcctcaacgaagccctgcttgaaagggagagcgcccaagttgtgaagaaacgaaacaccttcctcctgagtatgcgctttatggaccctgaaatggagaccaggtatagcgttgaaaaggagaagcaaagtggcgcagcattctcctgtagctgtgttgtcctactgtgtaccgctttagtggagattttgatcgacccatggttgatgacgaattacgtgacctttatggtgggggagatcctgctcctgatacttacaatctgtagcctagctgctatttttccccgtgccttccccaaaaagttagttgcctttagtacatggatcgaccgtaccagatgggctcggaacacttgggctatgctcgccatctttattctggtgatggctaacgtcgtcgacatgctgtcttgtctgcagtactatacggggccttccaatgctaccgcagggatggagacagaaggatcttgtctggagaacccaaagtattacaattacgtggctgtgctgtctctcattgctacgattatgctggtccaagtttcacacatggtaaagctcacgttgatgctgctcgtggccggagcagtggctacaattaatctttacgcatggaggccagtgttcgacgagtatgatcataagcgattcagagaacacgatttgccaatggtagccctagagcagatgcaaggctttaatcccggtctgaacggcactgatagattgccgttggtgccatcaaaatactccatgactgtgatggttttcctgatgatgctatcgttttactatttctctcggcacgttgaaaaacttgcgcgaactctgttcctatggaagatagaagtacatgaccagaaagaacgggtgtatgaaatgcgtcgttggaatgaagcgctcgttaccaacatgctgccagagcacgtcgcccgccacttcttagggtcaaaaaagcgggatgaggagctctatagccagacttatgacgaaatcggggtcatgttcgcctccctgcccaacttcgctgacttttataccgaggagtcaatcaacaatggcggtatcgagtgcctcaggtttctcaacgagatcatctctgacttcgacagcctactggacaatccaaaattcagggtgatcacaaagatcaaaaccataggctctacctatatggccgctagcggcgttactccggatgttaacacgaacggtttcgcttcatcaaacaaagaggataagtctgaaagagaacggtggcaacacttggccgacctcgcggacttcgctcttgctatgaaggataccctgactaacattaataaccagtctttcaacaatttcatgttgcggattggaatgaataagggtggtgtcttagccggggtgattggggcgagaaagccgcactatgacatttgggggaacaccgtgaacgtggcaagccggatggagagcaccggggtaatggggaacatccaggtggtagaggagactcaagttatcctgcgcgaatacggcttcagattcgttcgtcggggtcccatcttcgtcaaagggaaaggcgaactgttgaccttcttccttaagggtagagataagctggcaacattccctaatggaccatcagtgacactgcctcaccaggtcgttgataattcatag

SEQ ID NO: 178280 - DNA, 3360 bp, synthetic construct
  misc_feature 1..3360: note = Description of Artificial Sequence: Synthetic coding sequence
  source 1..3360: mol_type = other DNA
atgccccggaaccagggcttcagcgagcccgagtacagcgccgagtactcagctgagtattcagtgtccctgccgaggtttatgcgtctgacgttcgttcccgagtcgcttgagaacttgtaccagacatatttcaagagacagagacatgagacgctgctggttttggtcgtatttgctgcgctgttcgattgttacgtggtcgtgatgtgtgccgtcgtgttttcaagcgataaactcgcaagccttgcggtggcagggatcggtctagtgctggacatcattctcttcgtgctgtgtaaaaagggcctgttgcctgatagggtcacaagacgtgttctaccctatgtcctctggcttctcatcaccgctcagattttcagctatctgggtttgaatttcgctagggcccacgcggcttcggacaccgtggggtggcaggtttttttcgtgttctcattttttatcacattgcctttgagcctcagtccaattgtgatcatctccgttgtgagttgcgttgtgcatactctggtactgggggtgaccgttgcacagcagcaacaggaggagctgaagggcatgcagctgctccgggagatcctagcaaacgtcttcctctacctttgcgctatcgccgtcggcatcatgtcatactatatggccgatcggaagcaccgcaaggcctttctggaggcgaggcaatcccttgaagtgaagatgaacctggaagaacaaagtcagcagcaggaaaatctaatgctctctatcctgccaaaacacgtcgccgacgagatgctgaaggatatgaagaaagacgagagccaaaaggatcagcaacagtttaatacgatgtacatgtaccggcacgaaaacgtgtccatcttgtttgcagatatcgtaggatttacccagctcagctccgcatgttctgcacaggagctagtcaagctgctgaatgaactgttcgctcggtttgacaagctggccgcgaaataccaccagcttcgcattaaaatattgggcgactgctactattgcatctgcggcctgcctgactatcgcgaggatcatgccgtgtgctcgatactgatgggcctcgcaatggtggaagccatctcttacgttcgggaaaagacaaagaccggcgtcgatatgagagttggggtgcataccggaacagtgctcggcggggtcctgggccagaaacggtggcaatacgatgtttggtcaacagacgtgactgtggccaacaagatggaggccggaggtataccgggtagggtccacataagtcagtctaccatggattgtctgaagggcgaattcgacgtggaacccggggacggaggtagccgctgtgactacttggaggagaagggaatcgagacctacttgataatcgcgagtaaacctgaggtcaaaaaaactgcaacacagaacggcttgaacgggagcgctctgcctaatggtgcgcctgcatctagcaaaagtagctctccagcattgatagagactaaggagccgaacgggtctgctcacagtagtggatcaacctccgaaaaacccgaggagcaggacgcccaggcggacaaccccagttttccaaatccccgccggagactcagactccaagacctcgctgatcgcgtcgtggatgcctctgaggacgagcatgaactgaatcagttactgaacgaagcactgcttgagcgcgaatcagcccaggtggtcaagaagcgaaacaccttcctcttgtccatgagattcatggaccccgagatggaaacacgatattcagtggagaaggagaagcagagcggggcagctttctcatgttcctgcgtggtgctactctgtaccgctctcgtggaaatattgattgatccctggctgatgactaactacgtaacctttatggtaggcgagattctgctccttattctgaccatctgctcactcgcagccatcttcccaagagcatttcccaagaagctggtggctttcagcacctggatcgatcgcacacgttgggcccggaatacatgggccatgctggccatatttatcctggtaatggccaacgtcgtggatatgctgagttgcctgcagtactataccggcccatcgaacgctactgccggtatggagacggaggggagttgccttgagaacccaaaatactacaattacgtagcagtcctttccctgatagcaacaattatgctggtgcaggtgtctcacatggtgaagttgacacttatgctgcttgttgccggagctgtggcaactattaatctctacgcttggcgtcccgtctttgacgagtacgatcataaaaggttccgagaacatgacctacccatggtggctttggaacaaatgcaaggatttaacccagggctgaatggaaccgatcgcctacctcttgtgccctctaaatattctatgaccgtgatggtgttcttgatgatgctgtccttttattatttttccaggcacgtggaaaaactggctcggaccctctttctgtggaaaatcgaagtccacgaccagaaagagcgagtatacgagatgcgacggtggaatgaggccctggttacaaatatgcttccggagcatgttgcccgacactttctgggttcaaaaaagcgggatgaagaactttacagccaaacctacgatgagataggggtcatgttcgccagtctgcctaatttcgcagatttttacaccgaggagtccatcaacaatggcggtatcgaatgcctgaggtttctgaatgaaataatttcagactttgatagtctgctggataatcctaagttccgggttatcacaaagattaaaactattgggagcacctatatggcagcaagcggcgttacaccggacgtcaatactaatggtttcgccagcagcaataaggaagataagagcgagcgggagagatggcaacacctggcggacctcgcggacttcgcgcttgcgatgaaggacacactgacaaacattaacaatcagagtttcaataattttatgctgagaataggaatgaacaaggggggggttctcgcaggagtcatcggagctagaaagccgcattacgatatctggggaaataccgtgaatgtggctagccgcatggaaagcacaggggtcatgggtaacatccaggttgtggaggagacgcaggtcatccttagagagtatggattccgttttgtaaggcgtggccccatatttgtgaagggcaagggggagttgcttacgtttttcttgaaaggcagagacaagctcgcaaccttccctaacggcccttctgtcacattgccacaccaagtggtggataactcttag

SEQ ID NO: 178281 - DNA, 339 bp, synthetic construct
  misc_feature 1..339: note = Description of Artificial Sequence: Synthetic coding sequence
  source 1..339: mol_type = other DNA
atgccccggaaccagggcttcagcgagcccgagtacagcgccgagtattctgccgagtattccgtcagcctgccatccgatccagatagaggcgtgggtcggacgcatgaaatttcagttaggaattccggctcttgcctctgtctgcctcgctttatgcgcctaacgtttgtcccggaatctctagagaacctctaccaaacatattttaagcgccagagacacgagaccctgctggtgctcgtagttttcgccgctctgtttgattgttatgtagttgtgatgtgtgccgtggtcttctctagcgacaagctcgcaagtctcgcagttgcaggatag

SEQ ID NO: 178282 - DNA, 3234 bp, synthetic construct
  misc_feature 1..3234: note = Description of Artificial Sequence: Synthetic coding sequence
  source 1..3234: mol_type = other DNA
atggcccggctgttcagcccccggcccccccccagcgaggacctgttttatgaaacctactactcactgtctcagcagtacccactactgcttctgttgcttggaatagtgttatgtgcacttgcggccctcctcgctgttgcctgggcgagcggacgagaactaaccagcgacccaagcttcttgacgaccgtgctgtgcgcccttggcggcttcagcctgctgctaggactggcaagccgggaacagaggcttcaacgttggaccagacctttaagtggactcgtgtgggtagctcttctggcattgggccacgccttcctgtttacaggaggagtggttagcgcgtgggatcaggttagctactttctctttgtgatattcacggcttatgcaatgctcccattggggatgcgagacgccgccgtcgctgggcttgcgtctagcttgtctcacctgctcgtgctgggcctctatttgggcccccaaccagatagccggccggccctcctgccacaactggcggccaatgctgtactatttctgtgtggtaacgtagctggcgtgtatcataaggctctgatggaacgggctctgcgcgcaacctttagagaagctctgtcctctctgcactctagacgaagactggacactgaaaagaaacaccaggagcatctgctcctgtcaattcttcccgcttacttggctagagaaatgaaggccgaaataatggcacggcttcaggccgggcagggctctcgcccagagagtactaataattttcattctttgtatgtgaaacgccaccagggagtgtcagtcctctatgctgacatcgtcggcttcaccagactggctagcgaatgttctccaaaggaactcgttctgatgctgaacgagctgttcggaaagtttgaccagatagcaaaagaacacgagtgcatgcgcattaaaatactcggcgattgttactactgcgtgtccggcctcccccttagcctgccagatcacgccattaattgcgtgaggatgggactggatatgtgcagggctatccgaaagctgagggctgcgacgggggtcgatataaacatgcgcgtgggggtccactctgggtctgtgttgtgcggggtgattggcctgcaaaaatggcaatacgatgtctggtcccacgatgttaccctcgcaaatcacatggaagccggtggcgtaccaggccgagtgcacataaccggcgctacattagcactgctggccggcgcttacgcagtcgaggacgcgggcatggaacatcgcgacccatacttacgcgagctgggagaacccacctatttggttatcgatcccagggctgaagaggaggatgagaaaggaaccgccgggggccttctatcatctctggagggactgaagatgcgcccatcactgctgatgacccgttacctggaaagttggggcgcggccaagccctttgcgcatctctctcatggcgactcgccagtgtcaacatccacaccactacctgaaaagaccttagctagtttctctacccaatggtcactggaccgtagcagaacacctcgaggcctagacgacgagctcgacactggagacgccaaatttttccaagtcatcgaacagctgaactcccagaaacagtggaagcaatcgaaagacttcaacccccttactctgtacttcagagagaaagaaatggagaaggagtacagattatcagccattcccgcttttaaatactatgaagcatgcacattcctggtctttttatccaattttattatccaaatgctggtgactaatagacctcctgctctggccataacctacagtatcacttttctgctgtttttactcattctatttgtctgttttagcgaagatctcatgcggtgtgtgctgaaaggccctaagatgctccactggctgccagcattgtcgggcctggtagcgactagacccggtctaagaattgctcttggcaccgcaaccatcctgttggtcttcgcaatggccatcacttcactcttttttttcccgacgagctccgactgcccctttcaggcccccaatgtgagctccatgattagcaacctgtcttgggaactccccggctcccttcctctgatctccgtgccttactccatgcattgctgcacactggggttcttatcctgttccctctttctccacatgtctttcgaacttaaactgcttctcttgttgctctggctcgcagcttcctgttcactgttcctgcatagccacgcttggctcagcgagtgtcttatagttaggttgtacctcggacctctggacagtagacccggagtgctgaaggaacctaagctgatgggggccatctcctttttcattttctttttcaccctgctggttctcgcacggcagaatgaatattactgcagactggactttttgtggaagaagaaactgcgccaggagagagaagagaccgagactatggaaaatctgactcgtctcctcctcgaaaatgtgctgcccgctcacgtggctccacagttcataggacagaataggagaaacgaggacctgtatcaccagtcatatgagtgcgtgtgtgtccttttcgcctcggtccccgatttcaaggagttttactcagagtctaacatcaatcacgaaggtctcgagtgtctacgcctgctgaatgaaatcatcgctgatttcgatgagttgttgtcgaagcctaaattttctggcgtcgaaaagatcaagacaatcggaagcacttatatggccgcaactggtttgaacgccacctctggccaggatgcacagcaggacgcagagagatcttgtagccatctggggacgatggttgagtttgcggtcgcgctgggctccaaactcgacgtgattaataaacattcatttaataacttccggctgcgagtcggtctcaaccatggccctgttgttgctggagttatcggagcccagaaaccccagtatgacatttgggggaatacagtgaacgtagcatcaaggatggagagtaccggtgtccttggtaagattcaggtaacggaggagacagcctgggcactgcagtctctcggctacacatgttattcccgtggggttataaaggtgaaaggtaagggccagctttgcacttactttttgaacacggaccttacacggacaggcccaccatccgctactttgggatag

SEQ ID NO: 178283 - DNA, 1260 bp, synthetic construct
  misc_feature 1..1260: note = Description of Artificial Sequence: Synthetic coding sequence
  source 1..1260: mol_type = other DNA
atgagccggggcacccgggagagcgcctgctgcatgctgaccagctgggccagccgtggctggccagccagtgtccctctccggagttggtgttcatgtagcatgtctagcctggccagttctacccggctcccccgcaagctgagggccgccacaggcgtcgacatcaacatgcgcgtaggagtgcactccggatctgtcttatgcggtgtgattggcctgcaaaaatggcaatatgacgtgtggtcacacgacgtgacactggccaatcatatggaggcgggaggagtgccaggaagagtacacatcaccggggccaccctggccttgttggctggagcttatgcagtagaggatgccggcatggaacacagagacccttaccttagggagttgggcgaacctacttatctggtgatcgatcctcgcgccgaggaagaggatgagaagggaactgcagggggcctgctgtcgtcactcgagggactgaaaatgaggcccagcctgctgatgactagatatttagagagctggggagctgcaaagcctttcgcccatctgagccacggagacagtcctgtgagtacttcaacccccctgcctgaaaaaacactagcttctttctccacccagtggtccttggatcggagtcggacccccagaggtttggacgacgaacttgatacgggtgatgccaaatttttccaggtaattgaacagctcaactctcagaaacagtggaaacaaagtaaggacttcaatccactgactttgtattttcgggagaaggagatggagaaggaatatagactgtctgccatccccgccttcaagtattatgaagcctgcacctttctggtgttcctctcaaacttcattattcaaatgctggtcacaaatagaccaccggcactcgccattacatatagcattaccttcctcctatttctgctcattctctttgtatgctttagcgaagatctaatgagatgtgttctgaaagggcccaagatgctccactggttacccgcactttctggtctagtggccaccaggccaggcctgaggattgctctgggcactgctacaatcctcctggtgttcgctatggcgattaccagcttgttcttcttcccgacatctagcgactgcccgttccaggctccaaatgtctcttcaatgatttctaatctcagctgggagctgcccggctctctgcctcttataagcgttcccgtgagtgttccaacatgtccgtag

SEQ ID NO: 178284 - DNA, 3234 bp, synthetic construct
  misc_feature 1..3234: note = Description of Artificial Sequence: Synthetic coding sequence
  source 1..3234: mol_type = other DNA
atggcccggctgttcagcccccggcccccccccagcgaggacctgttctatgagacctattattcactcagccaacagtacccactactactcctgctcctgggcatcgtcctatgtgcattagccgcgcttttggccgtcgcttgggcctccggccgcgagttaaccagcgacccctcttttcttacgactgtgctgtgtgctctaggcggctttagcctgctgttaggattagcgtccagagagcagcgcctgcagagatggactcgccccctaagcggcttagtgtgggtcgcgttactcgccttgggccacgcctttctgtttactgggggtgtcgtttctgcgtgggaccaggtgagttattttctgtttgtgatttttactgcctacgctatgctacctttgggtatgcgcgatgccgccgtggccgggctggccagcagcctctcccacctcctggttttagggctgtacttaggaccacagcctgatagtcggcctgcgctcctcccgcagctggcagccaatgccgtgctgtttttgtgtggtaacgtggcgggcgtttaccacaaggccttgatggagcgcgcgttgagggcgacctttcgcgaggccttgtcctcgctacatagcaggcgccggctagatacagaaaagaagcatcaagaacatcttctcctttccattctgccagcctacctggcaagggagatgaaagcggaaatcatggcccggctgcaggccggccagggctctcgacccgaatccactaataattttcattcactctacgtcaaacgtcaccagggggtttctgtcctctacgcagatatagtcgggttcactcgactcgcatctgagtgctctccaaaagaattagtgctgatgctgaatgagctcttcggcaagttcgatcaaatagcaaaagagcacgagtgcatgcgcattaaaatacttggggactgctactactgtgtgagtgggctccccctcagtctcccagatcacgccattaactgtgtgcggatgggcctggatatgtgcagagcgattcgaaaattgagggccgcgacgggcgtcgatattaatatgcgtgtcggtgtgcattcaggatcagtactgtgcggcgtgatcggattgcagaaatggcagtatgacgtctggtcccacgacgtcactcttgctaatcacatggaggcaggaggggtccctggacgggttcacattactggtgcgaccctggctctgctggcaggtgcctacgccgtcgaggatgctggtatggagcacagggatccctatctgcgggaactcggagaaccgacctatttagtgattgatccacgcgcggaggaggaagacgaaaagggcaccgctggcggactgcttagctcactggagggcttgaagatgagacctagcttgctcatgacaaggtatctggagtcctggggcgccgccaagcctttcgcccatctgtcgcatggagatagccctgtttcgacctccacccctctgccagaaaagaccctggcttctttcagtacgcagtggagccttgatagaagcagaacgcccaggggactggatgacgaactggatactggcgatgctaaatttttccaagtcattgagcagctgaactcccagaagcagtggaaacagtcgaaggactttaaccctctgaccttatacttcagagaaaaagagatggaaaaagaatacagattaagcgcaattcctgcctttaagtactacgaggcctgcaccttcctggtgtttctgagtaatttcattattcagatgctcgttaccaaccgacctcccgcgctcgctatcacttatagcattaccttcctcttatttttgctgatcctgttcgtgtgcttttcggaagacctgatgaggtgtgtgctgaagggccctaaaatgctacactggctgcccgcgctgagcggcctggtggccactcggcctggattaagaatcgcgctcgggaccgcgacaattctgctcgtgtttgcaatggcaatcacatccctcttttttttccctaccagcagcgactgcccgttccaggccccaaacgtgtccagcatgattagcaacctgtcgtgggagttgccagggtccctacctctaatctcagtgccctactcgatgcattgctgtacattggggtttctgagctgtagtctgtttctccatatgtcgttcgagttgaagcttctattattattactgtggctggccgctagctgttctctctttctccactcacacgcctggctgagcgagtgtcttatcgtgcgactgtacctaggccccttagatagccgcccaggagttctcaaggaaccaaaactaatgggcgcaatctctttcttcattttctttttcaccctgcttgtgctggcccggcagaacgagtactactgtcggctagattttctatggaaaaagaaactccgacaggagagagaagagaccgaaaccatggaaaatctcaccaggctgctgctggaaaatgtgctgccagcacatgtggcgccgcagttcatcggacagaataggcggaatgaggacctgtaccaccagagttacgagtgtgtctgcgtactctttgccagcgtccccgactttaaagaattttattccgagtcaaatataaatcatgaaggcctggagtgtctccgactgctcaatgaaatcattgccgacttcgacgaacttctgagtaagcctaaattcagcggggtcgagaagatcaaaaccatcggctccacctacatggccgcaaccggccttaacgcaacgagcggacaggatgcccagcaggacgccgagaggagttgcagccacctcggcaccatggttgagttcgcggtggcactggggagtaaactcgacgtgataaataaacactcctttaacaattttaggctgcgggtcggacttaatcacggcccagtcgtcgctggagtgataggggctcagaagccacagtatgatatttggggaaacactgtgaacgtggcatcgcgcatggagtctaccggagttttgggaaagattcaggtgacagaggagaccgcctgggcactgcagagtctggggtacacctgttacagccgtggggtcatcaaggtgaagggcaaagggcaactttgtacctattttctgaacaccgatctgaccagaaccggcccaccaagcgccaccctgggctag

SEQ ID NO: 178285 - DNA, 3234 bp, synthetic construct
  misc_feature 1..3234: note = Description of Artificial Sequence: Synthetic coding sequence
  source 1..3234: mol_type = other DNA
atggcccggctgttcagcccccggcccccccccagcgaggacctgttctacgaaacatattatagtctgagtcagcagtatcccttgctgctgctgctgctgggcattgtgctgtgcgctctggctgcattgctggccgtggcatgggcgtccgggagagaattgacatccgatccatccttcctgacaactgtgctgtgcgcgttaggcggcttttctctgctgctggggttagccagtagggaacagcggctgcagagatggacccggccattgtccggcctggtgtgggtcgcccttttggcacttggacacgcttttctcttcaccggaggcgttgtgtccgcttgggatcaggtttcttatttcctttttgtgatctttacagcctacgccatgctgccccttggaatgcgggatgcagctgttgccgggctggcaagcagcttgtctcatctgttagtccttggcctctacctcggtcctcagccagattctcggcccgccctgctgccccagcttgctgctaatgccgtcctctttctgtgtggcaatgtggccggagtgtaccacaaggcactgatggagcgagccctgagagccacattcagagaggccttgagcagtctccattcacgcagaaggctggacaccgaaaagaagcaccaggaacacttgctcctgtcgatcctgcccgcctatctggcccgggagatgaaggcagagatcatggcccgactgcaggccgggcagggcagcaggccagagtcaaccaacaattttcactcactctacgtaaagaggcatcagggcgtgtctgtcctctacgcggacatagtcggctttacacgccttgcctctgagtgttcccctaaggagctcgtgctcatgctgaatgaactcttcgggaaattcgaccaaatcgctaaggaacatgaatgcatgagaatcaaaatcttgggggattgttactattgcgtgtctgggctgcctctgtccctgccagatcacgcaatcaattgcgtgcgcatgggactcgacatgtgtcgcgccatccgcaagctcagagccgccactggggtcgatatcaatatgcgggtgggggtgcactccggcagtgtcttgtgcggagtgattgggttacagaaatggcagtatgacgtatggtcccacgatgtgaccttggctaatcacatggaggccggcggagtgcccggaagggtgcatattaccggggccacactggccctgctagccggagcctacgcggttgaggacgccggcatggagcaccgagatccctatctgagagagctcggggaaccgacttatttggtgatcgatcctagggcagaggaggaggatgagaagggcacggcaggaggtctccttagctctctggaaggcttgaagatgaggcctagtctcctgatgacacgatacttagagagctggggagctgccaaaccgttcgctcatctgtcacatggtgatagccccgtctccacaagcacacccctgccagaaaagactctggcctcattttcgacccagtggagcctggatagaagtcgtacaccaagaggcctggacgacgaactcgataccggcgatgccaagttcttccaggtcattgaacagctgaactcccaaaaacagtggaagcagagcaaagactttaacccattgacgctctactttcgggaaaaagagatggaaaaagaataccggctgtctgcaatccctgctttcaagtactatgaagcatgcaccttcttggtgttcctgtccaatttcattatccagatgctggtgacgaaccggccaccggcgcttgcaattacatacagtattacatttctacttttcctgttgattctatttgtctgtttctcagaggatctgatgcgctgtgtattaaagggtcccaagatgctgcactggcttcctgcgctgtccggtctggtcgcaacgcgacctggattgaggatcgcgctcgggacagccaccatcctcctcgtctttgccatggcaatcacttctttgttttttttcccaactagttcagactgcccatttcaggcaccaaacgtgagtagtatgatcagcaacctgtcttgggagctacctggcagtctaccacttatcagtgtgccctacagcatgcattgctgtacccttggattcctatcatgttcactttttctccacatgtcatttgagctgaagctgctgcttctcctcctttggttggccgcatcctgctctttgttcctgcactcacacgcctggctttcagagtgtctgattgtcaggctgtacttggggccactggattcacgccctggcgtgctgaaggaaccaaaactgatgggcgcaatctctttctttatcttctttttcacactgctggtgctggcccgccagaacgaatactactgccgcctagattttctttggaagaaaaagctgcgccaagagcgcgaagaaaccgaaactatggaaaatctgaccaggttactgctagaaaacgttcttccagcgcacgtggccccacagttcatcgggcagaaccgacgtaatgaggacctgtaccaccagagctacgaatgcgtttgcgttctgttcgccagcgttccagattttaaagagttttactcagaaagtaatattaatcacgaaggcctcgaatgcttgagactgctgaacgagatcattgccgatttcgatgagcttctgagtaagccaaaatttagcggtgtggagaagataaaaacgattggcagcacgtacatggccgctaccggcctcaacgcaacgagcgggcaggatgcccagcaggacgctgagagatcttgcagtcacctgggaacgatggtggaattcgcagtcgcgttgggctccaagcttgatgttatcaataagcacagtttcaataattttcgcctgagggtgggacttaatcacggcccagtggtcgcaggggtgatcggcgcgcaaaaacctcagtacgacatctggggcaacacagtgaacgtggcaagtcggatggaatcaactggggtgcttggtaagattcaagtgacagaagagaccgcctgggcacttcagtcgcttggctacacctgttatagccgcggggtcatcaaagttaagggcaagggccagttgtgcacgtatttcctcaataccgacctgactagaactggaccgcccagcgcaactctgggctag

SEQ ID NO: 178286 - DNA, 348 bp, synthetic construct
  misc_feature 1..348: note = Description of Artificial Sequence: Synthetic coding sequence
  source 1..348: mol_type = other DNA
atggcccggctgttcagcccccggcccccccccagcgaggacctgttctacgagacctattatagcttgtcccagcaataccctttgctactcctgctgctggggattgttctgtgcgcactggccgccttgcttgcagtggcatgggcctccggaagggagctaactagcgaccctagttttctgactaccgtgctgtgtgcccttggggggtttagcttgttgctcggcctcgcgtcccgggaacaaaggctgcagagatggaccaggcccctgtccgggttagtgtgggtggcccttctggctcttggccacgcctttctctttacaggaggcgttgtatcttag

SEQ ID NO: 178287 - DNA, 2736 bp, synthetic construct
  misc_feature 1..2736: note = Description of Artificial Sequence: Synthetic coding sequence
  source 1..2736: mol_type = other DNA
atgaagagccagaaggagggctgctgcagccggggcgacctgagcattcaaaccggcccaggaggggagtgggctcctagacgacttgtcagcaacgtgctgatttttagctgcactaatatagtcggggtgtgcacccattaccctgcagaagtctcacagcggcaagcgttccaggagaccagagagtgtattcaagccaggctgcacagccagagagaaaaccaacaacaggaacggcttctactgtccgtgttgcctcgccacgtggctatggaaatgaaagctgatatcaatgccaaacaagaagatatgatgtttcacaaaatctacatccagaagcacgacaacgtgtcaattcttttcgcagacatcgaggggttcacttccttggcatctcaatgcactgcccaggagctcgtgatgacgttaaatgagctgttcgccaggttcgataagctcgctgctgagaatcattgccttaggattaagatcttgggagactgctactactgtgtctcaggccttccagaagctagggcggatcacgcccattgctgtgtggagatgggcatggacatgattgaggccatttctttggtgcgggaggtgaccggcgtgaacgtgaatatgcgggtgggaatacacagtggacgcgtccactgcggagtactcgggttgagaaagtggcaattcgatgtctggtccaacgacgtgactctcgctaaccacatggaagcgggaggaaaggctggacgcatccacatcactaaggcaactttgaactacctcaatggagactacgaggtcgaacctggatgcgggggtgaacgaaacgcttatctgaaggaacattcaatcgaaaccttcctgattctgcgctgcactcagaaacggaaggaggagaaagcgatgatagccaaaatgaaccgtcaaagaaccaattccatcggacataacccccctcattggggagccgagagacctttctacaaccatctagggggaaatcaggtgagcaaggagatgaagcgcatgggctttgaggatcccaaagacaaaaacgctcaggaatctgcaaacccggaagacgaggtggatgaatttctcggtagggccattgacgctaggtctatagacagactgagaagcgaacatgtgaggaaattcctcctaactttcagagaacccgatctggaaaagaagtacagtaagcaggtcgacgaccggtttggcgcttatgtggcatgcgctagtctggtcttcctgttcatatgtttcgtccagattacaatcgtgcctcacagcatcttcatgctctctttctatttgacttgttcattattattaaccctcgttgtgtttgtttcagtcatctactcctgtgtaaaactgtttccttccccactccagaccctgagccgtaagattgtgcgatccaagatgaacagcaccctcgtaggggtgtttaccataacactcgtcttcctggcagctttcgtgaatatgtttacctgcaacagtagagatctacttggatgcctggcccaggaacacaatattagcgcctcccaggtgaacgcgtgtcatgttgcagaaagcgccgtgaattactccctcggagatgaacagggcttttgcggcagcccttggcctaattgtaacttcccagaatacttcacctactccgttctgctcagtttactcgcctgttctgtgtttttacaaatctcctgtatcgggaaacttgtgctaatgctggctatcgagctgatctatgtactgatcgttgaggtgccaggcgttacgctctttgataacgcggacctgctggtcaccgctaacgccattgatttcttcaataatggtacatcccagtgtcccgagcacgcaaccaaggtggcgctcaaggtagtgacccccatcattatctctgtgtttgtgctcgccctctacctgcacgcacagcaggtggaatctaccgcaagacttgacttcctgtggaaactgcaagcaaccgaagagaaggaggagatggaagaactgcaggcatataatcggcgactcctccacaacatcctccctaaagatgtggctgcccactttttggctcgcgagcgaagaaacgatgagctgtactaccagtcctgcgagtgtgtggcagtgatgttcgcatcaattgctaatttcagtgaattctacgttgaactggaggctaataatgagggagtggaatgcttgcgactattaaatgaaattatagcggacttcgacgaaatcatttccgaggacaggttccgccagctcgagaaaattaagaccatcggctccacatatatggccgccagcggattgaacgactccacatacgacaaggttgggaagacacacattaaagcattagcagattttgcaatgaaattgatggatcaaatgaagtatataaatgagcactcatttaacaattttcaaatgaagattggcctgaacatcggccctgtggtcgctggcgtaataggggctcgcaaacctcagtacgatatttgggggaacacagtcaacgtggcgtctcggatggacagtacaggcgtgcctgaccgaattcaggtaacaacagatatgtaccaagtgctcgcagcaaatacatatcagctggagtgccgcggggtggtaaaagtgaagggcaaaggcgaaatgatgacctatttcctcaacgggggccctccactgagctag

SEQ ID NO: 178288 - DNA, 3786 bp, synthetic construct
  misc_feature 1..3786: note = Description of Artificial Sequence: Synthetic coding sequence
  source 1..3786: mol_type = other DNA
atgagcggcagcaagagcgtgagcccccccggctacgccgcccagaagaccgccgcacccgcgccgcgggggggccccgaacaccggtctgcatggggtgaagctgattcacgagcaaacgggtacccccacgcaccaggtggctccgcccggggctcgacaaagaagccgggtggagccgtgaccccacagcagcagcagaggctcgcaagtcgatggagatccgatgacgatgacgacccaccactgtctggcgacgacccactcgccgggggctttggattctcttttaggagtaagtctgcttggcaggagagaggcggggatgactgcggaaggggctcccgaaggcagcgtaggggagcagcaagcggcggatccaccagggccccacctgccgggggaggcgggggttctgctgccgcagctgcgtctgctggaggaaccgaggttaggccccgctcagtcgaggtcggcttagaagaaaggcggggcaagggacgcgctgcagatgagctggaggccggagcagtagaaggaggtgagggaagcggcgacgggggcagttccgccgatagcggttccggagcgggccccggtgccgtgttgtcgctgggagcatgctgcctggctttactccagatcttcagatcaaagaaatttcccagtgataagctggagagattgtatcaaaggtattttttccgattgaaccagtctagtttgaccatgctcatggccgtgctagtgctcgtgtgcctagtcatgttggcattccacgccgcaaggccgccattacagttgccctacttagccgtgctcgcggcggccgtcggcgtgattctgataatggcagtgctgtgtaatcgagcagccttccaccaagaccatatgggactggcttgctatgctctgatcgctgtggtactggccgtccaggtcgtgggccttctcctgccacagcctaggagcgcttcagagggcatctggtggacagttttctttatctacactatctacaccctgctgccagttaggatgcgggccgcagtgctgtccggtgtgctgctgtccgcactgcacctcgccattgccctcagaactaatgcccaggatcaatttttgttaaagcagttggtttccaacgtactgattttcagctgcaccaatattgtgggggtgtgtactcattacccagctgaggtatcacaacgtcaggccttccaagagacccgagagtgcatccaggctcgattgcactcccagagagagaaccagcaacaggagcggctgttgctcagcgtgctccctcggcatgtggctatggagatgaaagccgacatcaacgccaagcaagaggacatgatgtttcataagatctatatccaaaagcatgataatgtgtcgatcctgttcgctgacattgaaggcttcacatccctcgctagccaatgcacagcccaggagttggtcatgaccctgaacgaactattcgcacggttcgataaacttgccgccgaaaatcattgtttgaggatcaagatcctgggagattgttactactgcgtatctgggcttcccgaggcgcgggccgaccatgcacattgctgcgttgaaatgggaatggatatgattgaggctataagcctggtgcgagaggtgaccggcgtgaacgtcaacatgcgagtggggatccatagtggtcgggtgcattgcggcgtgctgggtttgagaaaatggcagttcgatgtgtggtcaaacgacgtgaccctagccaatcacatggaggctggcggtaaagctgggaggatccacatcaccaaagcgacacttaattacctgaatggggattacgaggtcgaacctggatgtggcggggaacgcaatgcctacctaaaggagcactcaatcgaaacattcctgatcctccgctgtacccagaaaagaaaggaggagaaagccatgatcgcaaaaatgaacagacagcgtactaacagcatcggtcataaccctccgcactggggggctgagcgcccgttctataaccatctgggcggaaatcaagtgtctaaagaaatgaagcgaatgggctttgaggatcccaaggacaaaaatgcccaggagtcagcaaatcccgaagacgaggttgacgagttcttaggaagagccattgacgctagaagcattgaccgcctgaggtctgagcacgtacgcaagttcctcttgacgttcagggagccagatctagagaagaaatattccaaacaagtcgatgatagattcggcgcgtacgtggcctgcgcgtctctggtgttccttttcatttgctttgttcagattaccatcgtaccacattccattttcatgctgtccttctatctgacatgcagtttgctgctgaccctggtcgtctttgtttccgtcatctactcatgcgttaagctatttcctagccccctgcagaccctgtctcgcaagatcgtgcgatcaaagatgaattccaccctggtgggcgtcttcacaattacactggtgttccttgcggcatttgtcaacatgtttacttgcaatagccgcgatcttctggggtgtctggcccaagaacataatatcagcgcctcacaagtcaatgcctgtcatgttgcagagtccgctgttaactacagcctgggcgacgagcagggcttttgtggctctccctggcccaactgcaatttcccagagtacttcacttacagcgtgctgctgtcactactggcgtgcagcgtgttcctgcagattagctgcattggtaaactagtcctgatgttagcaatcgagctgatctacgtgcttatcgtggaggtcccgggcgtgacattgttcgataatgccgacctgctggtgacggctaacgcgatagatttttttaacaatggaacatcccaatgcccagagcatgcaactaaagtggcactaaaagtggtgacgccaattattataagcgtgttcgtgctggcgttatatctgcatgcccaacaggtggagtctactgcgcgcctggattttctgtggaagttacaggcgacagaagaaaaggaagagatggaagagctgcaggcttataataggaggctgctgcacaacatattgccaaaggacgttgccgcccactttctggcccgcgagcgccggaacgacgagctatattaccagtcctgcgagtgtgtagcagttatgttcgccagtattgccaatttcagtgaattctacgtggagttggaggccaataatgagggtgtggaatgcctgagactcctaaacgagatcatcgcagactttgacgaaattatttcggaggaccggttccggcaacttgaaaagatcaagacgataggatcgacctacatggctgctagcggtctgaacgacagcacatatgataaggtcgggaaaacacacattaaagctctagctgatttcgccatgaagctgatggatcagatgaagtacattaacgaacacagcttcaataactttcagatgaaaattggcctgaatatcggccccgtcgtggccggtgtgattggggctcggaagcctcaatatgacatttggggaaacaccgttaacgtggcttctcgcatggattccactggggtccctgataggattcaggtgacaacagatatgtaccaggtactggccgcaaatacctaccaattagagtgtaggggagtcgtaaaggttaaaggaaagggcgaaatgatgacctattttctgaacggaggtccccccctgtcctag

SEQ ID NO: 178289 - DNA, 2760 bp, synthetic construct
  misc_feature 1..2760: note = Description of Artificial Sequence: Synthetic coding sequence
  source 1..2760: mol_type = other DNA
atggcccccagccggttccggacccagctggagctggtgagcaacgtactcatctttagctgcacaaacatcgtcggcgtgtgtacacattaccctgcagaggtttcccagcggcaagcctttcaggagacccgggagtgcattcaggctcgcctgcactctcagcgggagaatcagcagcaagagcgccttctgttatcagtgctgcctcgacacgtggctatggagatgaaggctgacatcaatgccaaacaggaagatatgatgtttcataagatctatatccaaaaacacgataacgtgagcattttgtttgcagacatcgagggtttcacttcacttgcatcgcagtgcaccgctcaggagctcgtgatgacccttaatgagttgttcgcacgatttgataagctggcagcagagaatcattgcctgcggatcaaaatcctaggtgattgctactactgcgttagtggtctgccggaggcccgagccgatcacgcccattgctgcgtggaaatgggcatggacatgattgaagccatatccctggtgagagaggttaccggcgttaacgtaaacatgagagtcggcattcattctggccgggtgcactgtggcgttttgggactgcgtaaatggcagtttgatgtttggagtaatgatgtgacactggccaaccacatggaggcaggtggaaaagctggccggatccatatcactaaagccacgctcaattatttgaacggggattacgaagttgagcccggttgcggcggagagcggaacgcctacctgaaggagcactctattgagacatttcttatactccggtgcactcagaagagaaaagaggaaaaagccatgattgcaaagatgaaccggcagcgaactaatagtatcggtcataacccccctcattggggagccgagcggcccttctacaaccatttaggcggtaaccaggtgagtaaggagatgaaaaggatgggctttgaagacccaaaagataagaatgcacaagagagcgctaatcctgaagacgaagttgacgagttcttggggcgagccattgatgctaggagcatcgacaggctgcgcagtgaacatgtcagaaagttcctgttgacattcagagaaccggacctagaaaaaaaatattctaagcaggtagatgatcgatttggggcatatgtcgcctgcgcctcccttgtgttcctctttatatgcttcgtgcagattacgatcgtgccacatagtatatttatgctgagtttttaccttacctgctccctgctcctcacactggtggtgttcgtgagtgttatctactcatgcgtcaagttattcccctctcctcttcagacactctccaggaagatcgttcgcagcaaaatgaattcaacccttgtgggagtattcactatcacactggtttttcttgctgcattcgtgaacatgtttacctgcaactccagggacctccttgggtgccttgctcaggaacacaatatttcagctagccaagtaaacgcctgccatgtggctgaaagcgccgtgaactattctctaggcgatgaacagggattctgtggttccccttggcccaattgcaattttcctgagtacttcacctatagtgtgctgctgagtctcctggcttgcagcgttttcctgcagatatcatgtattgggaaactcgtactgatgctggccattgaactaatttatgtcctgatagtcgaggtgccgggcgtgaccctgtttgacaacgccgacctgctcgtgactgccaatgccatcgacttcttcaacaatggaacgtcccagtggtccctatgcgaaaacctgcgccacaggcgaatggaagctggtacatacttccctagcggtgtcaaggaacaaagtccagagcacgctaccaaagtggcattgaaagtagtgactcccattattataagtgtgttcgtgttggccctttacctgcacgcccagcaggtagagtcgaccgctagactcgattttttgtggaaactccaggcaactgaagagaaggaagagatggaagaactgcaggcctataaccgaaggttactgcacaacattcttcctaaggatgtggccgcgcatttcctcgcacgggagcgcaggaacgacgagctgtattaccagtcgtgtgagtgcgtagccgtaatgtttgcgagtattgccaatttctcagaattttacgtggagcttgaggcgaataatgaaggggttgagtgccttcgattgttaaatgagatcatagctgattttgatgagattatatcagaagacagatttcgccagctggaaaagataaaaaccatcggctcgacctatatggccgcatctggtctgaacgactcaacctatgataaggtgggcaagacacacatcaaagctctggcggattttgctatgaagctcatggatcagatgaagtatataaacgaacactctttcaacaacttccagatgaaaatcggcttgaatataggcccagtggtcgccggggtgatcggtgctcgcaaacctcagtacgacatctgggggaatacagttaacgtggcgtccaggatggattccacgggggtcccagatcggatacaggtgactactgacatgtatcaggtcctggcagccaacacctaccagctcgagtgcagaggagtggttaaagtgaaaggcaaaggggagatgatgacttactttctcaacggagggccaccactcagttag

SEQ ID NO: 178290 - DNA, 3507 bp, synthetic construct
  misc_feature 1..3507: note = Description of Artificial Sequence: Synthetic coding sequence
  source 1..3507: mol_type = other DNA
atgagctggttcagcggcctgctggtgcccaaggtggacgagcggaaaactgcctggggcgaacggaatggacagaagcgttcacgcagacgggggacgcgcgctggcggcttctgtactccacgatacatgagctgtctccgggacgctgagccgcccagtcctacaccggccggcccgcctaggtgtccatggcaagacgacgccttcatccggcgtgggggccctggcaaaggcaaggaactgggcctgcgcgccgtggccctcggattcgaggacaccgaagtgactactacagccggaggcacagccgaggtcgcgccagatgcagtgccacgctccggacgatcctgttggagaaggttagttcaagtgtttcagtccaagcagtttaggtctgcaaagctcgagcgcctgtatcaaagatacttcttccagatgaaccagtcctcactgaccttactaatggccgttctggtcctgcttaccgctgtgctgttagcctttcatgcggctcctgcccggccacagcccgcatacgtggccctgttagcatgcgctgccgccttatttgtgggcctgatggtcgtctgtaaccgccactcatttaggcaggactccatgtgggtcgttagctacgtggttttgggtatacttgcagcagtccaggtgggcggtgcgttggccgcagatcctcgcagtccctctgctggcctttggtgcccagtattttttgtgtacattgcctatactctactgcctatccggatgcgcgcagccgtcctcagcgggctcgggctgagcacactgcatctgattctcgcttggcaactgaaccggggggatgcgtttctgtggaaacaattgggtgctaacgttttgcttttcctgtgcaccaatgtaattggaatctgtacccactaccccgccgaagtatcgcagcggcaggcattccaggagacccgcgggtacattcaggcccgcctgcatttacagcacgagaatcggcaacaggagagattgcttttgtccgtcctgccacagcatgtcgccatggagatgaaggaggatattaataccaaaaaggaggatatgatgttccacaaaatatacattcagaaacatgataacgtgagcatccttttcgcagatatcgaggggttcaccagtcttgcttcccaatgcacagcacaggagcttgtgatgaccctgaatgagctttttgcccgctttgacaaacttgcagcagaaaatcactgtctgcggataaagatcctcggcgactgctattattgtgtcagcggccttccagaggcaagagctgaccatgcccactgctgcgtggaaatgggcgtggacatgattgaggcaatttccctggtccgcgaagtaactggggtgaatgtgaacatgcgcgttggaatccactccggccgggtccactgtggagttctcgggctcagaaagtggcagttcgatgtgtggtctaacgatgtgactctggccaaccatatggaggcaggaggccgagcaggacgcatccacatcacccgagcgacactgcagtatctgaacggcgattacgaagtggaacctgggcgtgggggcgagcgtaatgcctacctgaaagagcaacatattgagacattcctgattcttggagcgtctcagaagaggaaagaagagaaggctatgctggcaaaactccagagaaccagggctaattctatggagggtctgatgccccggtgggtcccggaccgggcattcagccgcacaaaggattctaaggcatttagacagatgggcatagacgattccagcaaggacaatagaggcacacaggatgctctaaaccctgaggacgaggtggatgagtttctctcccgagccatcgacgcacgatcgatagatcagttaagaaaggatcatgtaaggcgcttcctgctgacatttcagcgcgaggatttagagaagaagtacagcagaaaggttgaccctaggttcggtgcttatgttgcgtgtgccctccttgttttctgcttcatatgctttatccaacttttaattttcccccattcaaccttgatgttgggcatttatgcaagtatcttcctgttactgctgattactgtcctgatttgtgcggtctatagctgtggatctctcttccccaaggcactccagaggctctcgcggagtattgtgagatccagagcacattcgacagctgtagggatcttctccgttctgcttgtgtttaccagtgctatagcaaacatgttcacttgcaatcatactcctatccgatcgtgcgctgctcggatgctgaacttgaccccagcagacatcacggcctgtcatctgcaacagcttaattatagcctgggtttggatgcccctctctgcgaggggaccatgccaacctgctcgtttccagagtacttcatcggaaacatgctgcttagcttactagcaagctccgtcttccttcatatttcaagtatcggcaagctggccatgatctttgtcctggggctgatctacctggtgctgctgttgctcggtccgccagctacaatcttcgacaactatgatttgctgctgggcgtgcatggcctggcaagttccaatgaaacattcgatggactggattgtcccgcggccggaagggtcgccttgaaatacatgacccctgttatattattagtgttcgctctggccttataccttcatgcccaacaagtggaatctactgcccgtctggatttcctctggaagctccaagccacgggtgaaaaggaggaaatggaggagctccaggcgtacaataggcgcctcctgcacaacatcctgccaaaggacgttgctgctcacttcctggcgagagaacgtaggaatgacgaactttactatcagagctgtgagtgcgttgccgtgatgttcgcctcaatcgctaactttagcgagttttacgttgagttggaggcgaataacgagggtgtggagtgtctgcgcctactcaacgagatcatagcagatttcgatgagattataagcgaggagcggttccgtcagttggagaagataaaaaccatcggatctacctacatggcggctagtggcttgaacgcaagtacatacgaccaggtaggaagatctcatatcactgcactggccgactatgctatgcggctgatggagcagatgaaacatattaacgaacattcattcaataactttcagatgaaaatcgggttaaatatgggtcctgtcgtggccggcgtgatcggtgcacgaaaaccacagtatgatatatggggaaatacggtgaacgtgtcgtcccgcatggattctaccggggtccctgatcggatacaggtaacaacagacctttaccaagtgttagcggccaagggctaccagctagagtgcaggggagtcgtgaaagtgaaggggaagggggagatgaccacttatttcctgaatggcggcccatcctcctag

SEQ ID NO: 178291 - DNA, 3348 bp, synthetic construct
  misc_feature 1..3348: note = Description of Artificial Sequence: Synthetic coding sequence
  source 1..3348: mol_type = other DNA
atgagctggttcagcggcctgctggtgcccaaggtggacgagcggaaaaccgcatggggagagaggaacggacagaaaaggtctaggagacgtggaacgcgcgcaggtggcttctgtacaccacgctacatgtcttgcctccgcgacgcagaacccccttcaccaacccccgccggcccgccacgctgtccttggcaggacgacgcattcatcaggagaggcggacctggcaaagggaaggagctgggcctgcgtgcagtggccctggggttcgaagatactgaagtgacaaccaccgcaggaggaacggccgaagtagcacctgacgccgttcctcgcagtggccgctcgtgctggcggagactggtgcaggtgtttcagtcgaaacagtttcggtctgctaagctggagcggctgtaccagagatacttcttccagatgaatcagagttccttgaccctgttgatggccgtgctggttctgttgacagccgtgttgctggcgttccacgcagcccctgcgagaccacaacccgcatatgtggctctgttggcatgcgccgccgcattgtttgtagggcttatggttgtttgcaataggcacagtttccggcaggattccatgtgggtggtgagttacgtggttctgggaattctggcagccgttcaagtgggaggggccttggctgccgatccacgatcccccagtgcggggctatggtgccctgtctttttcgtttacattgcctatactttgctgcctataagaatgagggccgcagtgcttagtgggctgggtctttcaacattacacctgattctggcctggcagctcaataggggagacgctttcctctggaagcaacttggagcgaacgtccttctgttcctttgtacgaatgttatagggatttgtactcactatcccgcagaggtttcccagaggcaagcctttcaagaaacccgaggttatatacaagcacggctgcacctgcagcacgagaataggcaacaggaaaggctgttgctctccgtgctcccacagcatgtggctatggagatgaaggaggacattaacaccaaaaaagaagacatgatgtttcacaaaatctatatacagaaacatgacaatgtcagcattctgttcgcagacattgaaggctttacttcacttgcctcccagtgtacagcccaagagcttgtcatgaccctgaacgagctcttcgcccgattcgacaagctcgcagcggaaaaccattgtctgaggattaagatcctgggcgattgttactactgtgtctcgggcctacctgaggccagggccgaccacgcccattgctgtgttgaaatgggggttgatatgattgaagccatcagcctcgttcgggaagttaccggagttaatgttaacatgcgggtgggaatacatagcggacgggtgcactgtggagtgttgggcttgaggaagtggcagtttgatgtttggtccaacgacgtcactctggcaaatcatatggaggctgggggcagagccggccgaatccacatcacccgcgctacgctgcagtacctgaacggagactacgaggtggagcccggccgcggtggcgaaaggaatgcttatctcaaggaacagcatatcgagacctttcttattcttggagcaagtcagaagagaaaagaggaaaaggctatgcttgcgaagcttcagcggacacgggccaattcaatggaggggctcatgcccagatgggtgccagacagagcgttctcacgaaccaaagactctaaggcatttagacaaatggggatcgacgactcatcaaaggataataggggaacccaggatgctctgaaccctgaggatgaggtggacgaattcctgtctcgagccattgatgcccggtctatagaccaactccgcaaggatcacgtgagaaggttcttactgactttccagagggaggatctcgaaaagaaatactccaggaaggtcgatcctcgttttggcgcgtatgtcgcctgtgcactcctggtgttctgcttcatttgctttattcagctccttatcttccctcacagcacacttatgttagggatttatgccagcattttcttgctgcttcttattaccgtgctgatatgcgcagtctattcttgtggaagcctcttccctaaagcgctccaacggctgagtcgcagtatagtcagatctcgtgctcacagcaccgctgtggggattttttccgtgctacttgtgtttacaagtgctattgctaacatgtatttcatcgggaacatgctgctctccctgctggccagttccgtgttccttcatatcagtagcattggcaaacttgcaatgatctttgtgttgggactcatctatttagtgcttcttttactgggcccacctgccaccatcttcgacaattacgatctcctgctcggtgtgcatggactcgcttcttccaatgaaacttttgacggacttgattgccctgctgccggaagagtggctctcaagtatatgacgcctgtgatactgcttgtattcgctttggcattatacctacatgcacagcaggtggagagcaccgcccgcttagactttctctggaagctgcaggcaacgggagagaaggaggaaatggaagaactgcaggcgtataatcgccgtctcctacacaatatactccccaaagatgttgctgcacattttctggcccgcgagaggagaaacgacgagctgtattatcagtcgtgtgagtgtgttgccgtgatgtttgcctctatcgcgaatttctcagaattctacgtagagctggaggcgaacaatgagggcgtcgagtgtctgagactcctgaacgagataattgccgacttcgacgagattatcagcgaggagagatttcgacagctggagaagataaaaaccattggtagtacgtatatggccgcttcgggtcttaatgctagtacatatgaccaggtgggaagatctcatataacagcactggctgactacgctatgcgcctaatggagcagatgaagcatatcaatgagcattcattcaataacttccagatgaagattgggctcaacatggggcctgtggtagctggggtgattggggccaggaaaccacaatatgacatctggggcaataccgtgaatgtcagcagccgaatggactccactggcgtcccagacagaatccaggttactaccgacttataccaagtgctagcagccaagggataccagctggagtgtagaggcgtggtgaaagttaaaggtaagggggagatgacgacctatttcctgaatggggggccaagctcttag

SEQ ID NO: 178292 - DNA, 3348 bp, synthetic construct
  misc_feature 1..3348: note = Description of Artificial Sequence: Synthetic coding sequence
  source 1..3348: mol_type = other DNA
atgagctggttcagcggcctgctggtgcccaaggtggacgagcggaagaccgcatggggtgagcgaaacggccagaaacgttcaaggaggcggggaaccagggccggtggtttttgtacacctcgttatatgtcctgtctgagggatgctgaaccaccttcaccgactccagctgggccgccccgctgtccatggcaggacgatgcctttattaggcggggcggcccagggaaaggcaaagagctgggcctaagggccgtcgccctgggtttcgaagacaccgaggtaactaccactgcaggagggaccgccgaagtcgctccagatgccgttcctcggagtggacgctcttgttggcggcgtttggtccaggtgttccagagcaagcaatttaggagtgccaaactcgaacgactctaccaaaggtacttttttcaaatgaatcagtccagtcttaccctgctgatggcagttctggtcttgctgactgctgtgcttctggcattccatgccgctccagccaggccacagccggcatacgtggctctgctggcatgcgcagctgccctgttcgtcgggctgatggtggtgtgcaatcggcattcctttaggcaggatagcatgtgggttgtctcctatgtggtgctaggaattttagccgctgtgcaagtcggaggagccctggcagctgacccccgatcacccagcgctggcttgtggtgtccagttttttttgtatacatagcttacaccctattgcccatacgcatgcgggccgcagtgttgtcaggtctggggctgtctacacttcaccttattttagcttggcaactcaatcggggcgatgcattcctatggaagcagctaggcgcgaatgtcctgttgttcctgtgcactaatgtcatcggaatttgcactcactaccctgctgaagtctctcagagacaggccttccaggagacgagggggtatattcaggcgcgtttgcatctacagcacgaaaaccgacaacaggagcgtcttctgttgtcagtgttgccccagcacgtcgcgatggaaatgaaggaagatatcaacaccaaaaaagaagatatgatgttccacaaaatatatatccaaaagcacgataacgtgtccattctgttcgcagacatcgagggttttacctccctggccagccagtgcaccgcccaggagctggttatgacactaaatgaattgttcgcaaggttcgataagctggcagcggaaaaccactgtctgaggattaaaatactgggagactgctattactgcgtgtcaggtttgccggaagcacgggctgatcatgcccattgctgtgtggagatgggcgtggatatgatcgaagcaatttccctagtaagagaggttactggagtaaatgtcaacatgcgtgtagggatacacagtggaagagtacactgcggcgtgctgggcctgcgcaagtggcagttcgatgtgtggtcgaacgacgttactctggccaaccatatggaggctggtgggcgggcagggcgcatccatataactagggcaacactccaataccttaacggtgattatgaggtggaaccaggaaggggtggcgaacgtaacgcctaccttaaggaacagcatattgaaacatttctgattctgggagcttcccaaaaaagaaaggaggaaaaagccatgctggctaagttacagaggacccgtgctaattccatggagggcctcatgccacgctgggtccccgatcgagccttctcccgcactaaagattccaaggcattccgccagatgggtatcgacgacagtagtaaggacaatcggggcactcaggacgccttgaatcctgaggacgaagtggatgaatttttgagccgtgcgatcgatgcgcggtcaatcgaccagctacgcaaagaccacgtccggcgattcttgctgacattccagcgggaagacctggaaaagaaatattctagaaaagtggatccccggtttggggcatacgtggcctgcgcactgctggtgttctgcttcatctgctttatccagttgctgatcttcccccactcaacgctgatgctgggtatctacgcctccattttcctgttgttgctcattactgtgttaatttgcgcagtgtactcatgtgggtcactttttcctaaagcactacaacggctatcccggagcatagtgcggagtcgagcccattctaccgcagtgggaatattctccgttctcctggtctttacaagtgctatagctaacatgtactttatcggcaacatgctgttgtctctgctcgcatcgagcgtgttcctacacatctccagcattgggaaacttgctatgatttttgtactcggactgatatatctggtgcttttactcctgggtcctccagccaccatattcgacaattacgaccttctcctgggtgtacacggactcgccagcagtaacgaaacttttgacggcctcgactgcccagctgcaggccgggtggctctgaaatacatgacaccggttatactgcttgtgttcgcattagccctgtaccttcatgcccagcaagtggagtccacagctcggctggattttctgtggaaattgcaggccacgggcgaaaaggaagagatggaagaattgcaggcttacaacaggaggctgctgcacaatatcctgccaaaggacgtggccgcccattttctggcgcgggaacggcggaatgacgaactgtactatcagtcatgcgaatgcgtggcagttatgttcgcctctattgccaacttctccgaattttacgtcgaattagaagcaaataacgaaggagtggagtgcttgcggctcctgaatgagattatcgccgattttgatgaaatcatttccgaggaacgcttccgtcagctcgagaagatcaagacaattggttcaacttacatggcagcctctggcctaaatgctagcacatatgatcaggtgggacgtagccacattacagcactagccgattacgccatgaggctcatggagcagatgaagcacatcaatgagcacagtttcaacaactttcaaatgaagatagggctgaatatgggtcccgtggtagctggggtgatcggcgcccgtaaaccacaatatgatatatgggggaataccgtaaatgtgtccagccgtatggactcaactggcgtgcctgaccgtatccaggtcaccaccgatctataccaggttcttgccgcaaaggggtatcaactcgaatgtcgcggagtggttaaagtcaaaggaaagggagagatgacgacctacttcctgaatggaggaccatcgagttag

SEQ ID NO: 178293 - DNA, 3243 bp, synthetic construct
  misc_feature 1..3243: note = Description of Artificial Sequence: Synthetic coding sequence
  source 1..3243: mol_type = other DNA
atgcccgccaagggccggtacttcctgaacgagggcgaggagggcccagaccaggacgctttgtatgagaaatatcagttgacttcacagcatggacccctgcttctgacactcctgctagtggctgccacggcctgcgtcgcactgattataatcgcattctctcaaggtgatccatcacgccaccaggccattctcgggatggcatttctcgtgttggctgtctttgcagcactgagtgtgcttatgtatgtcgagtgcctgctcagacgctggttgagagcactcgcgctgcttacatgggcttgcctcgtcgccctcggatacgttctcgtttttgatgcctggactaaggcagcctgcgcgtgggagcaagttccgttcttcctgtttattgtctttgtcgtatacacgttgcttcccttctccatgagaggcgccgtggcagttggggccgtgtctacagccagccacctgctggtgctcggctctttgatgggcggattcacgacccccagcgtaagagtaggtcttcaactgcttgccaacgcagtgatattcctgtgtggtaacctgaccggcgccttccacaagcaccagatgcaagatgcgtctagagatctatttacatatacagttaaatgtatccagattaggcgaaaactaaggatcgaaaagcgccaacaggagaatctgctgctgagcgttctacctgcgcatattagtatgggcatgaagcttgctataatcgagaggctgaaagagcacggtgataggcggtgtatgccggataataacttccacagtctttatgttaaacgacaccagaatgtcagcattctgtatgctgatatcgtgggcttcactcagttagctagcgattgttctccaaaagagcttgtcgtggtcctgaatgaactcttcggcaaattcgaccaaattgcgaaagccaatgaatgcatgcgcatcaaaatcctcggtgattgttattactgcgtttccggactgcctgtgtctctgccaactcatgctcgaaattgtgttaagatgggacttgatatgtgtcaggcaattaaacaagtccgagaagcgactggagtcgatataaacatgagggtcggtattcacagcggaaatgtcctgtgtggcgtgattggcctccgtaagtggcaatatgacgtgtggtcacatgatgtgagtcttgccaaccgcatggaagctgctggtgttcctggtcgggtgcacattaccgaggctacccttaagcacctggacaaggcttatgaggttgaggacgggcacggtcagcagcgagatccgtacctcaaagaaatgaatatcaggacctatctcgttattgatccgcgctcacaacagccaccgccaccatctcagcacctgccccggcccaagggggatgccgccttgaaaatgcgggcctccgtccggatgactcgctacctagagtcctggggcgcagcacgcccctttgcccacttgaatcaccgagaatctgtttctagcggagaaactcacgttccaaatggccggcgacccaagtccgttccccagcgccatcgcaggactccagatcgaagcatgagtcctaagggcaggtcagaagacgacagctatgacgatgaaatgctgagcgctatcgaagggttgtcaagcacccgaccctgttgtagtaagtccgacgatttctatacattcgggtcgatatttctggagaagggctttgaaagagaatacaggctcgccccaataccacgcgcccgccatgattttgcgtgtgcctctctgatctttgtctgtattctattggtgcacgttctgctgatgccacggacagccgcgctaggggtctcatttggcctggtcgcgtgtgtcttaggcctggtgctcggcctctgctttgccactaaattctcacgttgttgtcccgcacgtggcacattatgtacaatcagtgagcgtgtcgagactcagcccctgctcaggttaactctcgctgtactgacaataggttctctgttaacagtcgcaataattaatctgccactcatgccatttcaagtgccagaacttccggtgggtaatgagaccggcctgctcgctgccagctccaagactagagccttgtgtgagcctttaccctactacacctgcagctgtgtcctggggtttatcgcctgttccgtgtttcttagaatgagcctagaaccaaaggtggttttactgacagtggctcttgtggcctatctcgtcctgtttaatctgtctccttgttggcaatgggattgttgtggccagggactgggcaacctaaccaagccgaatggcaccacctccggtaccccctcatgctcttggaaggatctgaaaaccatgacaaacttttacctcgtgctgttttatatcactttgctgacactaagccgacagatagattactactgccgcctcgattgtttgtggaagaagaaattcaagaaggaacacgaagagtttgagaccatggagaacgttaaccgactcctcctggagaacgtgctgccagcccacgtggccgcccactttatcggggacaagctaaacgaagactggtatcaccaaagttatgactgcgtgtgtgtcatgttcgcctccgtcccagattttaaggtattttatacagagtgtgacgtgaacaaggagggtctggaatgcctgcgtctgttaaatgagattatcgctgactttgatgaattgctgctgaagcccaaatttagcggagtcgagaaaatcaagacgatcggctccacatacatggcggccgcagggctctccgtcgcctccggccatgaaaaccaggagcttgaaagacagcacgctcacatcggcgtgatggtggagttttctatcgctctcatgtcaaaacttgacggtatcaaccgtcacagttttaactcctttcgactgcgggtgggaatcaatcatggtccagtcatagcgggtgttattggcgctcgtaaacctcagtacgacatatggggcaacactgtgaatgttgcttcacgcatggagtccactggagagttaggcaaaatccaggttaccgaagagacatgtaccattctccagggcctcggctacagctgtgagtgcagaggacttataaacgtcaagggtaagggagagttgcgtacctatttcgtgtgtacagataccgcaaaatttcaaggcctggggctgaactag

SEQ ID NO: 178294 - DNA, 3243 bp, synthetic construct
  misc_feature 1..3243: note = Description of Artificial Sequence: Synthetic coding sequence
  source 1..3243: mol_type = other DNA
atgcccgccaagggccggtacttcctgaacgagggcgaggagggcccggatcaggatgccctatatgagaaataccagctgacgtcacaacacgggcctctgctgcttactctactgcttgtcgctgcaacagcctgcgtagcactgattattatcgctttctctcagggcgacccctccagacaccaggccattctcggtatggcatttctcgtgttggccgtgttcgctgccctgtccgtcctcatgtatgtggagtgtctgctgcggcgatggttgcgggctctagccctgttaacgtgggcatgcctcgtggccctaggctacgtcctggtcttcgatgcttggactaaagccgcatgtgcctgggagcaagtgcctttctttctctttattgtctttgtggtgtacactcttctccctttctcaatgcgaggggccgtggctgtgggggccgtatccacagcgtcacatctgctggtcctgggtagtctgatggggggttttaccacgccatccgtacgtgtaggtttacagctgctggctaacgccgttatattcctgtgcggtaacctgaccggcgccttccacaagcaccagatgcaggatgccagccgcgatcttttcacctatactgtgaagtgtatacagatccggcgtaaactccgcattgaaaaacgacagcaggagaacctgttgctgtccgtgctgcccgcccatatcagcatgggcatgaaactagctataatagagcggctgaaggaacatggagataggaggtgtatgcccgacaataacttccatagcctgtatgtgaaaagacaccagaatgtttccattttatacgccgatatcgtgggcttcacccagctcgcctcagactgttccccaaaagagctggttgtcgtgctgaacgagctgttcgggaagttcgatcagatcgcgaaggcaaatgagtgtatgcggatcaagattctgggcgactgctactactgtgtgtccggattgcctgttagtttacccacccacgctaggaactgcgtgaagatggggctggatatgtgccaggccattaagcaagttagggaggccaccggagtcgatataaatatgagggtgggaattcactcaggcaacgtactctgcggagttatcgggttgcgcaagtggcagtacgacgtctggtcccatgatgtaagcctagctaacaggatggaagcggcgggcgtgcccggcagggtgcatatcaccgaggcgacgctcaaacatctggataaggcctatgaagttgaagacgggcatggacagcagcgggacccgtacctgaaagagatgaatatccggacatatctggtgattgaccctaggtcccagcagccgccgcccccctcgcagcacttgcctaggccaaagggtgacgccgcgctgaaaatgagagcctctgtaagaatgacacgttatctggaaagctggggagctgcacgccctttcgctcacctgaaccacagagagtctgtttcatctggagaaactcacgttccgaatggaagacgtcccaaatctgtgccgcagcgacaccggaggactcctgataggagtatgtccccgaaaggacgctctgaggacgactcgtatgacgacgagatgctctccgctatcgagggtctatcttccacacggccctgttgcagtaagtctgatgatttttacacttttggctctatttttttagagaagggtttcgaacgtgagtatcggctggccccaattcctcgcgctagacacgatttcgcgtgcgccagcctgattttcgtctgtattctgctggtgcacgtcctgttgatgccaaggactgcagctcttggggtatcctttggtctggtggcatgcgtcctggggctagttcttggcctttgttttgcgaccaagttttcaagatgctgtcctgctcgtgggactctctgcacaatttccgaacgggttgaaacccagcccctgctgagactgacgctcgccgtactgacaatcggtagcctgctgactgttgccatcattaacctgcccttgatgccattccaggttccagagctcccagtcggcaatgagaccggtctgctggcggcctcttctaaaactcgagcactgtgcgagcctctcccatattacacctgttcctgcgtgctcggtttcatagcctgcagtgtgttccttcggatgagtctggaaccaaaggtcgtcctattaacggtggctcttgtggcatacctggtgctgtttaatctaagcccctgctggcagtgggattgttgtggtcagggcctcgggaatctgacaaaacccaacggcacaacatccggcactcccagctgcagttggaaagacctaaaaacaatgaccaatttttatctggtgttattctacattacgctactgacactatcccgccaaattgactactactgtaggctcgactgtctgtggaagaaaaaattcaaaaaagagcatgaggagttcgaaaccatggagaacgtgaatcgcctcctgctggaaaacgttctcccggctcatgtcgccgcccacttcataggagacaagctgaatgaagattggtatcaccagtcctatgattgcgtgtgcgtaatgttcgctagcgtgccggattttaaggtcttctacactgaatgtgacgtaaataaagaaggactagagtgtctaagactcctgaatgaaattatcgccgactttgacgagctcctgctgaagcccaaatttagtggcgttgaaaagattaagaccattggcagcacatatatggccgccgccggtctcagcgtcgccagcggacacgagaatcaggagctagaacgccaacacgcccacatcggcgtgatggtggaattctcaattgcccttatgtcgaaacttgacggcatcaacagacattccttcaactcattccggctgagagtaggcatcaatcacggccccgtgattgccggagtcatcggagcccgtaaaccccagtatgacatatggggtaataccgttaatgtggctagtcgcatggagtctaccggcgagttaggaaaaatccaggtgaccgaagagacctgtaccatccttcagggcctaggctatagctgtgagtgccgtggcctgatcaatgtgaagggtaagggcgaacttcgcacctactttgtgtgtacagatacagcaaaattccagggactggggctcaattag

SEQ ID NO: 178295 - DNA, 1302 bp, synthetic construct
  misc_feature 1..1302: note = Description of Artificial Sequence: Synthetic coding sequence
  source 1..1302: mol_type = other DNA
atgcccgccaagggccggtacttcctgaacgagggcgaggagggcccagatcaggacgctctgtacgagaagtaccagttgacctcccaacacggacccctgctgctgacgctgctgttggtcgcggctaccgcctgcgtcgctctcatcatcattgcctttagccagggcgatccctcaagacatcaggctatcctggggatggcgttcctggttttggccgttttcgccgcccttagcgttttaatgtatgtggaatgtctgctgagaagatggctgcgggccctggccctgctgacatgggcctgtctcgtcgccctcggctatgtcctcgtcttcgacgcttggacaaaggctgcctgtgcctgggagcaggtgccgttttttctgttcatagttttcgtggtgtatacactgttacccttttccatgcgcggagcggtggcagtgggagcggtcagtactgccagccacttgttggtgctcgggtctctgatgggtggcttcactacgccctccgtcagggtcggactgcagctcctggcgaacgccgttatcttcttgtgtggaaatctcaccggagctttccacaagcatcaaatgcaggatgcgagtcgtgatctcttcacatacaccgtaaagtgcattcagattcggcgcaagttgcggattgagaaacgacagcaagagaatctgctcctatcagttctgcccgcacatatcagcatggggatgaagttggccattattgaacgcctgaaagaacacggtgatcgtcgctgtatgcccgataataattttcactcgttgtacgtcaaacggcaccagaatgtatctatcctgtacgcagatattgtgggcttcacacagcttgcatctgactgcagtccaaaggagttggttgtcgttctgaacgagcttttcgggaagtttgaccagattgcgaaggccaacgagtgcatgagaataaagatactgggcgattgctattactgtgtgtcaggacttcccgtgtctctccccacacatgcccgaaattgtgtcaaaatggggttagacatgtgccaggcgattaagcaagtaagagaggcaacaggagtggatatcaatatgagggtgggaatacactctggcaatgtgctgtgtggagtcatagggctcaggaagtggcagtatgacgtttggagtcacgacgtcagtctggctaaccggatggaggctgccggcgttccaggccgtgtccacattacagaagcaaccctgaagcacttggataaagcgctattgttacaggtgaggtag

SEQ ID NO: 178296 - DNA, 2205 bp, synthetic construct
  misc_feature 1..2205: note = Description of Artificial Sequence: Synthetic coding sequence
  source 1..2205: mol_type = other DNA
atgcccgccaagggccggtacttcctgaacgagggcgaggagggcccggaccaggacgccctgtacgagaagtatcagctgacaagccagcacgggccacttttgttgactttgctgcttgttgccgcaacggcttgcgttgctctgatcatcatagcattttcccagggcgatccttcaagacatcaggcgatccttggcatggcctttctggtgctcgctgtgttcgctgctttatcggtgttgatgtacgtggaatgtcttctgcgccggtggctgagagctctagctcttctgacctgggcttgcttggtggcactggggtacgtgttggtctttgacgcttggacgaaagccgcatgcgcctgggagcaagtgccgtttttcctgttcatagtctttgtggtatacacactgttaccattctctatgcggggagcagtggcggttggtgccgtgtcgacagcctcacacctgctagtgctcgggagccttatgggcggattcaccactccctccgtgagggtgggtctacagcttctcgccaatgctgtaatctttctgtgcgggaatctaacaggagcttttcataaacatcagatgcaagatgcatctagggacctgttcacctatacagtaaaatgtatccaaattcgccgcaagctgcgaatcgagaaaaggcaacaggagaacttactcctgtctgtcctgccagctcacattagcatgggcatgaagctggctatcattgagagactgaaggagcacggagatagacggtgtatgccagataacaatttccactccctgtatgtaaagagacatcaaaacgtttccattctttatgctgacattgttggattcacccagctcgcatccgattgttcccccaaagagctcgtggtagttcttaatgaattgtttggaaaatttgatcagatcgccaaggccaatgagtgtatgagaatcaagatactgggagactgctactattgtgtctccggcctgcctgtgtccctccctacccacgctaggaattgtgtgaagatgggtctcgacatgtgtcaggcaataaagcaggtgcgcgaagcgactggggtggacataaacatgcgggtgggaatccactcgggcaatgtgttgtgcggcgtgattgggctgcgaaagtggcaatacgacgtctggagccatgatgtttccttggcaaaccggatggaggccgcaggcgtgcctggcagagtgcatatcaccgaagccacactgaaacatctggataaggcgtacgaggttgaggacggccacgggcaacagcgcgatccatatctgaaggagatgaacatccgaacatacttggtgatcgatcctagatcacagcagcctccaccacccagtcaacatctgccgaggccaaaaggtgatgctgcactgaaaatgcgcgctagtgtgcgcatgaccagatacctggaatcttggggcgccgcccgacccttcgctcacctcaatcacagggagagtgtgtccagtggcgagactcacgttcctaacggaaggagaccaaagtccgtgccccaaagacatcggaggacccctgacaggtctatgtctcccaagggacgcagcgaggacgattcatatgacgacgagatgctgagcgccatcgagggcctgtcaagtactaggccctgttgcagcaaatcagacgacttctacactttcgggtctattttcctcgaaaagggcttcgagcgggaatacaggctagcacccatacctagagcacggcatgatttcgcatgtgcctcgttgatattcgtgtgcattctgctggtgcatgtgctgcttatgccccggaccgctgctctgggcgtgtctttcggcctggtcgcctgcgtactgggactcgtgctgggactgtgttttgcgacaaaatttagcagatgttgtccagcgcgcgggaccctgtgtacaattagcgagcgggtagaaacccagccgctgctcagacttacccttgctgttctcacaattgggagtttgctcaccgttgccatcattaacttgcctctcatgccattccaggtgcctgagctgcccgttggcaatgagaccggcctcctggcagcgagctcgaaaaccagggctctgtgtgaacccctgccccacctgcacaccgtcttctccaggctgaacgagttgacaagttag

SEQ ID NO: 178297 - DNA, 3756 bp, synthetic construct
  misc_feature 1..3756: note = Description of Artificial Sequence: Synthetic coding sequence
  source 1..3756: mol_type = other DNA
atggagctgagcgacgtgcggtgcctgaccggcagcgaggagctgtacacaattcacccaaccccccccgcgggcgatggccggtccgcttcgcgtcctcaacgactactgtggcagacagcagtgcgccacatcacagagcagcgctttatccacggacaccgcgggggcagtggcagcggaagtggcggttccggcaaggcctctgacccggctgggggcggcccgaaccatcatgcaccgcagctgagcggcgattcagccctaccattatacagcttgggccctggggagagggcacactctacttgcggcactaaagtgtttccagaacgctcgggctctggatctgcgagtggctccggaggagggggagatctgggatttctgcacctggattgcgcccctagcaacagtgatttctttctcaatggcggctatagttaccggggggttatattcccgactcttcgcaactcatttaagtcccgtgatctggagcggctgtaccagagatacttcctgggccagaggagaaagagcgaagtcgtcatgaacgtcctggatgttctgaccaagcttaccctgctagttcttcatctttctctggcgtcagcccctatggatcctctcaagggtattcttctgggattcttcaccggaattgaggtggtcatctgcgctttggtggtcgtccgaaaagacacaacgtcccatacctacctgcagtacagtggagtggttacgtgggtggcgatgactacacagatcctcgccgccgggctgggttacggcctgctgggggatggaatcggctacgttctgtttacactgtttgctacttattcaatgcttccgctgcctctgacttgggccatcctagccggactcggcacatccctccttcaggtgatattgcaggtggtcatccctcgcctggcagtgatatccatcaatcaggtggtggcccaagccgtccttttcatgtgcatgaatactgctggaatcttcatatcgtatctcagtgatcgagcccagcgtcaggcatttctcgaaaccaggagatgcgtggaagcacggctgcgactggaaacagagaaccagagacaagagaggctagtcctgtccgtactcccacgcttcgtcgtgctagaaatgataaacgacatgaccaacgtggaggatgagcatctccaacaccagttccaccggatctacatacaccgctacgaaaacgtgtccattctattcgcagacgtgaaggggttcaccaatctcagtaccacactgtccgctcaggaattggttagaatgctcaacgaactgttcgcccggttcgaccggctggcacacgagcaccactgcctgcggatcaaaattctaggtgattgttattattgcgtttctgggctccccgaaccccggcaggaccatgcccactgctgtgtagagatgggactatctatgatcaaaactattcgatacgtcagaagccggaccaagcatgatgtcgatatgagaattggaatacattcagggtctgtgttgtgtggtgtgctcggacttaggaaatggcaatttgacgtgtggtcctgggatgtggacattgcaaataagttagaatctggaggtattcctgggaggatccacataagcaaagctacactggattgccttaacggcgactacaatgttgaagaaggacacgggaaagaacgaaatgaatttcttcgcaaacataacattgagacctatctcattaaacaaccagaggattctctgctcagcctccccgaggatatcgtgaaagagtccgtctcaagctcagaccgcaggaactctggagccacctttacagagggatcatggtcccctgaactaccgttcgataatatcgtgggcaaacagaacacccttgccgcactaacccgcaatagcatcaatttgctgcccaatcatctcgcccaggccctccacgtgcagtccggtcctgaagagataaacaagagaattgagcacacaatcgacttacgtagtggtgacaagcttagaagggaacacatcaagccgtttagtctgatgtttaaagacagtagcttggagcacaagtactcgcaaatgagggatgaggtcttcaaatcgaacctcgtgtgcgcctttattgtgctcctgttcataaccgccatccagagtctcctcccgagttcccgtgtgatgcctatgaccatccagttctccattctcatcatgttgcatagcgcattggtcctgatcacaacggccgaggactacaagtgtttgcccttgattctgagaaaaacatgctgctggattaatgaaacctatttggcccggaacgtgataatatttgcgtctatactgataaactttttaggagcgatcctgaatattctttggtgcgacttcgacaaatctatacctctcaagaatctgaccttcaacagcagcgcagtgttcacagatatctgttcctatcctgaatacttcgtgttcacgggggtcttggcgatggtgacctgcgcggtgtttctcagactgaattcagtgctgaagttagctgtgctgttgataatgattgctatctacgcgcttctgacagaaaccgtttacgccggcctgtttcttaggtacgataacctgaatcacagcggtgaggactttctcggcaccaaagaagtgtctctgctgttaatggctatgtttcttctcgcggtattctaccacggtcaacaactcgagtacaccgcccggctggattttctgtggcgggtccaggcgaaagaggaaattaacgagatgaaagagttaagagagcacaatgaaaacatgctccgcaacatcctgccatcgcatgtcgcgcggcatttcctcgaaaaagatagggacaacgaggaactctatagtcagagttatgacgcagtgggcgtgatgttcgcatccatccctgggttcgcagacttctactctcagactgaaatgaacaaccagggggtcgagtgcctgaggctgttaaatgagataatcgctgattttgatgagctgctgggggaggatagatttcaggacattgagaagattaaaaccataggctccacttatatggccgtgtcagggctgtctccagagaagcagcagtgcgaggataaatggggacacctctgtgcactcgccgacttctccctggcgctcacggagtcgatccaggagattaacaagcatagcttcaataacttcgagctccggatcggcatctcgcatggatccgtggtcgccggggtgatcggagccaaaaagcctcaatacgacatctgggggaaaaccgtgaatctcgcttcgaggatggacagtactggtgtgtctgggcggatacaggttccagaagagacttaccttatcctgaaggatcaaggatttgctttcgactaccggggcgagatttatgtaaaaggaattagtgagcaggagggcaagataaagacatacttcttgctgggacgggtccagcctaatccttttattctcccgccacggagactgccagggcagtactccctcgccgccgtcgtactcggactcgtccagtctcttaataggcagcgccagaaacagttgctcaacgagaacaataacaccggcatcataaagggccattacaacagacggaccctactgtctccgagcgggacggagccgggggcacaggcagaaggaacggataaaagcgatctgccttag

SEQ ID NO: 178298 - DNA, 4062 bp, synthetic construct
  misc_feature 1..4062: note = Description of Artificial Sequence: Synthetic coding sequence
  source 1..4062: mol_type = other DNA
atggccagccccccccaccagcagctgctgcaccaccacagcaccgaggtgtcttgcgattcttcaggggactctaattcagtgcgtgtgaagatcaatcccaaacaactgtcctcaaattcccacccgaaacattgcaagtattccatatcatccagctgctccagttctggggattcaggaggtgtgcccagaagagtgggaggaggcggtagacttcggcgccagaagaaattaccacagctgttcgagcgggcatcctctcgttggtgggacccgaaattcgactctgttaacctcgaggaggcatgtcttgagcgttgctttcctcagacacagcgccggtttagatatgccttattttacattggcttcgcttgcctgttatggtccatttattttgccgtgcacatgcgcagccgtctcatcgtcatggtggcacccgccctatgcttcctcctcgtatgcgtgggctttttccttttcactttcaccaagctgtacgcccgccattacgcttggacttcattggccttgacattgttggtgttcgctcttacgttagctgctcagttccaagtgctgacacccgtgtctggcagaggcgactcttctaacctgaccgcaacagctcgtccgacagatacctgcctgagccaggtgggctcatttagtatgtgtatcgaggtcctgttcctgctgtacaccgtcatgcacctcccgctttatttgtcactgtgcttgggagtcgcatactcggttctgtttgagaccttcggctaccattttcgcgatgaggcatgcttccctagtcctggtgctggcgctcttcactgggagctcctgtccagagggctgctgcacgggtgcattcatgccattggagttcacctattcgtgatgagtcaagttagaagtcgctccaccttcctgaaggtggggcagtcaatcatgcatggcaaagacctggaagttgagaaagctctcaaggagaggatgatccatagcgttatgccccggatcattgcggatgacttaatgaaacagggcgacgaggagagtgagaatagcgtaaaacgacatgccacaagctctcctaagaatcgtaagaaaaagtcttccatacagaaagcaccgatcgcctttcgaccttttaaaatgcagcaaatcgaagaggtgtctatcctgttcgcggacatcgtcggctttacaaagatgtccgccaacaaaagtgctcacgccttggttggcctcttgaacgatctgtttggccggtttgataggttgtgtgaagaaacaaaatgcgagaagattagcactctcggagattgttactactgcgtggcaggctgtccagaaccccgcgccgaccacgcctactgctgcatagaaatgggcctcggcatgattaaagccatagaacagttctgtcaggagaaaaaggaaatggtaaatatgagagtcggagtgcataccggaaccgtgctttgtggcatcttggggatgcgaagatttaagttcgacgtatggtccaacgacgtgaatcttgcaaatctgatggagcagctgggggtagcggggaaggtacacatttccgaagccaccgctaaatatctcgacgataggtatgaaatggaagacggtaaggtgatcgaacggctcggacagtcagtagtggctgatcaactcaaaggacttaagacctatctgatttcgggacaacgggcaaaggaaagtcgttgttcttgtgccgaggctctgcttagcggcttcgaagtgatcgatggaagccaggtgagctcaggaccgcgcgggcagggtactgcttcgagcgggaatgtgtccgatctggcgcagaccgtcaagacatttgacaacttaaagacatgccccagctgcggcataaccttcgccccaaagagcgaggccggagctgagggcggggcaccacagaacggttgccaagatgagcacaagaactcaactaaggcgtctggcggtcctaaccccaagactcagaacggcctgttaagtccccctcaagaggaaaagctgactaactctcaaacttcgctgtgtgaaatccttcaagaaaaggggcggtgggcaggtgtttcgttggaccagtcagctctcttacccctgcgcttcaagaatatacgcgagaagacggacgcgcattttgtcgatgtaataaaagaggattccctcatgaaagattacttttttaagcctccaattaaccaatttagtttaaacttcctggatcaggagttggagcggtcttacaggaccagctatcaagaggaagtaatcaagaactcacccgtgaaaacctttgcttctcccacgttctcaagcctgctggatgttttcctgagtactacagttttcctaactcttagcaccacttgtttcctcaaatacgaagcggccacagtccctcctcctcccgcagctcttgcagtttttagcgcggctcttctgttggaggttctgtctctcgcagtgtctatcaggatggtgttttttctggaagatgtgatggcatgcaccaagcgcctgctggaatggatcgcaggctggttaccaagacactgtatcggtgccatcctcgtaagtcttcccgccctggcagtctactctcacgtcacaagcgaatatgagactaatatccacttcccggtgtttaccgggtctgcagcactgatcgcagtggtccactactgtaacttctgccaactctctagttggatgcggagctctctggcgactgttgtcggagccggtcccctgcttttactttatgttagtctctgcccagactccagtgtactgacttctcctctcgacgcagtacagaacttctcgagcgaaaggaatccatgtaatagctcggtcccccgggacctgcgtcggcccgcctccctcattggacaggaagttgtgctcgtattcttcttgctgctgttgctggtgtggtttttgaaccgggagtttgaggtgtcataccgcctccattaccacggcgacgtagaagctgatctgcatagaacaaaaatccagtccatgcgggatcaggccgattggctcttgagaaatataattccctaccacgtggcagagcagttaaaagttagtcaaacctatagtaaaaatcacgactctggaggggtcatctttgctagtattgtgaacttctcggagttctacgaggagaactacgagggggggaaggagtgttaccgcgtactgaacgaacttatcggggatttcgacgagcttctttctaagccagactattcttccatcgagaagattaaaaccatcggcgctacatatatggctgcctcaggtctgaatactgcacaagcacaggacggctctcatccacaggaacacctgcaaattctgttcgagtttgctaaagagatgatgagggtcgtggacgattttaataataatatgctctggttcaactttaaactgcgcgttggttttaatcacggacccctcacagccggcgtgatcggaaccaccaagctcctgtacgacatctggggtgacactgtgaatattgcatctcgcatggacaccactggcgtggagtgccgcatacaggtttcagaggagtcatatcgagtgctgtcgaaaatgggatatgacttcgactacaggggaactgtgaacgtgaaaggaaaggggcagatgaagacctatctgtatcctaaatgcacggatcaccgggtgatcccccagcaccaactgtctattagtcctgacatacgggtccaagtcgatggtagcattgggcgcagccctaccgatgagatcgccaacctcgtcccatccgtacaatacgtcgacaagacgtcactgggttcagactccagcacacaggccaaggatgcccacctgtcccccaagcggccttggaaggaaccagtcaaggcagaggaaaggggccgttttggtaaagcaatcgaaaaagacgactgcgatgaaactggtatcgaggaggccaacgaattaaccaagctgaatgtgtccaagtctgtgtag

SEQ ID NO: 178299 - DNA, 531 bp, synthetic construct
  misc_feature 1..531: note = Description of Artificial Sequence: Synthetic coding sequence
  source 1..531: mol_type = other DNA
atgaccatgtgcagcggcgcccggctggccctgctggtgtacggcataattatgcattcctctgtctactccagtcccgccgccgccggactgcgtttcccgggaatccgccccgaggaagaagcctatggagaagatggaaaccctctaccagatttcgatgggtccgagccccccggagccggctctccagcctccgctcctcgagccgctgcagcctggtaccggcccgcaggccgccgtgatgtggcccatggcattctgaatgaggcatatagaaaagtgttagatcagctttctgctggcaagcacctgcaaagcctagtagcaaggggcgtgggaggttcccttggcgggggggcaggggatgatgctgagccactgtctaaacgccactctgacggtattttcacggattcttactctaggtacaggaaacagatggccgtgaagaaataccttgctgccgtgcttggtaaacgctataagcagagggtgaagaacaagggacgccgcattgcctacctctag

SEQ ID NO: 178300 - DNA, 531 bp, synthetic construct
  misc_feature 1..531: note = Description of Artificial Sequence: Synthetic coding sequence
  source 1..531: mol_type = other DNA
atgaccatgtgcagcggcgcccggctggccctgctggtgtacggcatcatcatgcactcctcagtctattccagtcccgccgccgccggcttgagatttcccggtatccgcccagaggaagaggcttatggtgaggatggcaacccattgccagatttcgacggctccgagccaccgggggccggatcacccgcctccgctccacgagcggcagctgcttggtacagaccagcaggccggcgtgacgtggcacacggcattttaaatgaggcgtaccggaaggtactggaccaattaagtgccggcaagcacctccagtctctggtagcccgcggagtgggcggatctctaggcggtggcgcgggagacgacgcagagcccctttccaagcggcacagcgacggcattttcacagattcctatagccgctacagaaagcaaatggccgtcaaaaagtacctcgccgcagtgctgggtaagagatacaagcagagagtgaagaataagggccgtagaattgcctacctttag

SEQ ID NO: 178301 - DNA, 948 bp, synthetic construct
  misc_feature 1..948: note = Description of Artificial Sequence: Synthetic coding sequence
  source 1..948: mol_type = other DNA
atgctgaccaagcgggccctgcagaagccctgcagcgaccggttcctacggaccgctcagatcaaccgcagtcgccgccctgtaacaagcgtaacgtcaggctcctcttctcggagcagggcttccccacaccgccctcttttcctgtcttccgccagtctcagtgctccaccaagcctcagggtgaccctacctcccggatcagctcgactacaaaccttcgagcagaatacctccttggggaaacgggtgccccagctccttttgctcctccctctggtcccagcggcatcagcacaaactcctacccctgacggcgatgcctcaagggttgtaactcctgcccaggagctggaggaggccttatgtccaccaagctatctggctgctttgttagccgccggcggcgtcgaaggaatgaccatgtgctccggagcccgtcttgctctactcgtctatgggatcattatgcactccagtgtctatagcagtccagccgccgccgggctgcggttccctggaattcggcccgaagaggaggcatacggcgaagatggcaaccctctgcccgattttgatggcagcgaaccaccgggcgcggggtcacctgcctccgccccacgtgccgctgctgcctggtaccgccctgcgggccgtcgcgatgtcgcccacggcatcctaaacgaggcttacagaaaggttctggatcagctttccgcaggaaagcacttgcagtccttagtggccagaggtgtaggaggtagcctcggtggaggagcgggtgacgatgccgaacctctctccaaacgccattctgatgggatcttcaccgactcctattccagataccgcaaacaaatggctgtgaaaaaatacctagctgcagttctggggaagagatataagcagcgagtaaaaaacaaaggccgaagaatcgcctacctctag

SEQ ID NO: 178302 - DNA, 531 bp, synthetic construct
  misc_feature 1..531: note = Description of Artificial Sequence: Synthetic coding sequence
  source 1..531: mol_type = other DNA
atgaccatgtgcagcggcgcccggctggccctgctggtgtacggcatcataatgcactccagtgtgtattcatcacccgccgctgctggcctacggttccccggcattcggcccgaggaggaggcgtacggcgaggacggtaacccactgcccgattttgacggcagcgagccaccgggggctgggtctcccgccagcgcccccagagctgccgctgcttggtataggcctgcaggccgccgtgatgtggcccatggtatccttaacgaggcatatagaaaagtcctggaccagttgtccgctggcaagcatctgcaatccctggtggctcgcggcgtgggggggagtctggggggcggcgcaggggatgacgctgagcccctctcaaaaaggcattcagacgggatcttcacagacagctattcgagatacagaaagcagatggcagtaaaaaaatatctcgcagccgtcctcggcaagaggtataagcaacgggtgaaaaataagggacggagaatagcttatctatag

SEQ ID NO: 178303 - DNA, 1407 bp, synthetic construct
  misc_feature 1..1407: note = Description of Artificial Sequence: Synthetic coding sequence
  source 1..1407: mol_type = other DNA
atggccggcgtggtgcacgtgagcctggccgccctgctgctgctgcccatggccccagccatgcattctgattgtattttcaaaaaagagcaggccatgtgtctggaaaaaattcagcgggcgaacgagctcatgggattcaacgattcttcgccggggtgtcccggaatgtgggacaacataacctgttggaagcccgcccacgtcggcgaaatggtgctcgtaagctgtcccgaattgttccggatctttaaccctgaccaggtatgggaaaccgagacaatcggcgagtccgacttcggcgactctaacagcctggatctgtcagacatgggtgttgtcagtaggaactgtacagaagatggctggagcgagccatttccccactacttcgacgcctgtggcttcgatgaatacgaatccgagacaggagatcaggattactactacctgtcggttaaggccctttacacggtgggatatagtactagcctggtcaccttgacaactgccatggtaatcctctgtaggttccggaagctacattgcactaggaatttcattcatatgaacctgttcgtctcctttatgcttcgagcaatttcagtctttatcaaagattggatattatatgcagagcaggatagcaaccattgcttcatcagcactgtggagtgcaaagccgttatggtctttttccactattgcgtagtgtctaactatttttggcttttcatcgaggggctgtaccttttcacattgttggttgagactttttttcctgaaaggagatatttttactggtacaccattattggttggggaactccgaccgtatgcgtgactgtgtgggccacgttacgcctgtatttcgatgacaccgggtgctgggacatgaacgatagcaccgccctgtggtgggtcataaagggcccagtggttggttctattatggttaactttgtgctttttatcgggatcatcgtgattttagtacagaagctccaatcacccgacatgggcggcaatgagtcttccatctatctgcgcctagcccgttccactttattgctgatccccctgttcggaatacattatacagtcttcgcattttctccagaaaacgtttctaagcgagagaggcttgtctttgagctggggcttgggtccttccagggattcgtagttgcggtcctttactgttttctgaacggtgaggtacaggcggagatcaagaggaaatggcggtcctggaaagtgaacagatactttgcggtggactttaaacatcggcatccttcacttgccagttcgggggttaatggtgggacacagctgagcattctgagcaagtccagctctcagatcagaatgagcggcctgcccgcggataatctggccacttag

SEQ ID NO: 178304 - DNA, 594 bp, synthetic construct
  misc_feature 1..594: note = Description of Artificial Sequence: Synthetic coding sequence
  source 1..594: mol_type = other DNA
atggtgttcttccactactgcgtggtgagcaactacttctggctgttcattgaagggctgtatctgttcactctcctggtcgagactttcttcccagagcgaagatatttctactggtacactatcatcggctggggcacgcctactgtttgtgttaccgtgtgggcaaccctccgcctgtacttcgatgatactggctgttgggacatgaatgattccacagctctgtggtgggtgatcaagggacctgtcgtgggctctattatggttaattttgttttgtttattggcatcattgtgatattggtccaaaaattacaatcacctgacatggggggcaatgaaagcagtatctatctgacaaatctctctcctcgagtccctaaaaaagccagggaagacccgctgcctgtgcccagcgaccagcacagccttccgttcctgtcctgcgtccagaagtgttattgcaagcctcagcgggcccaacagcactcctgcaaaatgtcagaactttctacaattactttaagactggccagaagtaccctccttttgatacccctgttcggcatacactatacagtgtttgcttag

SEQ ID NO: 178305 - DNA, 1491 bp, synthetic construct
  misc_feature 1..1491: note = Description of Artificial Sequence: Synthetic coding sequence
  source 1..1491: mol_type = other DNA
atggccggcgtggtgcacgtgagcctggccgccctgctgctgctgcccatggcccccgctatgcactccgactgtatttttaagaaagagcaggcgatgtgtctggagaaaatccagagggcaaacgaactcatgggcttcaatgacagctctccgggttgtccaggtatgtgggacaacatcacgtgctggaaaccggcccatgtgggtgaaatggtgctggtgagttgcccagagctgttccggatctttaatcctgatcaggtgtgggaaactgagacaattggtgagagcgactttggagacagcaacagtctggacctcagtgatatgggagttgtgtcaaggaattgcacagaagatgggtggtcagagccattcccccactatttcgacgcctgcggctttgacgaatacgagtctgaaactggtgaccaggactactactacctgagcgtgaaggcactttataccgtaggctattctacctccctggttactctcactacagcaatggtgatattgtgccgctttagaaagctgcattgcacccgcaattttattcacatgaatcttttcgtctctttcatgctgcgcgcaatttctgtgttcatcaaggattggatattgtacgcagagcaggattcaaaccactgtttcatctcaaccgtggaatgcaaagccgtgatggttttttttcactactgtgtcgtgagtaattacttttggctgtttatcgaaggcctatatctcttcacattactggttgaaacctttttcccggagagacggtatttctactggtacacaattatcgggtggggcacccctaccgtttgcgttactgtctgggccacccttcgcctgtattttgatgatacggggtgctgggacatgaatgatagcaccgcactctggtgggtcatcaaagggccagttgtaggaagcattatggtgaatttcgtgctctttatcggtattatcgttatcttagtgcagaagcttcaatcaccggacatgggcggtaacgaatcttctatttacttctcctgtgtccagaagtgctattgtaagccacagagggcacaacaacattcatgcaaaatgagcgagcttagcactattactctgagacttgcccggtcaactctgcttcttatccccctgttcgggatacactacactgtcttcgcattcagtcccgaaaatgtgtccaagagggaacgcctggtgtttgaactcggtttgggcagctttcaaggcttcgttgttgccgttctttactgttttttaaacggagaggtgcaggctgaaattaagcggaagtggcgcagttggaaggtaaacagatacttcgcagtggactttaaacaccgccatccaagcctggcttcatcaggagttaacggtggcacccaactgagcatcctctccaagagctcatcacagatccggatgtctggattacctgcggataacctggctacctag

SEQ ID NO: 178306 - DNA, 1575 bp, synthetic construct
  misc_feature 1..1575: note = Description of Artificial Sequence: Synthetic coding sequence
  source 1..1575: mol_type = other DNA
atggccggcgtggtgcacgtgagcctggccgccctgctgctgctgcccatggcacctgcaatgcacagtgactgcatcttcaagaaagaacaggcaatgtgtttggagaaaattcagcgggccaacgagctgatgggattcaatgactcgtctccgggatgtccagggatgtgggataacataacctgttggaagcctgcccacgtgggcgaaatggttctggtgagctgcccagagctgtttagaattttcaacccagaccaggtctgggagacggagactattggcgagagtgactttggagatagcaatagcctggatctcagcgacatgggcgttgtgagcaggaattgcacagaagatggttggtctgaaccttttccccattacttcgacgcatgtggcttcgacgagtacgagagcgaaacaggtgatcaagattattactacttatctgttaaagctctctatactgtgggctacagtactagcctggtgacactgaccacagcaatggtgatactctgtaggttccgcaagcttcactgcacacgtaacttcatccacatgaacctgtttgtatcttttatgctacgggccattagcgtgtttatcaaggactggattttatacgcagaacaggattccaatcactgcttcatatcaaccgttgaatgcaaagcggtgatggtcttttttcactattgtgtggtgtccaactatttctggctgttcattgaaggtctgtatctcttcacccttctggtcgagactttctttcctgagagacgatatttttactggtacaccatcataggttggggaacacctaccgtgtgcgttaccgtttgggccaccctgaggctatacttcgatgacaccggctgttgggacatgaacgattcaacagccctctggtgggttatcaaagggccagtcgtggggtctatcatggtgaacttcgtgctgtttattggcattattgtgatcctggtgcaaaagctacagagccctgatatggggggcaatgagagttcaatttacctgactaatctctcgcctagggttcccaagaaggccagggaagatcccttgcccgtcccctctgaccagcatagcctgccatttctgagttgcgtgcagaaatgctattgtaaaccccagcgggctcaacaacacagctgtaagatgtccgaactctctactattactctccgcttggcacgtagcactcttttactgattcctctttttgggatccattacacagtgttcgcttttagccctgaaaacgtgagcaagcgtgagcggctcgtattcgaacttgggctcggtagcttccagggttttgtggttgcggtattatactgctttttgaacggagaggtacaggcagagatcaagagaaaatggagaagctggaaagtgaatcgatacttcgctgtggatttcaagcaccggcatcccagcctggccagctccggggtgaatggaggtacgcaactctcaattcttagtaagagcagtagccaaattcgcatgtcaggcctgcctgctgacaatttggccacatag

SEQ ID NO: 178307 - DNA, 225 bp, synthetic construct
  misc_feature 1..225: note = Description of Artificial Sequence: Synthetic coding sequence
  source 1..225: mol_type = other DNA
atggccggcgtggtgcacgtgagcctggccgccctgctgctgctgcctatggcaccagctatgcactctgattgtattttcaaaaaggaacaagctatgtgccttgaaaaaatccaacgcgccaacgagttgatgggcttcaatgatagctcaccaggctgccccgggatgtgggataatatcacttgctggaaacctgcacatgtcggtgagatggtcttgtag

SEQ ID NO: 178308 - DNA, 447 bp, synthetic construct
  misc_feature 1..447: note = Description of Artificial Sequence: Synthetic coding sequence
  source 1..447: mol_type = other DNA
tgagccaccctgcggctgtacttcgacgacaccggctgctgggacatgaacgattccacggcattgtggtgggtgatcaagggacctgtggtgggctctatcatggttaactttgtgctctttataggcatcattgtcatccttgtacaaaaacttcagagcccggacatgggtggtaacgaatcctccatctacctgacaaatctgtctccccgcgtgcctaagaaagccagggaggatcctcttccagtaccatccgaccagcacagcctacctttcctgaggctagctaggtcaaccctcctccttatacctttatttgggatccactacaccgtctttgccttttctcccgaaaatgtgagtaaacgtgaacgacttgtctttgagttgggattggggtcttttcaggggtttgtcgtagctgtgctgtattgctttctgtag

SEQ ID NO: 178309 - DNA, 1344 bp, synthetic construct
  misc_feature 1..1344: note = Description of Artificial Sequence: Synthetic coding sequence
  source 1..1344: mol_type = other DNA
atggccggcgtggtgcacgtgagcctggccgccctgctgctgctgcctatggcccctgctatgcattcagactgtatttttaagaaagaacaggccatgtgcctggagaaaattcagcgcgccaacgaattgatgggcttcaacgattctagccccggctgtccggggatgtgggataacatcacatgttggaaacctgcccatgtcggcgaaatggtgttagtaagttgccctgagctgttccgcatcttcaacccagatcaggacatgggtgtggtgagcagaaactgcactgaagatgggtggtccgagcctttccctcattatttcgatgcgtgtggttttgatgagtatgagagcgagacgggagaccaggattattactacctgtcagtaaaagccttgtatacagtaggatactcaacctcactggtgacactcacgacggcgatggtgattctatgtagattccgcaagctgcactgcactagaaactttatccatatgaatctgttcgtaagctttatgctcagagcgatttccgttttcattaaggactggattctttatgccgagcaggactcgaaccattgtttcatatccaccgtagagtgtaaggccgtcatggtctttttccattactgcgtagtgagcaattacttctggctcttcattgagggcctctatttattcacactgctcgtcgagacattctttccagaacgaagatacttttattggtatacaataattgggtgggggactccaaccgtgtgtgtgacagtttgggcaacattgaggctttacttcgacgatacaggatgttgggatatgaacgatagcacagctctctggtgggttataaagggacccgtggtggggtcaatcatggtgaattttgtgttattcatcgggataatagttatcctggtgcagaagctccaatctccggatatgggtggcaatgaatctagtatttacctcagacttgctcgctctaccctgctattgattcctctgtttggaattcattacacggtttttgccttctcccctgagaatgtctctaagagggaacgcctagttttcgaattgggcctgggtagctttcagggcttcgtggtggccgtgctgtactgcttcctcaacggggaggtccaagccgagataaagaggaaatggcgctcctggaaggtgaacagatactttgctgtggatttcaaacatcgacacccatccctggccagttccggagttaacgggggcacgcagctcagtatcctgtccaaatcatcctcccagattcggatgtctgggttgcctgcagataatctcgctacatag

SEQ ID NO: 178310 - DNA, 705 bp, synthetic construct
  misc_feature 1..705: note = Description of Artificial Sequence: Synthetic coding sequence
  source 1..705: mol_type = other DNA
atggaccccggcctgcagcaggccctgaacggcatggccccccccggcgataccgccatgcatgttcctgcaggctctgtggcctctcatctagggacaacctctcgtagttacttctatctcaccacggccacacttgctctgtgtctggttttcaccgtggccacgataatggtcttggttgttcagcggactgatagcattccaaattccccggataacgttccgctaaagggtgggaactgttctgaagatctgctgtgcattctgaagcgggctccctttaagaaaagctgggcttatctgcaggttgctaaacatttgaataaaacaaagctgtcatggaacaaagacggaatcttgcacggggtcagatatcaagacggtaacttagttatccagttcccaggtttatactttataatctgtcagctgcagttcctcgtccaatgtcctaacaacagcgtagacctcaaactcgaactattaattaacaagcacattaaaaaacaggcactggtcaccgtctgcgagtccgggatgcaaaccaaacatgtttaccagaatctcagccagttcctgctggactacctgcaggtcaataccaccatcagcgttaatgtggacacatttcaatatattgacacatctactttccccttggagaatgtcctgagcatcttcttgtacagtaacagtgattag

SEQ ID NO: 178311 - DNA, 585 bp, synthetic construct
  misc_feature 1..585: note = Description of Artificial Sequence: Synthetic coding sequence
  source 1..585: mol_type = other DNA
atggaggagaagctgaagaagaccaagatcatcttcgtggtgggcggcccaggcagcggtaaaggcacgcaatgcgaaaagatagttcagaagtatggctacacccacctctccacgggagacctgcttagaagtgaagtgtcatcgggatccgccagggggaagaaactgagtgagatcatggaaaagggtcaactagtgccactagaaactgtcctcgatatgttgagagacgccatggtggccaaggtgaacacgtcgaagggattcctgattgatgggtacccccgtgaggtccaacagggagaagagtttgaacggcggatcgggcagcccactctgctgctctatgtggacgctggtcctgaaaccatgacccagcggctgctcaagagaggagagacttccggtagggtggatgataacgaggaaactattaagaagaggctggaaacatattataaagcaacagagccagtgattgccttctatgaaaagcggggcattgtgagaaaggtaaatgccgaaggatctgtcgacagcgtcttctcccaggtgtgtacccacttggacgcgctcaaatag

SEQ ID NO: 178312 - DNA, 585 bp, synthetic construct
  misc_feature 1..585: note = Description of Artificial Sequence: Synthetic coding sequence
  source 1..585: mol_type = other DNA
atggaggagaagctgaagaagaccaagatcatcttcgtggtgggcggtcctggatccggtaagggcacccagtgcgagaaaatcgtccagaaatatggatacactcacttaagcaccggtgacctgctgagatccgaagtatccagcgggtcagctaggggcaaaaagttgtcagagataatggagaagggccaacttgtgcccctggagacagttctggacatgctgcgggacgccatggtggcaaaagtgaatactagcaaaggcttcctgatcgacggttatccaagagaggtgcagcagggagaggaattcgaaagaagaatcgggcagcctacgctccttctgtacgtggatgccggcccggagactatgacccaaagactgctgaaacggggtgaaacgtccggacgggtcgacgataacgaagaaaccattaagaagcgcttagagacatactacaaggccacggaacccgttatcgccttttatgaaaagcgcggcatagttaggaaggtaaatgccgaagggtcagtcgatagtgtcttcagccaagtgtgcactcacctggacgccctcaagtag

SEQ ID NO: 178313 - DNA, 720 bp, synthetic construct
  misc_feature 1..720: note = Description of Artificial Sequence: Synthetic coding sequence
  source 1..720: mol_type = other DNA
atggcccccagcgtgcccgccgccgagcccgagtaccccaagggcataagagcagtattgctcggtcccccgggcgcaggcaaagggactcaggcgccacgactggccgaaaacttctgtgtgtgtcacttggccaccggcgacatgctcagggccatggtcgcctccggtagcgagctcggaaagaaattgaaggccacaatggatgctggaaagctagtaagtgatgagatggtcgttgagttaattgaaaaaaacttggaaactcccctctgtaaaaacggcttccttctcgacggtttcccgagaacagtgcggcaggcggagatgctcgatgacctgatggaaaaacgcaaggagaaactggacagcgtgattgagttctccatccctgactcactccttatcagaagaatcaccgggcggctgattcatcccaaaagtgggcgtagctaccatgaagagttcaacccccctaaagagcccatgaaagatgatattaccggggaaccactcatccggagatcggacgacaacgagaaagctttgaagatccgcctccaggcctaccacacccagacgactcccctaatcgagtactatcggaagaggggaatccattcagccatagatgcctcccagactcccgacgtggtgtttgcctcaatcttggccgcgttttctaaggctacgtgcaaggacttggtcatgtttatttag

SEQ ID NO: 178314 - DNA, 699 bp, synthetic construct
  misc_feature 1..699: note = Description of Artificial Sequence: Synthetic coding sequence
  source 1..699: mol_type = other DNA
atggcccccagcgtgcccgccgccgagcccgagtaccccaagggcatacgcgcggtgctgctggggccacccggggctggtaagggtacccaggccccccggctcgctgaaaatttttgtgtctgtcatcttgccaccggtgacatgcttagggcaatggtcgcttccggtagcgaactaggcaagaagctcaaggcaacaatggacgccggcaagctcgtctctgatgagatggtcgtggaattgatcgagaagaacctcgagacccctctatgtaaaaacggcttcctcctcgatggctttcccaggactgtgaggcaagccgagatgctggatgacctgatggaaaaacgcaaagagaaactggactccgtgattgagttcagcatccctgacagcctcctgattcgtcgcattacaggcagactgatacaccctaaatcaggcaggtcctatcatgaagagttcaaccctcctaaagaaccaatgaaagacgatataaccggagagccccttattcgtcgttcagatgataatgaaaaggctcttaaaatccgcctgcaggcataccatacccagacaacacctctgatcgaatattatcgaaaaagaggcatccactccgccattgatgccagtcaaaccccagatgtcgtatttgccagcatacttgccgcttttagcaaggccacgtcctag

SEQ ID NO: 178315 - DNA, 609 bp, synthetic construct
  misc_feature 1..609: note = Description of Artificial Sequence: Synthetic coding sequence
  source 1..609: mol_type = other DNA
atggcccccagcgtgcccgccgccgagcccgagtaccccaagggcatccgggccgtgcttctcgggccaccaggggccgggaagggtacacaggcacccaggctggccgagaacttttgcgtgtgccacttggcaactggtgatatgcttagggctatggtcgctagtgggtcggagctgggcaagaagttgaaagcaaccatggatgctggaaagctcgttagcgacgagatggtcgtagaactgatagagaagaacctggaaactccactgtgtaagaatggcttcctcttagatgggtttcctcggacagttcgccaggcagagatgctggatgacctaatggaaaaaaggaaagagaaactagactctgtaattgaatttagcattccagattcactgctgatccgcagaatcactggtaggttgatccatcccaagtctggcagatcttaccacgaagagtttaatccacccaaagaacctatgaaagacgatatcactggagagcctctgatacgccggtccgtcattgggcaggccaagcgctcattcctgaggctcgcgaagatctccttcgatgtactgatcaaaaaggctctcgcttag

SEQ ID NO: 178316 - DNA, 474 bp, synthetic construct
  misc_feature 1..474: note = Description of Artificial Sequence: Synthetic coding sequence
  source 1..474: mol_type = other DNA
atgacccggctggccctgcacgagctgaagaacctgacccagtactcttggcttttagacgggttcccccggacacttccacaggccgaggccctcgaccgcgcttaccagatcgacactgtcattaatctcaacgtgccctttgaagtaattaagcagcgtcttaccgctagatggattcatcccgccagtggccgcgtgtacaacattgagtttaatcctcctaagactgtagggattgacgacctgacaggagagcccttgatccagcgggaggatgataagcctgagacagttatcaagcgacttaaggcttatgaagaccaaaccaaaccagtgctggagtactaccagaaaaaaggcgttttagaaaccttcagtggtaccgaaactaacaaaatctggccatatgtctacgctttcctgcaaacaaaagttccccagcggtctcagaaggcctccgtgactccttag

SEQ ID NO: 178317 - DNA, 684 bp, synthetic construct
  misc_feature 1..684: note = Description of Artificial Sequence: Synthetic coding sequence
  source 1..684: mol_type = other DNA
atgggcgccagcgcccggctgctgcgggccgtgatcatgggcgccccgggctcaggcaaaggcactgtgtcttcgaggattactacccactttgagctcaagcacttgagtagcggtgacctacttcgggacaatatgctccgaggcactgagattggagttctagcaaaagcctttatcgaccagggcaagctcataccggatgatgtgatgactcggctcgcactccacgagctgaagaatctgacccaatattcttggttgttagacggatttccaaggaccctcccccaggcagaggccctcgatcgcgcctatcagattgacacagtaataaacctcaatgtaccatttgaggtgataaaacagagattaactgcgcggtggatccacccagcttctggcagggtctacaacatcgaattcaaccctcctaagaccgtggggattgacgacctgaccggagaaccactcattcagagagaagatgacaagccagagacggttatcaagaggctgaaagcgtacgaggaccaaactaagcccgtgctcgagtactaccagaagaagggcgtgctggagacctttagcggcacggagaccaataagatctggccttatgtgtacgcgttcttgcaaactaaggtgccccagagaagccaaaaagcgtccgtaactccatag

SEQ ID NO: 178318 - DNA, 564 bp, synthetic construct
  misc_feature 1..564: note = Description of Artificial Sequence: Synthetic coding sequence
  source 1..564: mol_type = other DNA
atgggcgccagcgcccggctgctgcgggccgtgatcatgggcgcccctggcagtggaaaagggaccgtaagttcaagaatcaccacccacttcgagctcaagcacctttcgtctggtgatttgctgcgcgataacatgctgcgaggcacaggattcccgaggaccctgccccaggccgaggccttggatagggcgtatcagattgacactgtcataaatttgaacgtgccctttgaggttatcaagcagagactcacagctagatggatccaccctgccagcggacgcgtgtataatattgagtttaatccacctaaaaccgtggggatcgacgatctgacgggtgagccgttgattcagcgggaagatgacaagccagagacggtcatcaaacgacttaaagcttacgaagaccaaactaaaccggtactcgagtactaccagaagaagggagtcttggagacattttcaggaactgaaacgaataaaatttggccctacgtttacgcattcctgcagactaaggttcctcagcggtcacagaaggcttctgtcactccctag

SEQ ID NO: 178319 - DNA, 474 bp, synthetic construct
  misc_feature 1..474: note = Description of Artificial Sequence: Synthetic coding sequence
  source 1..474: mol_type = other DNA
atgacccggctggccctgcacgagctgaagaacctgacccagtacagctggctcctggacggctttccgcgaaccctgccccaagccgaggccttggatagggcctaccagatcgacaccgttatcaatctgaacgtgccgttcgaggtaattaaacagagactgaccgccagatggatacacccagctagcggacgggtgtacaacatcgagtttaacccaccaaagaccgtgggaattgatgatctgaccggcgaaccactgattcagcgggaggatgataagcccgaaacggtcatcaaacgactcaaagcgtacgaagaccagaccaagcctgtgctcgagtattaccaaaagaaaggcgtgttagaaaccttttccggcactgaaacaaataagatttggccatacgtgtatgcatttctgcaaaccaaggtgccccagcgatcacaaaaagcctcggttaccccgtag

SEQ ID NO: 178320 - DNA, 1611 bp, synthetic construct
  misc_feature 1..1611: note = Description of Artificial Sequence: Synthetic coding sequence
  source 1..1611: mol_type = other DNA
atgtgcagcaagcccgaggaccccgtggagtacctggagagctgcctgcaaaaggtaaaagaattgggcggatgcgacaaggtcaagtgggatacctttgtatctcaggagaagaaaactctgcccccccttaatggggggcagtctcgacggtcctttctgcggaatgttatgcctgagaactctaacttcccttatcgaaggtacgataggttgcctccgattcaccagttttctattgaaagcgataccgacctgagtgagacggctgaattgatcgaggaatacgaggtattcgatcctacccgcccaaggccaaaaataatcctggttattggcggaccggggtcaggcaaggggacacagtccttgaagatcgccgaaaggtacgggtttcagtacattagtgtcggggagctgctaagaaagaagatccactccacatcatcgaacaggaaatggtcactgattgctaagattattaccaccggcgagttagcaccccaggagacaaccataaccgagatcaagcagaaactgatgcagatccccgacgaggagggcatcgtcatcgacgggtttccgcgtgacgtggcccaggccctgtccttcgaggatcagatctgtactcccgaccttgtcgtattcttagcatgtgccaaccagcgactgaaggaacggttgcttaaaagagccgagcagcagggacgaccagacgataatgtcaaagctacccagaggaggctaatgaacttcaagcagaatgcagcaccccttgtgaagtattttcaagagaaggggcttatcatgaccttcgacgccgacagagatgaagacgaggtcttctatgacatctcaatggctgtcgacaacaagctgtttccgaacaaagaagcagccgccggcagcagtgatctggacccatcgatgatcctagataccggagagattatcgacaccggctctgactacgaagatcaaggggatgaccagctgaacgtcttcggcgaggacactatgggcggattcatggaggatctgcgcaagtgcaagatcatcttcataattggaggccctgggagcggtaaaggtactcagtgcgagaaactggtcgagaaatatggcttcacgcatctctcaactggtgaacttctccgggaggagttagcaagtgaatcagaaaggtctaagctgattagggatattatggagagaggcgacctggtcccctccggtatcgtcctggaattgctaaaagaggccatggtggcaagcctaggagacacgagggggttccttatcgatggttacccacgcgaggttaagcagggggaagaatttgggcggagaatcggagacccccagctcgtcatttgcatggattgcagcgccgatactatgactaatagactgctgcagaggtccaggagctctctacctgttgatgataccaccaagactattgccaaaagactggaggcctactatcgagcatccattccagtgattgcctactacgagactaagacccagcttcataagattaatgccgagggaacacctgaagatgtttttttgcagttgtgcaccgccattgattccattttctag

SEQ ID NO: 178321 - DNA, 1689 bp, synthetic construct
  misc_feature 1..1689: note = Description of Artificial Sequence: Synthetic coding sequence
  source 1..1689: mol_type = other DNA
atgaacaccaacgacgccaaggagtacctggcccggcgggagatccctcaactctttgaatctcttctgaatggactgatgtgctctaagccagaggatccagtggaatacctggagtcctgcctccaaaaagtgaaggaactgggcgggtgcgacaaagtcaaatgggatacttttgtgagtcaagagaaaaagacactgcctccgctcaatggcggacagtccagacgctccttcctcaggaatgtgatgcccgagaattccaactttccctataggcggtacgatcggctgcctcccattcaccaattcagcatcgagtccgatacagaccttagcgaaaccgccgaacttatcgaggagtatgaagtcttcgaccctactcggccacggcccaagatcattctggtcattggaggacccgggtctggaaaaggcacccagagtctgaaaattgccgagcgatatggcttccaatacatatccgtgggcgagctcttgcgaaaaaagatccactccaccagtagtaaccggaaatggtctctgatcgctaaaataataacaactggagagttggccccgcaggagacgaccatcactgagatcaagcagaagctcatgcagataccagacgaagaggggattgtcatagatggattccctcgggacgtggcacaggccctatcctttgaggaccagatctgcacacccgaccttgtggtgtttttagcgtgcgccaaccagcgactgaaggaaagacttttgaaacgggcggagcagcagggcagacccgatgataatgtcaaagctacacagcggcgtctgatgaactttaaacagaatgcggctcctctggttaagtactttcaggaaaagggtttaatcatgacgtttgatgccgaccgagacgaggatgaagtcttttatgacatctctatggccgtggacaataaactgtttccaaacaaggaggctgccgcaggttcatctgacctggacccctctatgatcttagacacaggtgaaatcatcgacacgggtagcgactacgaagaccaaggagacgatcaattgaatgtctttggggaggacacgatggggggtttcatggaggacctccgaaaatgcaagataatcttcatcattggcggtcctgggtctggcaagggaacccagtgtgagaaactggtggaaaaatacgggtttactcacctcagtacgggcgaactcctgcgagaagaactggcctccgaatcagaacgttcaaagctgataagggacattatggaaaggggggatctggtgccgagcggtatcgtactggagttactgaaggaggctatggtagcttccctgggggatacccgcggatttttgatcgacggctatccccgtgaggtcaagcagggtgaggagttcggcagaagaataggtgatccacaattagtcatttgtatggactgctccgcggatacgatgacaaaccgcctgcttcaaagatccaggagtagcctccccgttgacgatacaaccaagactatcgccaagagactggaggcttactatcgggcaagcattccagttattgcgtattatgaaaccaagacacagctgcacaagattaacgcggaggggaccccggaagacgtgtttctgcaactgtgtacagccattgatagcattttttag

SEQ ID NO: 178322 - DNA, 531 bp, synthetic construct
  misc_feature 1..531: note = Description of Artificial Sequence: Synthetic coding sequence
  source 1..531: mol_type = other DNA
atgtgcagcaagcccgaggaccccgtggagtacctggagagctgcctgcagaaggttaaagagctgggcggatgcgacaaggtgaagtgggatacctttgtgagccaagagaaaaagacccttcccccacttaacggaggccagagcaggcgatcgtttctgcgcaatgttatgcctgagaatagcaacttcccttatcggagatacgaccggctgccaccaatccatcagttctccatcgagagtgatacggacctgagtgagactgctgagctcatcgaagaatatgaagtgtttgatcccaccaggcccaggccaaagattatcctggtgatcggcggacccggcagtggcaagggaactcaatcactcaaaattgctgaaaggtatggttttcagtatataagcgttggggaactcctccggaagaagattcacagcacaagctctaataggaaatggtccctgatcgctaagatcatcacgaccggcgaattggccccccaggagacgacaatcacggagatctag

SEQ ID NO: 178323 - DNA, 1647 bp, synthetic construct
  misc_feature 1..1647: note = Description of Artificial Sequence: Synthetic coding sequence
  source 1..1647: mol_type = other DNA
atggccaagttcatgacccccgtgatccaggacaaccccagcggctggggcccctgcgccgttcccgagcaatttagagatatgccataccagccattttcaaagggagatcggctgggaaaagtcgcagactggacgggtgctacttatcaggataagaggtacactaacaaatacagcagtcagtttggaggaggaagccagtacgcctactttcacgaggaagatgagagctcgtttcagctcgtcgataccgctcggacacagaagactgcctaccagaggaaccggatgcgttttgcacagcgtaatctgaggcgcgataaagacagacgcaacatgttgcagtttaatctccagatcctgcccaaaagcgcaaaacagaaggaacgagagcgcattcggctgcagaagaaattccaaaaacagtttggagtccggcagaagtgggaccagaagagccagaagccgagggattcgagtgtggaggttagatccgactgggaagtgaaggaggaaatggattttcctcagcttatgaagatgaggtacttggaggtgtcagagccccaggacatcgagtgctgtggcgctctggagtattatgataaagccttcgaccgcataaccacccgcagcgagaaaccgctgaggtccattaaacgcatctttcacacggtgactacaaccgacgaccctgtgattcgcaagcttgcaaagacacagggaaacgtgttcgccacagatgctattctggcaacactgatgtcgtgcacccgctcggtgtactcgtgggatattgtcgttcaaagggtaggctctaaactcttctttgacaagcgcgataattcagacttcgacctgttgactgtttcggagactgccaacgaaccgccacaagatgaaggcaactctttcaacagtcctagaaacctggcaatggaggccacctacataaatcacaacttctctcagcaatgcctacggatgggaaaagaaaggtataattttccgaaccccaaccccttcgtggaagatgacatggataagaacgagattgctagtgtcgcttacagataccgccgttggaaattaggcgatgacatcgatttgattgtacgctgtgagcacgacggagtgatgaccggcgccaatggagaggtgagctttatcaacatcaagaccctgaacgagtgggattcaaggcattgcaacggggtggattggcggcaaaagcttgacagccagaggggagccgtgattgcaacagaacttaaaaataattcttacaaactcgcgcggtggacttgctgcgctctgctggctgggtctgagtacctaaaactcgggtatgtcagccgctaccacgtcaaagatagctctaggcatgttatattaggaacacaacagttcaagcctaacgaattcgcctcgcagatcaatctcagcgtggaaaatgcttggggcattttgcgttgtgtgatcgatatttgcatgaagctcgaagaagggaaatatctgatcctaaaggatcccaataagcaggtgattagggtatacagcctcccggacggcacattttcctccgatgaagatgaagaggaagaggaagaggaagaagaagaggaagaggaagaagagacatag

SEQ ID NO: 178324 - DNA, 1278 bp, synthetic construct
  misc_feature 1..1278: note = Description of Artificial Sequence: Synthetic coding sequence
  source 1..1278: mol_type = other DNA
atggccgccggcggcgaccacggcagccccgacagctaccggagcccgttggcaagccggtatgcctccccagagatgtgctttgtcttcagtgataggtataagtttcgtacatggagacaactgtggctgtggctagccgaggccgaacaaactttaggcctccctattactgacgagcagatacaagagatgaagtcaaacctggaaaatattgatttcaagatggccgcagaagaggagaagaggctgagacacgatgtcatggcgcatgtgcataccttcggccactgctgtcctaaagctgcgggcatcattcacctgggtgctacaagttgttacgtgggtgacaacacagatctcatcattctgagaaacgccctggatctcctgctaccaaaattggcacgggtgatctcaaggctggcagacttcgcgaaggagcgggccagcctccccacactcgggtttacccattttcagccagctcagctcactactgttggcaagcgatgttgcctgtggatccaagacctgtgtatggacctacaaaaccttaaacgggtgcgcgacgaccttcgatttaggggagtgaagggcacgacggggacccaggcctcattcctgcaactcttcgagggtgacgaccacaaggttgagcagctcgataagatggtgaccgaaaaggccggttttaagcgggcctttataatcacgggacaaacatacacccggaaggtggatatcgaagtgttgtccgttttagcttccctaggcgcatcagtccacaaaatttgcaccgatatacggctacttgcaaacctgaaggaaatggaagagccttttgagaagcagcagatcggatcttctgcaatgccatataagcgaaatcctatgagatccgaaagatgttgctcacttgcgagacacttgatgactctggtgatggatcctctgcaaaccgcatctgtgcagtggttcgaaagaaccttggatgacagcgctaatcgaagaatttgcctggcggaggcattccttactgcagatactattctgaatacccttcagaatatatccgagggcctcgtggtgtacccaaaagtcatcgaaaggcgcattagacaggagctgccctttatggctacagagaacataattatggccatggttaaagccggcggtagtcgacaggtgcagcgctttctggaggaagaagtgtaccctttactaaaaccatacgaaagcgtaatgaaagtgaaagctgaactatgcctttag

SEQ ID NO: 178325 - DNA, 1497 bp, synthetic construct
  misc_feature 1..1497: note = Description of Artificial Sequence: Synthetic coding sequence
  source 1..1497: mol_type = other DNA
atggccgccggcggcgaccacggcagccccgacagctaccggagccccttagcatcaagatacgccagcccagagatgtgctttgtgttcagcgacaggtataagtttcggacctggaggcaactgtggctctggttagctgaagccgagcaaactttaggcttaccaatcacagacgagcagatccaagagatgaagagcaatctggaaaatatagactttaagatggcagcagaggaggagaagagactccgccatgatgtcatggcgcacgtgcacactttcggacattgttgccctaaagccgccggaattatccacctcggtgctacatcgtgttatgtcggggacaataccagccttattctctcacgaggagtgattaaggcatattgtaacctgcgcctccctgggagcgactcttcaccagtgtctgtctcccagcttgcaagggtgatttcgcgcctagccgattttgcaaaagagcgggcctccctgccaaccctgggctttactcacttccagcctgcccagctaaccaccgtgggtaaaaggtgttgcctgtggattcaggacctgtgcatggacttacaaaaccttaagcgagtgcgcgatgacctgagattccgcggtgtcaagggaacaacaggaacccaggcatcttttttgcagctgtttgagggggacgaccacaaagttgagcagctagataagatggtcaccgaaaaggccggctttaaacgggctttcattataactgggcaaacgtatactcgtaaggtagacattgaagtattgagcgtgctcgcctctctcggggctagtgtgcataagatttgtaccgatattcgtctgctggcgaacctcaaagagatggaagaaccatttgagaaacagcagataggtagcagcgccatgccttacaaacgcaacccgatgcgctccgagcgctgctgcagcctcgcgcgtcacctgatgactcttgtgatggatcccctgcagactgcctccgtacagtggttcgaacgaaccctcgatgacagtgctaacaggaggatatgcctcgccgaagcttttcttacggcggacaccattctgaatacgctacagaacatttccgagggattggttgtgtatcccaaggtaatagagcgacggatacggcaggagctcccctttatggcgaccgagaatattattatggcaatggtaaaagccggcggttcgcgacaggattgccacgagaaaattagagtgctgtcccagcaggcggccagcgtcgtcaaacaggaaggaggcgacaatgacctgatcgagagaatccaggtcgacgcttactttagtccaatacactcccaacttgatcatcttctggatccatccagtttcaccgggcgcgccagccaacaggtgcagcggtttcttgaagaagaagtctacccccttctcaaaccttacgaatccgtaatgaaggtgaaagcggagctctgcctgtag

SEQ ID NO: 178326 - DNA, 915 bp, synthetic construct
  misc_feature 1..915: note = Description of Artificial Sequence: Synthetic coding sequence
  source 1..915: mol_type = other DNA
atggacctgcagaacctgaagcgggtgcgggacgacctgcggttccgaggtgtcaagggaactaccggtacacaggcctccttcctgcagttattcgaaggcgacgatcacaaagtggaacagttggataagatggtgaccgagaaagccggattcaaacgcgccttcatcattaccggtcagacatacacgcggaaggtggacatcgaagttttatctgtattggcatcactgggggcatccgtccataagatctgcaccgatatccggttgctcgccaacctgaaagagatggaagaacccttcgaaaagcaacagatcggaagctctgcaatgccttataaacggaacccgatgaggtccgagcggtgctgctctctggctcggcacctgatgactttggtcatggacccccttcagacggcctcagtccaatggtttgagcgcacattggacgactccgccaatcgacgaatatgtttggccgaagccttccttacagccgatactattctgaacaccttacagaatatctccgaaggcctcgtcgtatatcctaaagttatcgagcggagaatacggcaagagctgcccttcatggccactgaaaatatcatcatggcgatggtcaaggctggtgggtccagacaggattgtcacgagaaaatccgagtgttgtctcagcaagctgcctctgtagtgaaacaggaaggcggggacaacgatttgatcgagaggatacaggtggatgcatatttctccccaatacatagccagctggaccatttgctggacccatcgtcctttacaggcagagccagtcagcaggtccagagattcctggaggaggaagtgtacccacttctaaagccctatgagagcgtgatgaaagtgaaagctgagctgtgcctttag

SEQ ID NO: 178327 - DNA, 384 bp, synthetic construct
  misc_feature 1..384: note = Description of Artificial Sequence: Synthetic coding sequence
  source 1..384: mol_type = other DNA
atggccgccggcggcgaccacggcagccccgacagctaccggagccctctggcaagtcgatatgcctcccctgagatgtgcttcgtgtttagtgaccgatataagtttcgcacatggcggcagctgtggctatggctcgccgaggcagagcagacgctgggactgcccatcactgacgagcagattcaagagatgaagtctaatctggaaaatatagactttaaaatggccgccgaggaggagaagcgacttcgacatgatgtcatggcccatgtccatacttttggacactgttgtcccaaagccgctgggataattcatctgggggccactagctgctacgttggagataacacagtgggtgcctgtgtggtgtacacatag

SEQ ID NO: 178328 - DNA, 1371 bp, synthetic construct
  misc_feature 1..1371: note = Description of Artificial Sequence: Synthetic coding sequence
  source 1..1371: mol_type = other DNA
atggccttcgccgagacctaccccgccgccagcagcctgcccaacggggactgcgggcgcccccgggcccgacctggagggaatagagttacagtggtgctgggggcccaatggggggacgagggaaagggcaaggtagtcgacttactcgcacaggacgcagacattgtgtgccggtgtcaggggggaaataacgcggggcatacagtcgttgtggatagcgttgagtatgacttccacttactcccttctggcattatcaatcctaacgtgacagcatttattggtaacggggtggtgatccatctgcccggcttgtttgaggaagccgagaagaacgtgcagaagggcaaaggactcgaaggctgggagaagcggctgattatatcagacagggcccacatcgtctttgactttcaccaggctgcagatgggattcaggagcaacagaggcaggagcaagctggaaaaaatctggggacgactaaaaagggcatcggccctgtttattccagtaaggcagcacgatctgggttgcgaatgtgcgacctggttagcgactttgacggcttcagcgaaaggtttaaggtccttgccaatcaatataaaagcatttacccaaccctagagatcgatatcgaaggtgagttgcagaagctgaagggatatatggagaagattaagccgatggtgagagacggcgtgtactttctctacgaagcactccacggccctcctaagaaaattctcgtggagggagccaacgctgccctcctagacattgatttcggaacttacccttttgtaacatccagtaattgcaccgtcggtggcgtgtgcacaggcctgggaatgcctcctcagaatgttggggaagtgtatggtgtggtgaaggcatataccacacgagtcggcatcggggcctttccaacggagcaggacaacgagatcggcgaactgctgcaaactcggggaagagagtttggggtcacaaccggcaggaaacgtagatgcggttggctcgatttagtgctcctgaagtatgcacacatgatcaatgggtttacggccttggcgttgaccaagttggacattctggacatgtttactgaaattaaggtcggggttgcttataaactcgatggagagatcatcccacatatccccgccaaccaggaggtgctgaataaggtggaggtgcagtacaagactttgcccggctggaacactgatatctctaacgccagggctttcaaggaactgccagtaaatgcccagaactatgtgaggttcatcgaggacgaactccaaattcctgtgaaatggattggagtcggcaaaagtcgggagtccatgatacagttgttttag

SEQ ID NO: 178329 - DNA, 1308 bp, synthetic construct
  misc_feature 1..1308: note = Description of Artificial Sequence: Synthetic coding sequence
  source 1..1308: mol_type = other DNA
atggccttcgccgagacctaccccgccgccagcagcctgcccaacggagattgcgacgaagggaaaggaaaagtggtggacttattggcccaggacgcggacattgtttgccggtgtcaaggaggcaacaacgccggacacaccgtggtggtagacagcgtcgaatacgacttccatcttctgccgtccgggatcatcaatcccaacgtgacagcttttatcggtaacggcgtggtaattcatctgcccggacttttcgaagaggcagaaaagaacgtgcagaaaggcaaaggattggaggggtgggagaaacggctgattatctccgaccgagcccatattgttttcgactttcaccaggccgccgacgggatccaagaacaacagcggcaggaacaagcaggtaagaatctgggcacaactaaaaaggggatcggcccggtgtactcgtccaaggccgccaggtcaggcctccgcatgtgtgaccttgtctcagattttgatggattctccgaaagattcaaagtgcttgctaatcaatacaaatccatttatcctaccctagagattgacatcgagggggagcttcagaaactgaagggttatatggagaagatcaaacccatggtgagggatggcgtttacttcctatacgaagctctgcacggaccgccaaagaaaatcctggtagagggagctaatgctgccctgcttgatattgattttggaacctatcccttcgtgacgagcagtaattgtaccgtcggcggggtgtgtaccggcctcgggatgcctcctcagaatgtcggcgaggtctacggggtagtgaaggcatacaccaccagagtcggcatcggggcttttcctactgagcaggacaatgagataggcgagctcctgcagacccggggccgggagtttggtgtgaccacgggccggaagcgccgctgcggttggctggatcttgtcttactgaagtatgctcacatgataaatggcttcaccgccctcgcactcaccaaattagacatcttagacatgttcacggagatcaaggttggcgtcgcctataaactggatggggagatcattccgcacattcccgccaatcaggaagtacttaacaaagtggaggtgcaatacaaaacgctgccagggtggaataccgatatcagcaacgcacgggcttttaaggaactgcctgtaaacgctcaaaactatgtgcgcttcatcgaagacgagctgcagataccagtgaagtggattggggtggggaaaagccgcgagtccatgatccagcttttctag

SEQ ID NO: 178330 - DNA, 1236 bp, synthetic construct
  misc_feature 1..1236: note = Description of Artificial Sequence: Synthetic coding sequence
  source 1..1236: mol_type = other DNA
atgtggatccagcagctgctgggcctgagcagcatgagcatccggtggccaggcaggcccctgggctcacatgcttggattcttatcgcgatgtttcaactggccgtagatttacccgcctgtgaggccctaggccccggtcccgaattctggcttttgccacgaagcccacccagacccccacggctgtggagttttcggagcggccaacccgcccgcgtgccggcccctgtttggagtcccaggcctccacgcgtggaacggatacacggtcagatgcagatgccaagagcccgccgggcacacaggccgcgggaccaggccgcagccctggttccaaaagctgggttggctaagccccccgctgcagccaaatctagcccgagtcttgcctcatcttcatccagctctagtagtgctgtcgccggaggggccccagaacagcaggctctgctgcgtaggggcaagcgccacttgcagggcgacggattgtcgtcctttgactctcgcggctcccgccccaccacagaaaccgagtttattgcttggggccctactggggatgaagaggccctggagtccaatacttttcccggcgtttatggccctaccaccgttagtattcttcagactagaaagaccaccgtagcagctacgacaaccacaaccaccaccgccaccccaatgacactgcagaccaaaggtttcaccgagagcctcgacccgcgacgaagaattcccggaggagtctccacaaccgagccctctacttctcccagtaacaatggcgaggtgacccagcctcccagaatactgggtgaagcctcaggcctggccgtgcatcagattatcactatcaccgtgagtctgatcatggtgatcgctgccctcataactacccttgttctgaagaactgttgtgcccagtcaggcaacacgcgccgcaacagtcaccaacgcaagacaaatcaacaagaagagagctgccaaaacttgactgattttccgagtgcccgcgtgccatcatctctcgatattttcacagcctataatgaaactctgcaatgcagtcatgagtgtgtcagagccagcgtgcccgtgtacaccgatgaaacactccacagcactaccggagagtacaagtcaacattcaacggaaacaggccctcatcttcagaccggcacttgatccctgtcgcctttgtgtctgagaagtggtttgaaatttcttgctag

SEQ ID NO: 178331 - DNA, 1236 bp, synthetic construct
  misc_feature 1..1236: note = Description of Artificial Sequence: Synthetic coding sequence
  source 1..1236: mol_type = other DNA
atgtggatccagcagctgctgggcctgagcagcatgagcatccggtggcccggtagaccgctcggttcgcacgcatggatcctgattgctatgtttcagcttgccgtcgaccttccagcttgtgaggcacttggtcctggcccagagttctggctgctgcctagatcccctccccgcccccctcgtctttggtccttcagatccggccagccggccagggtgcccgcgccagtctggtcgccccggccgcctcgagtagaacggatccatggccagatgcaaatgccccgggcccgcagagcccaccgccccagggaccaagctgccgcacttgttcctaaagctgggctggccaagccccccgctgccgccaagtcttcaccatcgttggcttccagtagttcaagttcatcttctgctgtagcaggcggagctccagagcagcaggcccttctccgacgcgggaagcggcacctgcagggggacggactttcttccttcgacagtcggggaagccggcccaccacggagaccgagtttattgcatggggaccgactggggacgaagaggcactcgaaagcaacacatttccaggggtctatgggcccacgactgtctctatcctccagacacgaaaaaccaccgtcgccgctaccacaaccacaactacaaccgctacacctatgacactgcaaactaaaggctttaccgagtctctggacccacgccgcaggattcctgggggcgtctcaacgaccgaaccttccacctcccccagcaacaacggagaggtgactcagcctccaagaattttgggagaagcatctggcttggctgtgcaccagataatcaccataactgtcagcctgatcatggttatcgccgcattgatcacaacgctggtccttaagaattgttgcgcccagtcaggtaacacacgtagaaactcccaccaacgcaaaactaatcaacaagaggaatcctgccagaacttaacagattttccaagcgcgcgagtgccatcttccctggatattttcaccgcctacaatgaaacactccaatgcagccatgaatgcgtaagggcatccgttcctgtctacactgacgaaacgctccatagcacgaccggagaatataagagcacattcaacgggaaccgcccaagctcctcagatcggcacttaattcctgtggcattcgtatctgagaaatggttcgaaatttcctgttag

SEQ ID NO: 178332 - DNA, 1155 bp, synthetic construct
  misc_feature 1..1155: note = Description of Artificial Sequence: Synthetic coding sequence
  source 1..1155: mol_type = other DNA
atggtgagcggcgactacagcctgggcctgaacgacctgaacgtgtctccacccgagctcacggtgcacgtaggcgatagcgcattgatgggatgcgtgtttcagagcaccgaggataaatgcatcttcaagatcgactggaccctgtcccctggagaacacgccaaagacgagtacgtgttatattactactcaaatctgagtgtccccatcggaaggtttcaaaacagggtccatctgatgggggacattctctgtaatgatggctccttgctgttacaggatgttcaggaagctgatcagggcacttatatctgcgaaatacgactgaaaggtgagagccaggtattcaaaaaggcagtcgtgctccatgtccttcccgaagaaccaaaggagcttatggttcatgtgggagggctcatccagatgggatgcgtcttccagtccactgaggtgaagcatgttaccaaagtcgagtggatcttcagtgggaggagggcgaaggaggaaatcgtctttcgatactaccataaactgcgaatgtccgtggaatattcccagtcttggggacactttcagaatcgtgtcaacttggtcggcgacattttccgtaacgacggcagtataatgctgcagggggtgagggagagtgacggtggaaattatacttgttcaatccaccttgggaatctcgtgttcaaaaagacaatagtgctccacgttagtccggaggaacctagaaccctcgtcaccccagcggcccttcgcccgctggtgcttggcgggaaccagttagtgatcatcgtgggaatcgtgtgcgccactatcctgcttctgcctgttttgatactgattgtgaagaaaacttgtggcaataagtcttcagtgaacagcaccgtgctcgtaaagaacacaaaaaagacgaatccggagattaaagaaaagccatgccactttgagagatgcgagggtgaaaagcacatctactctcctattattgtgagagaggtcatagaagaggaggagccaagcgaaaaaagcgaggccacatatatgacaatgcatcctgtttggccaagcttaaggagcgaccgtaacaatagtctggaaaagaagtcgggaggtggtatgcccaagactcagcaagccttttag

SEQ ID NO: 178333 - DNA, 1185 bp, synthetic construct
  misc_feature 1..1185: note = Description of Artificial Sequence: Synthetic coding sequence
  source 1..1185: mol_type = other DNA
atgttctgccccctgaagctgatcctgctgcccgtgctgctggactattccttaggcctgaatgacttaaacgtgtctcccccggagctaactgtgcatgtaggcgactctgccctcatgggatgtgtttttcagtcaacagaagacaagtgcatttttaaaatagattggactctcagcccgggagaacacgcaaaggacgaatatgtactttattattattccaacctgtccgtgcctatcggacgtttccagaacagagtgcacttgatgggggatattttatgcaacgacgggtcacttctcttgcaggacgttcaggaggccgaccagggcacgtatatatgtgagatccgtctcaaaggcgagtctcaggtgtttaaaaaggccgtagtgctgcacgtgttgccggaggagcctaaggaacttatggttcacgtgggagggttgattcagatgggctgcgtctttcagagtactgaggtcaagcacgtcactaaggtggagtggatcttctcaggacgacgcgccaaagaagagatcgtatttaggtattaccacaagttgaggatgagtgtggagtactctcagagctggggtcactttcaaaatcgggtgaacctcgtcggggacattttccgcaacgatggcagcattatgctgcagggcgtaagggaatccgacggaggcaattacacctgtagcattcacctgggaaatttggtttttaaaaaaaccatagtcctgcatgttagccccgaggaaccccgtacactggtaactcctgccgcactcaggccactggtgctcggcggtaatcagttggtaatcatcgtgggtatcgtctgtgccaccattctgcttctgccggttctcatcctcatcgtaaagaagacctgtggaaacaaaagtagcgttaattcgactgtgctggtgaaaaacaccaaaaagacgaaccccgaaattaaggaaaaaccgtgccattttgagcgctgtgagggcgaaaagcacatctattcgccaatcatagtacgggaagtaattgaagaggaggagccaagtgagaaatccgaggctacttatatgactatgcatcctgtttggccttctctgaggtcagaccgtaacaatagtctggaaaagaaaagcgggggtggcatgccgaagactcagcaggctttttag

SEQ ID NO: 178334 - DNA, 468 bp, synthetic construct
  misc_feature 1..468: note = Description of Artificial Sequence: Synthetic coding sequence
  source 1..468: mol_type = other DNA
atgttctgccccctgaagctgatcctgctgcccgtgctgctggactactctttagggctgaatgatctgaacgtgtcccctcctgagctgactgtgcacgtgggcgactctgccttaatgggatgcgttttccaatccaccgaggacaaatgtatcttcaagattgactggactctgtctcctggtgaacacgccaaagacgaatatgtcctgtattactattcaaatctgagcgtgcctatcggccgctttcagaatcgtgtacaccttatgggagacattctgtgcaacgatgggagtctcctcctgcaggatgtgcaggaggctgaccaaggcacttacatctgcgagatccggctgaagggcgagagccaggtctttaaaaaagctgttgtcctgcacgtcctgcctgaagagccgaaagaactgatggtccatgttggtggactgatccagatgggctgttag

SEQ ID NO: 178335 - DNA, 663 bp, synthetic construct
  misc_feature 1..663: note = Description of Artificial Sequence: Synthetic coding sequence
  source 1..663: mol_type = other DNA
atgggctgcgtgttccagagcaccgaggacaagtgcatcttcaagatagactggactttgtctccaggcgagcatgcgaaggacgagtatgtcctttattattactcaaatctatctgtgcctatcggacggtttcagaacagagtacatctaatgggagacattctgtgcaacgacgggtctctcctactccaagacgtgcaggaggccgatcaggggacatacatatgcgagatcaggctgaagggggagtcacaggtgttcaagaaggcagtggtattgcacgttctcccagaggagcctaaggagttaatggtacacgtgggcggcctgatccagatgggatgcgtctttcagagcaccgaggttaagcacgtgacgaaagttgaatggatcttttctgggagaagggccaaagaagaaattgtattcaggtattatcacaagctcaggatgtcagtggaatactcccaatcctggggccactttcagaaccgcgtcaatcttgtgggtgacatctttcgcaacgacgggtccatcatgcttcagggggttcgagaaagcgacggtggaaactacacgtgctccattcatttaggaaacctggtattcaaaaaaacaatcgtattgcatgtgtcacccgaagagcctaggaaatggtag

SEQ ID NO: 178336 - DNA, 1128 bp, synthetic construct
  misc_feature 1..1128: note = Description of Artificial Sequence: Synthetic coding sequence
  source 1..1128: mol_type = other DNA
atgagcagccacaagggcagcgtggtggcccagggcaacggcgcccccgcaagtaatcgggaggccgacaccgtggaacttgccgagctaggacctctgctggaggagaagggcaaaagggttatagccaaccctccaaaggctgaggaggagcagacatgtcccgtgccacaggaggaagaggaggaggtacgagtgctgactctgccgcttcaggcccatcatgcaatggagaagatggaagaattcgtgtataaagtatgggaaggaagatggcgcgttattccgtacgatgttctgcctgactggctgaaggacaacgattatctgctccacggccaccggccacctatgccatctttccgggcatgctttaaaagcatcttcagaatccatacagaaactgggaatatctggacccacctgctgggcttcgttctgttcctatttctgggcatcctgaccatgctgagaccaaatatgtatttcatggccccgctgcaggagaaggtggtgttcggtatgttttttttaggcgccgtgttgtgcctgtctttctcatggctgtttcacacagtctactgccattccgagaaagtctcaagaactttttccaagctggactacagcggtattgcactcttgattatggggtcattcgtcccctggttgtattacagtttttactgcagcccacagcccagacttatctacctgtccatcgtttgcgtgctggggatctccgccattatagtggctcaatgggatcggttcgcaacaccgaagcataggcagaccagagcgggagtgtttcttggcctgggcctgtccggagtcgttccaactatgcactttactatcgcagaaggcttcgttaaagcgacgactgtggggcaaatgggttggttcttcctgatggcagtcatgtacatcaccggcgcaggcctctatgcagcccgtatcccagagcggttcttccctggaaagtttgacatttggtttcagtcacatcagattttccacgtcctggtcgtggcggccgcttttgtccacttctatggagtcagcaatcttcaggagttcagatacggcctcgagggggggtgtacagacgatacacttttatag

SEQ ID NO: 178337 - DNA, 516 bp, synthetic construct
  misc_feature 1..516: note = Description of Artificial Sequence: Synthetic coding sequence
  source 1..516: mol_type = other DNA
atgagcagccacaagggcagcgtggtggcccagggcaacggcgcccctgcaagcaatcgtgaggctgacacagtcgaactcgccgaactggggcctctgctggaggaaaagggtaagcgggtgatagcaaatcccccgaaagcggaggaggaacagacatgcccagtgccacaggaggaggaggaggaggtgcgagtgctgacacttccactccaagcccaccacgccatggagaaaatggaggagttcgtgtacaaagtgtgggagggaagatggcgggtcatcccttacgatgtcctgccagattggctgaaggataatgattacctgctgcacgggcacagacctcccatgccttctttccgggcctgcttcaagtccatttttcgcatccacacagagaccggtaacatctggacccacttgcttgccaccgcccacttacccctgcaccggttgtgcccaggacatttctgtcaccattgtggcgctgtggggcctgtctgccattcctag

SEQ ID NO: 178338 - DNA, 801 bp, synthetic construct
  misc_feature 1..801: note = Description of Artificial Sequence: Synthetic coding sequence
  source 1..801: mol_type = other DNA
atgagcagccacaagggcagcgtggtggcccagggcaacggcgccccagcctctaatcgagaggccgacactgttgaactggcagagctgggcccgctgctcgaggagaaaggcaaaagagtcattgcgaaccccccgaaggccgaggaggaacaaacatgtcccgtcccccaggaggaggaggaggaggtccgggttttaacacttccattacaggcacatcacgccatggagaagatggaagaatttgtgtacaaggtgtgggaggggcgctggcgggtgattccctacgatgtgctaccagattggctgaaagacaatgattacctgctgcacggccaccgtcctccgatgccaagttttcgcgcgtgctttaagtccatctttaggatccacacagaaaccgggaacatatggactcacctgttgggcttcgttctctttctgttcctgggaatccttaccatgctgagacccaatatgtattttatggcaccgttgcaggagaaggtggtgttcgggatgttcttcctgggcgctgtcctgtgcctgagcttcagttggcttttccacacagtgtattgccacagcgagaaagtttcccggacgttttccaaactggattattctgggatagctctattaatcatgggcagctttgtcccttggctgtactatagtttctattgcagtcctcagccacggctcatttacctatcaattgtctgtgtgctcggcatcagcgccatcatcgttgcccaatgggacagattcgcaacacccaagcatcggcaaacatag

SEQ ID NO: 178339 - DNA, 618 bp, synthetic construct
  misc_feature 1..618: note = Description of Artificial Sequence: Synthetic coding sequence
  source 1..618: mol_type = other DNA
atgagcagccacaagggcagcgtggtggcccagggcaacggcgcccccgccagcaaccgtgaggctgatacagtcgagcttgctgagctcggcccactgttagaagaaaaagggaaacgcgtcatagccaatccccccaaagcagaagaagaacagacctgtcccgtaccccaggaagaagaggaagaggtcagggtactaacgctaccacttcaggcccaccatgccatggagaaaatggaagaattcgtgtataaagtgtgggagggacggtggagagtaattccatacgatgttctcccagactggttgaaggacaacgactaccttctgcacggccatagaccccctatgccaagctttcgtgcttgctttaaatctatcttccgaattcatactgaaaccggcaatatctggacccacctgctgggtttcgttctttttttgtttcttggcatccttactatgcttcgacccaacatgtattttatggcacctctgcaagaaaaggttgtttttggaatgttttttctgggagccgttctatgcctgtccttctcgtggctctttcatacagtatattgtcactctgagaaagttagccgcaccttcagctag

SEQ ID NO: 178340 - DNA, 1128 bp, synthetic construct
  misc_feature 1..1128: note = Description of Artificial Sequence: Synthetic coding sequence
  source 1..1128: mol_type = other DNA
atgagcagccacaagggcagcgtggtggcccagggcaacggcgccccagcttccaacagagaggcggacacagtcgaactcgcggagctaggacctctgctagaggagaagggtaagagagtcatcgcaaatcccccgaaagcagaagaggagcaaacttgccccgtgccacaggaagaggaggaggaggttcgagtgctgaccttaccccttcaggctcaccacgccatggagaaaatggaggagtttgtgtacaaagtctgggagggcaggtggagagtgattccctatgacgtgctccctgactggctcaaggacaacgactatttgctgcacggccacaggccacccatgccgtcattccgagcctgttttaagtcaatctttagaattcatacagaaaccgggaacatttggacccatctcctcgggtttgtgctatttttgtttctcggcattctgaccatgcttcgccccaatatgtacttcatggcgccattacaagagaaggtggtgtttggaatgttctttttaggggctgttctgtgcctgagcttctcctggctctttcataccgtgtactgtcactccgagaaggtcagtaggacattctccaaattagactacagtggcatcgcactcctcattatgggaagcttcgtgccttggctgtactacagtttctactgtagcccccaaccccgactgatctatctgtctattgtgtgtgttcttggcataagtgctatcattgtagcccagtgggaccgattcgcaacgcccaaacaccgacagacccgagccggagtgttcctgggcttggggctgtccggagtggttcctaccatgcacttcactatcgccgaaggctttgtgaaggccaccactgttggacagatgggatggttctttctcatggctgtgatgtacattaccggagccggactatatgcggcacgcatccccgagcggttctttcccggtaagttcgatatctggttccagtcccatcaaattttccacgttctcgtggttgccgccgccttcgtacatttttatggcgtgagcaacctgcaagaatttaggtacggcctcgaagggggatgcacagatgacactctactttag

SEQ ID NO: 178341 - DNA, 1161 bp, synthetic construct
  misc_feature 1..1161: note = Description of Artificial Sequence: Synthetic coding sequence
  source 1..1161: mol_type = other DNA
atgaacgagcccaccgagaaccggctgggctgcagccggacccccgaacccgacatccggctaaggaaaggccaccagctggacggaactaggcgcggcgataacgatagccaccagggggatttggagccgatattagaggcctctgtgctcagctctcaccataagaagagtagcgaagaacatgaatactccgatgaggccccacaagaggatgaggggttcatgggcatgagccccctgctgcaggctcaccatgcaatggagaaaatggaggaatttgtgtgcaaggtctgggagggacgctggcgggtgatccctcacgacgtcctccctgattggctcaaagacaacgatttcctgctgcacgggcatcggccgccaatgccctcatttagagcttgttttaagtccatctttagaatccacacagagaccggaaatatttggacccatctgttgggatgcgtattttttctgtgcttgggcattttctacatgtttcgtcccaacatttcttttgtggctcctctgcaggaaaaggtcgtgttcggccttttttttctaggcgcaatcttgtgtttatcctttagttggctgtttcatacagtctactgtcacagtgaaggcgtcagccggttgttctctaaactcgactactcaggtatcgccttgcttatcatgggctcttttgtgccttggttatactactccttctactgtaacccccagccatgctttatttatctcatcgttatctgcgtgctggggattgcagccatcatcgtgtctcagtgggatatgttcgccactcctcagtatcgcggggttcgcgcaggcgtcttcttgggcctcggactttctgggatcatcccgactctccactacgtgatcagcgagggctttctcaaagcagccacaattggacagatcggatggctgatgttaatggcaagcctgtacatcacgggggcagctctctatgccgccaggatccctgaacgcttctttcctggaaaatgcgatatctggttccattcacaccagctgttccacatcttcgtcgtggcaggagccttcgtgcactttcatggagtgagcaatttacaggaatttcgtttcatgatagggggaggctgtagtgaagaagatgcgctgtag

SEQ ID NO: 178342 - DNA, 735 bp, synthetic construct
  misc_feature 1..735: note = Description of Artificial Sequence: Synthetic coding sequence
  source 1..735: mol_type = other DNA
atgctgctgctgggcgccgtgctgctgctgctggccctgcccggccacgatcaggagaccacaacccagggccctggcgtgctgctccctctcccaaagggcgcatgcaccggttggatggccggcattcccgggcatcctggacataatggcgcaccaggacgggacggtcgcgacggaacacctggggaaaagggggaaaaaggagaccctggactgatcgggccgaagggggacatcggagagactggagttccaggcgccgaggggccacgcggcttcccggggattcagggccggaaaggtgagcctggggaaggcgcatatgtgtatcggtcagctttctctgtgggtctggagacttacgtcaccattcctaacatgcctatccggtttaccaagatattttacaaccagcaaaaccactatgatggaagcactgggaaatttcactgcaacattcccggcctgtactacttcgcctaccatattactgtgtacatgaaagacgtgaaagtcagcctgtttaagaaggacaaggctatgttgttcacttacgatcagtatcaagaaaataatgttgatcaagccagtggaagtgtgctcctccatctcgaggtgggcgatcaggtatggctgcaggtgtatggcgagggtgaaaggaacggtctgtacgcagataatgacaatgatagcacttttactggtttcctgctgtatcacgacaccaattag

SEQ ID NO: 178343 - DNA, 735 bp, synthetic construct
  misc_feature 1..735: note = Description of Artificial Sequence: Synthetic coding sequence
  source 1..735: mol_type = other DNA
atgctgctgctgggcgccgtgctgctgctgctggccctgcccggccatgaccaggagaccactacacagggccccggtgtgctgctgccccttccaaaaggggcgtgtacaggatggatggcgggcattccagggcatcctggccacaacggagcacctggacgagatgggcgcgacgggacacccggggaaaaaggagaaaaaggagaccctggtctgatcggacccaagggtgacattggcgaaaccggcgttccaggcgcggagggcccccggggcttccccggcattcagggacggaagggagagcctggtgaaggagcttatgtatatagatccgcgttcagcgtcgggctggagacatatgtgacaattccaaacatgccaattagattcactaaaatcttttacaatcaacaaaaccactacgatggaagcaccgggaagttccactgcaacataccgggactgtactacttcgcttaccacatcaccgtttatatgaaggacgtgaaagtctccctgttcaaaaaggacaaggccatgctgtttacctacgatcagtaccaagagaacaatgtggaccaggccagcggctctgtgttgctccacctggaagtcggcgaccaggtgtggctccaggtgtatggcgagggggaacgcaacggcctctacgccgataacgacaacgattcaacttttaccggctttttgctgtatcatgacaccaactag

SEQ ID NO: 178344 - DNA, 735 bp, synthetic construct
  misc_feature 1..735: note = Description of Artificial Sequence: Synthetic coding sequence
  source 1..735: mol_type = other DNA
atgctgctgctgggcgccgtgctgctgctgctggccctgcccggccacgatcaggaaactacaacacaggggcccggtgtgctgttgccacttcccaagggagcatgtactgggtggatggctggcattccgggccaccctggccataacggagcacctggccgggatggacgagacgggaccccaggggaaaaaggtgagaaaggggatccaggtctgattggccctaaaggagatatcggtgagaccggggtgcccggcgcagagggaccacgcggctttcccggaattcagggaagaaagggagaacccggcgaaggggcttatgtgtatcggagcgccttctcggttgggttggaaacctatgtcaccatcccaaatatgccgatacggtttactaagatcttttacaaccagcagaaccactatgacggatccacagggaaatttcactgcaacattcccggactttactatttcgcctatcacataactgtctacatgaaggacgttaaagtctcactgtttaaaaaagacaaggctatgcttttcacatatgaccagtaccaggaaaataatgtggatcaggcatccggctcagtgttgttgcacctggaagtcggagaccaggtgtggctgcaggtctacggcgaaggggagaggaacggcctatacgctgacaacgataacgactcgacattcacgggctttcttctgtaccacgacactaactag

SEQ ID NO: 178345 - DNA, 1491 bp, synthetic construct
  misc_feature 1..1491: note = Description of Artificial Sequence: Synthetic coding sequence
  source 1..1491: mol_type = other DNA
atggccctgtggcggggcagcgcctacgccggcttcctggccctggctgtgggctgtgtcttcctccttgagcccgaactgccgggatctgcgcttaggtccttatggagttcactatgcctcgggcccgctcccgcccctccagggcctgtcagcccagaagggcggctggccgcagcctgggacgccctgattgttagacctgtcaggcggtggaggagagtagctgtaggggtgaacgcttgtgtggatgtggttctgtctggcgtgaagttgctccaagcactggggctgtcacccggtaacgggaaggaccactctatcttgcactcacgaaacgatctcgaggaggccttcattcatttcatggggaaaggagctgctgccgaacgattcttcagcgataaggagacatttcatgatatcgcccaggtcgcctccgagttcccaggggcacaacactatgtgggcggcaacgcagccctcattggacaaaagtttgccgccaactcagacctcaaggttttgctgtgcggcccagtaggccccaaactacatgagctgctggatgacaatgtgtttgtgcctccagagagcctgcaagaagttgacgagttccacctgatcctcgagtatcaagcgggggaagaatggggccagctgaaggctccacacgcgaacaggttcatcttctctcacgacttatcgaacggagccatgaacatgctggaggttttcgtctcatccttagaggaattccagccagacctagtggtgctgagtggcttgcatatgatggaaggtcaatccaaagaactccaaagaaagcggctactggaagtggtgaccagtatctctgacattcctactggaattccagtgcatctggaacttgcttctatgactaacagagagctcatgtcttccatcgtgcaccaagtgttcccagccgtcacatcactgggactcaacgaacaagagctccttttcctaactcaaagtgccagcggccctcacagctcactgagctcatggaatggcgtgccagatgtcggaatggtgtctgacatattattttggattctgaaagagcacggacgtagcaaatcaagagcttccgacctcacccgcatacactttcatacgctggtataccatatcctggccactgtggatggccactgggcaaatcagctggccgccgtggccgccggtgcccgcgtggctggcacacaagcctgtgcaaccgaaacaatcgacacctcacgagtgagccttcgggccccacaggagttcatgacttcgcacagcgaagctggctcgaggattgtgctcaaccctaataaaccggtggttgagtggcaccgggagggaatctcctttcacttcacaccagtattagtgtgtaaagatcctattcgtacagtcggccttggcgatgctatttccgcagaaggactgttttactctgaagtgcacccacactactag

SEQ ID NO: 178346 - DNA, 1041 bp, synthetic construct
  misc_feature 1..1041: note = Description of Artificial Sequence: Synthetic coding sequence
  source 1..1041: mol_type = other DNA
atgggcaagggcgccgccgccgagcggttcttcagcgacaaggagacttttcatgatatcgcccaggtggcttctgagttcccgggcgcccagcattacgtcggcggtaatgctgcacttattggacagaagttcgctgcaaactcagatttgaaggtgttgctgtgtggaccagtaggcccaaagctccatgaacttctagacgacaatgtgttcgtgcccccagagagtcttcaagaggtggatgaattccacctcattctggagtatcaggctggagaggagtggggacagttgaaggctccacacgcaaatcgttttattttttcccatgacctgtccaacggtgccatgaacatgctggaagtgttcgtgtctagtctcgaagaatttcagccagatcttgtggttctgtctggcctacacatgatggaagggcagtctaaggaactgcaacgtaaacgcttactcgaggtggtgacctctatcagtgacatccccaccggcataccagttcatttggagctggcttccatgacgaatagggagctgatgtcctcgatagttcaccagcaggtctttccggcagtcacctccctgggcctaaatgagcaggaattactctttctgacccaaagtgcatccggtcctcacagctccctttcttcttggaatggggttccagacgtcgggatggtgtcagacattctcttttggatcctcaaagaacacggccgtagcaagagccgcgcgagcgatctgactcgcattcacttccatacgcttgtataccatatcttggccacagtcgacggacactgggcaaatcagctcgcggccgtggcctcttcttgtggctgggataccgggctgagacatagaaatcaccggcaccagcccagtgtcagtgaaggtactcctagagttcacgacttcccatttggggggagactacaagactgtatcaaaccaaaacaggccagctcaagaatggcccaaaggggcaacatcttgccgttacacacaagcatcggagtctag

SEQ ID NO: 178347 - DNA, 1251 bp, synthetic construct
  misc_feature 1..1251: note = Description of Artificial Sequence: Synthetic coding sequence
  source 1..1251: mol_type = other DNA
atggccctgtggcggggcagcgcctacgccggcttcctggccctgggtctttcccccggtaatgggaaagaccacagtattctccactcccgaaacgacctagaggaagctttcatccattttatgggcaaaggggctgccgcggaacgatttttctccgacaaggagactttccatgatatcgcccaggtggcttctgagttcccaggggctcaacattacgttggcggcaacgccgcattaattgggcagaagtttgctgcaaatagcgacttaaaggtactgctgtgcggacccgtggggcctaagcttcacgagctgttggatgacaacgtcttcgtcccacccgagtccctccaagaagtagatgagttccacctcattcttgaatatcaggctggggaagagtgggggcagctgaaggctccacatgcaaatagattcattttttcacacgatctgtctaatggcgctatgaacatgttagaagtgtttgttagctctctggaggagtttcaacctgacctggtggtgctctccggcctccatatgatggaagggcagagtaaggagttgcagaggaagcgcctgttagaggttgttacttctatctcggacatccccacaggtattcctgttcatctggagctagcctctatgacaaatagagagctgatgagttctatcgtgcaccaacaggtgtttccagctgtgactagtttggggctaaatgagcaggagctcctcttcctcacacagtctgcttccggaccccattccagcctctcctcttggaatggcgtgcccgatgttggtatggtctccgacatcctgttttggattctcaaggaacacggaaggtctaagagccgtgcaagtgatctaacccgtattcattttcataccctcgtgtaccacatcctcgcgaccgtggatggccattgggctaaccaactcgccgccgtggccgcgggcgcgcgcgttgcaggcacccaggcgtgtgccacagagaccatagacacaagtagagtctccctgagggccccgcaagaattcatgacatcccattcagaagctggtagcaggattgtgctgaacccaaacaagcccgtggtggagtggcacagagaaggtatcagcttccacttcacgccagtcctcgtctgtaaagatcctatccgaacagttggacttggggacgcaatctccgcagaggggctgttctactcagaagtccacccccactattag

SEQ ID NO: 178348 - DNA, 669 bp, synthetic construct
  misc_feature 1..669: note = Description of Artificial Sequence: Synthetic coding sequence
  source 1..669: mol_type = other DNA
atggccgccagctgccgggtggtgaccagcatcagcgacatccccacaggcatacccgtgcatctggaattggcaagcatgacaaacagagaactgatgtcttcaatcgtgcatcaggtgttccctgcagtcacctcactggggttgaatgagcaagaacttctctttttgactcaatctgcctccggccctcattcgagccttagttcttggaacggagttcccgatgttggcatggtttctgacattttgttttggattttgaaagagcacgggaggtccaagagccgcgcttccgacttaaccagaatccattttcacacactggtgtaccacattctggccactgtcgacggacattgggccaaccagctggccgccgttgcagctggcgccagggtggcgggcacacaagcatgtgcaacagaaaccattgacacaagcagagtatcccttagggctccacaggaattcatgacaagtcatagtgaagctggctctagaattgtgcttaacccaaataaacccgtcgtcgaatggcatagagaaggcataagcttccattttaccccagtgctggtttgcaaggatcctatccgcacggtggggctcggcgatgcgatctctgccgaggggctgttctacagtgaagtgcaccctcattactag

SEQ ID NO: 178349 - DNA, 546 bp, synthetic construct
  misc_feature 1..546: note = Description of Artificial Sequence: Synthetic coding sequence
  source 1..546: mol_type = other DNA
atgggcaacatcttcgccaacctgttcaagggcctgttcggcaagaaggagatgagaattctgatggtcgggctcgacgcagccgggaaaaccaccattctttacaagctcaagttaggcgagattgtaactaccattcctacaattggatttaacgtagagacggtagaatacaaaaacatttcctttactgtatgggatgtcggcggccaggacaagattaggcctttgtggcgccattactttcagaatacccaaggtctcatcttcgttgtcgattcgaacgaccgggagagggttaacgaggcacgcgaggaacttatgaggatgttagcagaggacgagctccgcgacgccgtgctgctcgtctttgcgaataagcaggatttaccaaacgccatgaatgcggcagaaatcacagataagctgggattgcattctctgaggcaccggaattggtatattcaggcaacctgcgcaaccagcggagacggcctctatgagggtctcgactggttatcaaatcagcttcggaatcaaaaatag

SEQ ID NO: 178350 - DNA, 546 bp, synthetic construct
  misc_feature 1..546: note = Description of Artificial Sequence: Synthetic coding sequence
  source 1..546: mol_type = other DNA
atgggcaacatcttcgccaacctgttcaagggcctgttcggcaagaaagagatgcgtatcctgatggtggggttggacgctgcagggaagacaacgattctgtataagcttaaactcggggagatcgtcacaaccatccccacgatcggctttaatgtggaaacagttgaatacaaaaacatctcgttcactgtgtgggacgtgggaggtcaagacaaaattagaccactgtggcggcactatttccagaatacgcaggggctaatcttcgtggtcgatagcaatgatcgggaacgggtcaatgaagctagagaggaattgatgcggatgttggccgaggacgaacttcgcgatgctgtcctactggtatttgcgaacaagcaagacctgcctaatgcaatgaacgccgcagagattaccgacaagctcggcctgcattctctgagacaccgcaattggtatatccaggctacatgtgccacctctggcgacggtttgtatgaagggctggattggctgagcaaccaactgaggaaccagaaatag

SEQ ID NO: 178351 - DNA, 546 bp, synthetic construct
  misc_feature 1..546: note = Description of Artificial Sequence: Synthetic coding sequence
  source 1..546: mol_type = other DNA
atgggcaacatcttcgccaacctgttcaagggcctgttcggcaagaaagagatgagaatcctcatggtagggctggacgcagcgggtaagacaacaatcctctacaagctgaagttaggtgaaatagtgaccaccatacccaccatagggttcaacgttgagaccgtggagtataagaacatctccttcacggtatgggatgtcggtggccaggacaagattagacctctgtggaggcactactttcaaaacactcaaggactgatctttgtcgtggacagcaatgaccgcgaaagagtgaacgaggctagggaggaacttatgcgaatgctggctgaggacgagctgcgggacgccgtgctgcttgtgttcgcgaacaaacaggacctgccgaatgcaatgaacgcagccgagatcacggacaagctcggtctgcatagcctgcgccaccgcaattggtatatccaggctacctgcgccacctctggagatgggctctacgagggcctggactggctcagtaaccagctgcggaaccagaaatag

SEQ ID NO: 178352 - DNA, 519 bp, synthetic construct
  misc_feature 1..519: note = Description of Artificial Sequence: Synthetic coding sequence
  source 1..519: mol_type = other DNA
atgggcaacatcttcgccaacctgttcaagggcctgttcggcaagaaggagatgcgtattctgatggtcggtctcgatgccgccggcaaaacaactatcctgtacaagcttaagctcggcgaaatagtgacaactatacctaccattggcttcaacgtagagaccgtggagtataagaacatatcatttaccgtgtgggacgtcggaggtcaagataagatccggccactgtggaggcattatttccagaatacccaaggcctgatttttgtcgtggactccaatgatagagaacgcgtgaacgaggcccaggacgaactcagagatgccgtcctcctcgtcttcgctaataaacaggacctgcccaatgctatgaatgccgccgagattacggataagctgggcttgcattcccttagacaccgaaattggtacattcaggcaacttgtgctacttcaggagatggactgtatgagggtcttgactggctcagcaaccagcttaggaaccagaaatag

SEQ ID NO: 178353 - DNA, 546 bp, synthetic construct
  misc_feature 1..546: note = Description of Artificial Sequence: Synthetic coding sequence
  source 1..546: mol_type = other DNA
atgggcaacatcttcggcaacctgctgaagagcctgatcggcaagaaagaaatgcgcattctaatggtgggcctggatgctgctgggaaaacaacaatcctgtacaaactgaaactcggagaaattgtgaccaccatccctacaattggctttaatgttgaaaccgtcgagtataagaacatctctttcacagtttgggatgtgggaggtcaggataaaattcgccccctgtggagacattacttccagaacacacaagggctcatttttgttgtggatagcaacgaccgggagcgagtcaatgaggcgcgcgaagagctcatgcgcatgttggcagaggacgagcttagagacgctgtgcttctcgtattcgccaacaagcaggatctccccaatgcgatgaatgcggccgaaatcaccgacaaactcggcctgcactcactcagacacagaaattggtacatccaggcgacatgtgcgacatcgggtgacgggctctatgagggattggactggttggccaaccagcttaaaaataaaaaatag

SEQ ID NO: 178354 - DNA, 435 bp, synthetic construct
  misc_feature 1..435: note = Description of Artificial Sequence: Synthetic coding sequence
  source 1..435: mol_type = other DNA
atgggcaacatcttcggcaacctgctgaagagcctgatcggcaagaaagagatgagaatcctgatggtggggttggatgccgccggaaagacaaccatactgtataagctgaaactgggggaaatcgtcactaccataccaacgatagggctgatctttgtagtcgattctaatgatagggagcgggttaacgaggctagggaggagctgatgcgcatgctcgcagaagacgagctgcgcgatgccgtgcttctcgtgtttgccaataaacaggatctaccgaacgctatgaacgcggccgagatcactgataagctgggcctccactctctgcgacatcgaaattggtatattcaggctacttgcgccacttccggcgatggtctctacgaagggctggattggctcgcaaatcaattaaaaaacaaaaagtag

SEQ ID NO: 178355 - DNA, 153 bp, synthetic construct
  misc_feature 1..153: note = Description of Artificial Sequence: Synthetic coding sequence
  source 1..153: mol_type = other DNA
atgggcaacatcttcggcaacctgctgaagagcctgatcggcaagaaggagatgcgaattctgatggtcggtctggacgctgctgggaaaactactatcctgtacaagttgaaactgggagaaattgtcaccactattcccactattggatag

SEQ ID NO: 178356 - DNA, 309 bp, synthetic construct
  misc_feature 1..309: note = Description of Artificial Sequence: Synthetic coding sequence
  source 1..309: mol_type = other DNA
atgggcaacatcttcggcaacctgctgaagagcctgatcggcaagaaggagatgcggattctgatggtggggctggacgctgccggcaaaacgactattctatacaaactgaagttaggggagatcgttactacaatccccaccataggcttcaatgtggagacggtcgaatacaagaacatatctttcacagtttgggacgtgggtggccaggataagatccggcctctatggagacattatttccagaacacacaagggctcatttttgttgtggactccaatgaccgcgagcgggttaacgaatag

SEQ ID NO: 178357 - DNA, 546 bp, synthetic construct
  misc_feature 1..546: note = Description of Artificial Sequence: Synthetic coding sequence
  source 1..546: mol_type = other DNA
atgggcaacatcttcggcaacctgctgaagagcctgatcggcaagaaagaaatgcgcatcctcatggtgggtctggatgcagctggaaagaccacaatcctctacaagttgaagctaggggaaatcgttacaaccatccccacaatcggatttaacgttgaaacagtggagtataagaacatcagttttacagtgtgggacgttggcggtcaggacaagataaggcctctttggaggcattattttcaaaatacacaagggctcatcttcgtcgtggactccaatgatcgggagagagtcaacgaagccagggaggagctcatgcgaatgttggctgaggacgagctgcgagatgctgtgctcctcgtgttcgccaacaaacaggatttacctaacgcgatgaacgctgctgagatcaccgataagttggggcttcactcactgcggcatcggaactggtacatacaggctacatgcgcaactagtggggacgggctgtatgaaggtctggactggctggcaaaccagctgaagaacaagaagtag

SEQ ID NO: 178358 - DNA, 123 bp, synthetic construct
  misc_feature 1..123: note = Description of Artificial Sequence: Synthetic coding sequence
  source 1..123: mol_type = other DNA
atgggcaacatcttcggcaacctgctgaagagcctgatcggcaagaaggaaatgcggatcctgatggtggggctggacgcagcgggaaagaccaccattttgtataagctgaaactgggatag

SEQ ID NO: 178359 - DNA, 543 bp, synthetic construct
  misc_feature 1..543: note = Description of Artificial Sequence: Synthetic coding sequence
  source 1..543: mol_type = other DNA
atgggcctgaccatcagcagcctgttcagccggctgttcggcaagaagcagatgagaattctcatggtgggcctcgacgcagccggcaagacaaccatcctgtataaactcaaattaggggaaattgttactactataccaactatcggatttaacgtcgaaacagtggagtacaaaaatatttgctttaccgtctgggatgtcggaggccaggataggatcagacccttatggaagcactacttccagaatacacagggactgatcttcgttgtggattccaatgaccgagaacggattcaggaagtggctgatgaactgcagaaaatgttgttagtcgatgagctcagggacgcagtcttgctcctctttgccaataaacaggacctgcctaatgcgatggcgatttccgaaatgactgataaactgggcctgcaatccttacgcaatagaacatggtatgttcaggcaacttgcgcaacccagggcaccggcttatacgaaggactggactggctctcaaacgaactgagcaaaagatag

SEQ ID NO: 178360 - DNA, 384 bp, synthetic construct
  misc_feature 1..384: note = Description of Artificial Sequence: Synthetic coding sequence
  source 1..384: mol_type = other DNA
atgggcctgaccatcagcagcctgttcagccggctgttcggcaagaagcagatgagaatcctgatggtgggtctggatgcggctggtaaaacaacaatactctacaagctgaagctcggggagattgtgactacgatccccacaatcgggttcaatgtggagacagtggaatacaagaatatttgttttactgtttgggatgtgggtggccaggaccgaatcaggcccctgtggaagcactatttccagaacacacagggtttgatatttgtggttgattcaaacgaccgggagcgtatacaagaagtggcggacgaactgcagaaaatgctgctggtggacgagctgagggacgccgtcctgctcttgtttgctaataagtag

SEQ ID NO: 178361 - DNA, 69 bp, synthetic construct
  misc_feature 1..69: note = Description of Artificial Sequence: Synthetic coding sequence
  source 1..69: mol_type = other DNA
atgggcctgaccatcagcagcctgttcagccggctgttcggcaagaaacaaatgcgcattttgatgtag

SEQ ID NO: 178362 - DNA, 543 bp, synthetic construct
  misc_feature 1..543: note = Description of Artificial Sequence: Synthetic coding sequence
  source 1..543: mol_type = other DNA
atgggcctgaccgtgagcgccctgttcagccggatcttcggcaagaagcagatgcgaatattaatggttgggttagacgcagccggcaagacaacaatcctgtacaagcttaagctcggtgagattgtcacaaccattcccaccattggcttcaatgtggaaactgttgaatacaagaacatctgttttacggtctgggatgtcggggggcaggataagatccgcccactatggcgccactacttccagaacacgcagggattaatttttgtggtggatagtaatgaccgggaacgagtacaagagtcagccgacgaactgcagaagatgctgcaggaggacgagctccgcgatgccgtgctgctggtattcgcaaataaacaggacatgccaaacgcgatgcccgtctcagaacttaccgataagctggggttgcagcaccttcgctctcgtacatggtatgttcaggcaacctgcgccacacagggaaccggtttgtatgacggacttgattggctgagtcacgaactgtcaaagagatag

SEQ ID NO: 178363 - DNA, 1245 bp, synthetic construct
  misc_feature 1..1245: note = Description of Artificial Sequence: Synthetic coding sequence
  source 1..1245: mol_type = other DNA
atggccagcccccggacccggaaggtgctgaaggaggtgcgggtgcaggacgaaaataacgtgtgtttcgagtgtggagcgtttaatccacagtgggtatccgttacgtacgggatttggatctgcctggagtgcagtggtagacaccgaggcctgggagtacacctgtccttcgtgaggtccgtaactatggacaaatggaaagacattgaactggaaaagatgaaggctgggggcaatgccaagttccgcgagttcctagagtctcaggaagactacgacccttgttggtccctccaggaaaagtacaattcaagagccgccgctttgttccgggataaagtggtggcgctcgcagagggacgagagtggagcttagaaagtagccctgcccagaactggacccccccccagcccaggacccttccctccatggtccatcgcgtgtcaggccagccccagagtgtgacagcctccagtgacaaggcgttcgaggattggcttaacgacgacctcggctcctatcagggtgctcaaggcaatcgatatgtgggttttgggaacactcctcccccccaaaagaaagaggacgactttcttaacaatgctatgtcttcgctgtactccggctggagcagctttaccacaggggcctcaaggtttgcaagcgccgctaaggagggagctacaaaattcggcagccaggcttcccagaaattttggggtcacaagcagcagccagagccagcctccgagctcgggcactctctgaacgagaatgtgcttaagcccgcccaggagaaggtcaaagagggcaagatcttcgacgacgtgagcagcggagtaagccagctggcctccaagggggtgggcagcaaaggttggagagacgtcactacgtttttttctggtaaggctgaggggcctctggatagcccctctgaagggcatagctatcaaaactccggacttgatcatttccagaatagcaatattgatcagtccttctgggagacattcgggagtgccgagccaacaaaaacacgcaagtctccaagctctgattcatggacctgcgccgacacctctacagagagaagatcatctgactcatgggaagtgtgggggtccgccagcacaaatcggaactccaactcagatggaggggagggaggagaaggcacaaagaaagcggtgccccctgcagtccccacagatgatggatgggacaatcagaactggtag

SEQ ID NO: 178364 - DNA, 1212 bp, synthetic construct
  misc_feature 1..1212: note = Description of Artificial Sequence: Synthetic coding sequence
  source 1..1212: mol_type = other DNA
atggccagcccccggacccggaaggtgctgaaggaggtgcgggtgcaagatgagaacaatgtatgcttcgagtgcggagcttttaacccacagtgggtcagcgtcacatacggcatttggatctgtttggaatgcagcggcagacacagggggttgggagtccatctgtccttcgtgagatcggtcactatggacaagtggaaagacatcgagctggagaagatgaaagcggggggcaacgccaaatttagagaattcttggagtcccaggaggactacgacccgtgctggagtcttcaagagaaatataacagtcgagcagcagcactgttccgcgacaaagtggtggctctggccgaaggacgggagtggtctctggagtcttcccccgcacagaactggacccccccccagcctcgaacactgccttccatggtgcacagggtgagcggccaacctcagagcgtcacagcatcctctgataaagcattcgaagattggttaaatgacgacctcggttcctaccaaggcgctcaggggaatcgatatgtgggcttcggaaacactccgcctccacagaagaaagaggatgattttctcaataacgctatgagctctctgtactctggctggagcagttttacaacaggagcttctcgtttcgcaagcgccgccaaggaaggggctaccaaatttggctctcaggccagccaaaaggcaagtgagttgggtcacagcttaaatgaaaacgtcctcaagcctgcccaggaaaaggtcaaggaaggaaaaattttcgacgatgtgagtagtggggtgagccagttggccagtaagtgccaacgtcgtttgtgctgccaccagagccattgctccgcaggacatctaggcagagccttttgtcctgtctcgtggcatgaagcactgtgcggacagacaggcagggaggagcaggcctctctgctcccacctaagcacgtggtaggtgccctcgaggtgtgcgccaggggctgtcccaggtgccacgtcccacacacccctggcaccgccgctgagtggccaggccggctgtgcctgagtcgggagagcgtggttcgggacgggggaacatcccccccgtttttccggggcaaacaacgggccccctggactgcacctcggcgcgcaactgttatacgaacagccgtgtggacaacttcgaagaccgccacatag

SEQ ID NO: 178365 - DNA, 1221 bp, synthetic construct
  misc_feature 1..1221: note = Description of Artificial Sequence: Synthetic coding sequence
  source 1..1221: mol_type = other DNA
atggccagcccccggacccggaaggtgctgaaggaggtgcgggtgcaggacgaaaacaacgtttgcttcgaatgcggcgcgtttaacccacagtgggtctccgtgacctatggcatatggatttgtctggagtgcagcgggaggcacagggggcttggcgtgcatttgtctttcgtccgtagcgtcaccatggacaagtggaaagacatcgaactggagaagatgaaagccggcggtaatgccaagttcagggaatttctggaaagtcaagaagactacgatccatgttggagcctgcaagaaaaatacaattcccgggcagctgcgttgttcagagacaaggttgttgctttagccgagggcagagaatggtccctggagtcatctcccgcacagaactggactcctccccagccgaggacacttcccagcatggttcatagagtgtcaggccagccccaaagcgtcaccgcatcttccgacaaggccttcgaggactggcttaacgatgatctgggatcctatcagggggcccagggaaaccggtatgtcgggtttggtaacactcccccacctcagaagaaagaagacgattttcttaataacgcgatgtcaagtttgtactcagggtggtccagtttcaccaccggggcatctaggtttgcctcagctgccaaggaaggcgcaaccaagtttgggagccaagctagccagaaagcatctgaactgggccacagtctgaatgagaacgtgttgaaacctgcgcaagagaaggtgaaggagggaaaaatattcgatgatgtctcaagcggggtcagccagttagcgagcaaagtccaaggggtcgggtctaaggggtggcgggatgtaaccacttttttctccggtaaggcagaggggcccctggacagcccaagtgaaggacactcataccaaaactctggcctcgatcattttcagaattcaaacatcgaccagagcttctgggagacgtttgggagtgcagagccaaccaagactagaaaatctcctagctcagactcttggacttgcgcagatacttcaactgaacggcgcagctccgattcatgggaggtgtggggatctgcctctactaaccggaatagcaattccgatggtggcgaaggaggggaaggcaccaaaaaggccgtgcctccggccgtccctactgacgatggatgggacaatcaaaattggtag

SEQ ID NO: 178366 - DNA, 882 bp, synthetic construct
  misc_feature 1..882: note = Description of Artificial Sequence: Synthetic coding sequence
  source 1..882: mol_type = other DNA
atgctgagcagcgagagcagctggagcctgcggcggatcaccatcctggccggaccctgtagacggagtacaacagctgagccccgtccgtccctcggaatcagagtcagcggccaacctcagtcggtgacagcgtcttcggataaagccttcgaggactggctgaatgacgacttaggttcgtaccagggcgcgcagggaaaccgatacgtcggctttggtaatacccctcctcctcaaaagaaggaggacgacttcctgaacaacgcgatgtcctcactctacagcggctggtcatctttcaccacaggagcaagcaggttcgcgtctgctgcgaaggagggtgcaaccaagtttgggtcccaggcgtcccagaaggcaagtgagctaggacattcactaaatgagaacgtccttaaaccggcccaggagaaggtgaaagaaggcaaaatcttcgacgatgttagcagcggggttagccagctggcaagcaaagttcagggcgtaggatccaagggctggcgcgacgtaactactttcttcagcgggaaggcagaggggccccttgacagcccttccgagggtcactcctaccagaacagtggactcgatcacttccagaatagcaacattgaccagagtttctgggagaccttcgggtcagcagagccaaccaaaactagaaagagtccaagctcagatagctggacctgcgccgacaccagtacagaacggcggagtagtgactcttgggaggtgtggggttctgctagcacgaatcggaactccaatagtgacggtggagaaggcggagaaggaactaaaaaagcagttcctcctgccgtccccactgacgacggatgggacaatcaaaactggtag

SEQ ID NO: 178367 - DNA, 1086 bp, synthetic construct
  misc_feature 1..1086: note = Description of Artificial Sequence: Synthetic coding sequence
  source 1..1086: mol_type = other DNA
atgcggaccaccttcgtgcggagcgtgaccatggacaagtggaaggatatagagttggagaaaatgaaggcgggggggaacgcaaagttccgagaattcctcgaatcacaggaagattacgatccgtgctggtcactacaagaaaaatataacagccgcgccgctgctctatttcgcgataaagtcgtagctctggctgagggtagagaatggtctttagaatcatcaccagctcagaactggacaccaccgcagcctagaacactgccgagtatggtgcatcgcgtatccggccagccgcagtccgtgaccgccagttccgataaagccttcgaagattggctcaacgatgacctggggtcctatcaaggtgcacaaggtaatcgctacgtgggcttcgggaatactccacctccacagaaaaaggaggatgactttctgaacaacgcgatgagctctctctatagtggttggtcatcattcaccaccggcgcatcccgttttgccagtgcggctaaggagggggccactaaattcggatctcaagcctcgcagaagttctgggggcacaaacagcagcccgaacccgcctccgaactgggtcatagtttaaatgaaaatgttctgaagcctgcccaggagaaggttaaagagggcaagatatttgatgacgtcagctccggggtttctcagttagcctcaaagggagtcggaagcaaagggtggagagatgtgactaccttcttttcaggcaaggctgagggccctctggattctccttcggagggccacagttaccagaatagcggattagatcactttcaaaactccaacatcgaccagagtttttgggagacttttggatctgcggagcccaccaaaactcgaaagagccctagttccgatagttggacatgtgcagacacctcaactgagcgccgaagctcagacagctgggaggtgtgggggtcagcgagcactaataggaacagcaacagcgacggcggcgaagggggggagggaactaaaaaagccgtacctccagccgttcctacagatgacgggtgggataatcagaactggtag

SEQ ID NO: 178368 - DNA, 786 bp, synthetic construct
  misc_feature 1..786: note = Description of Artificial Sequence: Synthetic coding sequence
  source 1..786: mol_type = other DNA
atggccagcccccggacccggaaggtgctgaaggaggtgcgggtgcaagacgagaacaatgtgtgctttgagtgcggggccttcaatccccagtgggttagcgtgacttacggaatttggatttgccttgaatgttccgggaggcacaggggccttggcgtccatctctcttttgtgaggtcagtcaccatggacaagtggaaggacatagagcttgagaagatgaaagccggaggcaatgcgaaattcagagagtttctcgaatctcaggaagattacgatccgtgctggagtttgcaggagaagtataactcccgtgctgccgctttgtttagggataaagttgtcgccctggccgaaggcagggaatggtctctggagagcagcccggcccagaattggacaccaccccaaccaagaacactcccgtctatggtccacagggtttcaggtcagccacagtccgtcacagcctcgtcagacaaagcttttgaagactggctgaacgatgatctgggttcataccagggggcacagggcaacagatatgttggttttggtaacacgcccccaccccaaaaaaaggaggatgattttctgaataatgccatgtctagtttgtactctggttggagttcattcacgaccggggcatcccggttcgccagtgctgccaaggagggtgccacgaaattcggttctcaagccagccagaaggccagtgagctggggcactcactgaatgagaatgttctgaagcccgcccaggaaaaagttaaagaatag

SEQ ID NO: 178369 - DNA, 240 bp, synthetic construct
  misc_feature 1..240: note = Description of Artificial Sequence: Synthetic coding sequence
  source 1..240: mol_type = other DNA
atggccagcccccggacccggaaggtgctgaaggaggtgcgggtgcaagatgagaacaatgtgtgtttcgagtgcggggccttcaatcctcagtgggtcagtgtgacctacggtatatggatttgtctcgagtgctcgggtcgacatcgcggcttgggtgtgcaccttagctttgtcagatctgtgacgatggacaaatggaaggacatagaattggagaaaatgaaggccgggggatag

SEQ ID NO: 178370 - DNA, 369 bp, synthetic construct
  misc_feature 1..369: note = Description of Artificial Sequence: Synthetic coding sequence
  source 1..369: mol_type = other DNA
atggccagcccccggacccggaaggtgctgaaggaggtgcgggtgcaggacgaaaacaatgtatgctttgaatgcggcgccttcaacccccagtgggtttccgtcacctacggcatctggatttgtctcgagtgcagtggacgccacaggggacttggggtccatctatccttcgtgcggagcgtgactatggacaagtggaaagatattgaactggagaagatgaaagctgggggcaatgctaagtttagggagtttctcgaatcccaggaggattatgacccctgttggtcgcttcaagaaaagtacaattcccgggctgctgctctgttccgagacaaagtggtggcactggccgagggcagatag

SEQ ID NO: 178371 - DNA, 759 bp, synthetic construct
  misc_feature 1..759: note = Description of Artificial Sequence: Synthetic coding sequence
  source 1..759: mol_type = other DNA
atggtggccagcatgcggctggcctaccaggagctgcagatcgacagaaagaaagaggagaaaaagctgcagaacttagaaggcaaaaaacgtgagcaggccgaacggctgggaatgggtctcgtgtcgaggagttccgttagccactctgtcctgtccgagatgcaagtgattgaacaagaaactcctgtcagcgcgaagtctagtagaagccagctagatctgttcgacgacgtcggtaccttcgcttctggtccacccaagtataaagataaccccttcagtctgggcgagtctttcggatcccgatgggataccgacgccgcgtgggggatggatagagtagaagagaaggaaccagaggtgaccattagttccatacggcctatctctgagcgcgccacaaataggcgagaggtcgaatctcggtcttccgggcttgagtcctctgaggcacgccagaaattcgccggcgccaaagccatcagcagcgatatgtttttcggacgcgaagtcgatgctgagtacgaagcaaggagccgcctacagcagctttccggttccagcgccatttcaagtagtgatctattcggtgacatggacggagcacatggcgctggcagtgtttcactggggaacgtcctaccgaccgcagacatcgctcagtttaaacaaggggtgaaaagtgttgcaggaaagatggctgtgctagctaatggggttatgaattcacttcaggacaggtatgggtcctattag

SEQ ID NO: 178372 - DNA, 1245 bp, synthetic construct
  misc_feature 1..1245: note = Description of Artificial Sequence: Synthetic coding sequence
  source 1..1245: mol_type = other DNA
atgcaggtgggcggcaacgccaacgccaccgccttcttccggcagcacggctgcacagctaatgatgcgaacaccaaatataactcgcgtgccgcccagatgtatagggagaaaatcaggcagctcggatctgccgctctcgcaagacacgggacagatccacccgcctgggacgctcccgctacagagccttctggaacacagcaaccggctccaagcacagagtcctcaggacttgcccagcctgagcatgggcccaataccgatctacttggtacgtctccaaaggccagtcttgagctgaaaagcagcatcataggtaaaaagaagccggccgcggccaaaaagggcttaggcgcgaaaaaaggactgggcgctcagaaggtgagcagtcagagttttagcgagatagaacggcaagcacaggtagccgagaagctcagggaacaacaggccgccgacgccaagaagcaggcagaagagagtatggtggcgtctatgagactcgcatatcaggagctgcagatagatcgaaagaaagaggaaaagaaactgcagaatctggaaggaaagaagagagagcaagccgagcgcctcgggatggggctcgtctctaggtccagcgtcagccatagcgtgctatctgagatgcaggttattgaacaggaaacaccagtttccgcaaaaagcagcagaagccagctcgacctgttcgatgatgtcggcaccttcgcctccggcccacccaagtataaggataatccctttagcctcggcgagagcttcgggagtaggtgggacaccgacgccgcgtggggtatggatagagtggaggagaaggaacccgaagtaactatctcaagcattcgcccaatcagcgaaagggccacgaatagacgcgaggtggagtccagatcaagtggcctggagtcctctgaggcccggcagaaatttgctggcgcaaaggccatatcatccgatatgttttttggacgggaagtcgacgcagagtacgaggccagatccagactgcagcagctgtccggatcctcggccatcagcagtagtgatttatttggcgacatggatggagctcatggagcaggatcagtctccctggggaacgtccttcccaccgccgatattgcacagttcaagcagggagtcaagtcagtcgccgggaagatggccgtcctggccaatggcgttatgaactccctgcaggatcggtacggctcctattag

SEQ ID NO: 178373 - DNA, 1158 bp, synthetic construct
  misc_feature 1..1158: note = Description of Artificial Sequence: Synthetic coding sequence
  source 1..1158: mol_type = other DNA
atggccgccgagcccaacaagaccgagatccagaccctgttcaagagactgcgagcagtgcccacaaacaaggcttgcttcgactgtggtgctaagaatccctcatgggcttctatcacatacggggtgttcctctgcattgactgcagcggagtacacaggtctctaggcgtccatctcagctttatcagatcaacagagctcgactctaattggaattggtttcagctacgctgcatgcaagtcggcggaaatgccaatgcccttggtgctaaaaagggattaggggcgcaaaaggtgtcctctcagagcttttccgagatcgaacgtcaggctcaggtagcagagaagctgagggagcagcaggctgcagatgctaagaagcaggccgaggaatctatggtggcctccatgcggctggcctaccaggaactgcagattgacagaaaaaaggaagaaaagaaactccagaatttggaagggaagaagagggagcaggctgaaagactaggcatgggcctagtcagccgcagcagcgtatcacattcagtcctgagcgaaatgcaggtgatcgaacaggagacacccgtgagtgctaaaagcagtcgatcccagttagatttgtttgacgacgtaggaacatttgccagcggcccacctaaatacaaggacaatcccttttcactcggcgagagctttggctctcggtgggacactgatgctgcctgggggatggacagggtagaggagaaggaaccggaggttaccattagctctataagacccatatctgagcgggcaacgaataggagggaggtcgagagccggtcttctggtcttgagagttccgaggctcgacagaagtttgctggagcaaaagccatatcctctgatatgttcttcgggcgtgaggtagacgctgagtacgaagctaggtcacgacttcagcagcttagcggctcgagcgctatttcttctagcgaccttttcggagatatggatggcgcccacggggcaggatccgtttccctgggaaatgtgctacccactgctgatatcgcacagttcaaacagggggttaaaagtgtggctggcaaaatggcagtgcttgcgaacggcgtcatgaacagtctgcaggatagatacggttcttattag

SEQ ID NO: 178374 - DNA, 1566 bp, synthetic construct
  misc_feature 1..1566: note = Description of Artificial Sequence: Synthetic coding sequence
  source 1..1566: mol_type = other DNA
atggccgccgagcccaacaagaccgagatccagaccctgttcaagcgcctccgcgcagtgcctacaaacaaggcatgcttcgactgcggcgccaagaacccttcctgggccagcatcacctatggagtattcctgtgtatcgattgctcgggagtgcatagatctctgggggtgcatctgtcattcattaggtctacagagctggatagcaactggaattggttccagctgagatgtatgcaggtaggaggcaacgccaacgcgacggcattttttcggcagcacggttgtaccgccaatgacgcgaacaccaaatacaactcaagggccgctcagatgtatcgggagaagattcgacagctcgggtcagcagccttagcacgacatgggacagatctgtggatcgacaacatgagctccgctgtgcccaatcactcacccgagaaaaaggattctgactttttcacagaacatactcagcctcccgcgtgggatgcccccgccacagagccctcgggaacacaacaacctgcaccaagtacagaatcatccgggcttgctcagcccgaacatgggcccaatactgatctactgggaacctctcctaaggcctcactggagctaaagtcttccataattggtaagaagaagccggccgcagcaaagaagggtctcggtgccaagaaaggactgggagctcagaaggtgtctagccagtccttctccgagatcgaacgacaagcccaggttgccgaaaagttaagggaacagcaggccgcagacgcaaaaaagcaggccgaggaatctatggtggccagtatgcgattggcttaccaggagttgcagatcgatcgaaaaaaggaggaaaagaagctgcagaacctggagggtaaaaagcgggaacaggcggagaggcttggcatgggcctggtgtctcgtagcagcgtgtctcactccgtactgtcagaaatgcaggtcattgaacaggagacgccggtctctgcaaagagtagcaggtcacagttggatctcttcgatgatgtgggcaccttcgcttccgggccacctaagtacaaggacaatccattctcccttggggaaagctttggtagccgttgggatacagacgctgcctgggggatggatagggtcgaagaaaaggagcctgaagtgactatatcttcgataaggccaatctccgagcgtgccacaaacagaagagaggtcgaaagcaggagcagcggactggagtcctctgaggcgcgccaaaaattcgcaggtgcaaaggctatttcttcagacatgttcttcggccgagaggtcgatgccgagtatgaagccagaagtcggctccagcagctcagcgggagctctgctatttcaagcagtgatctctttggcgacatggacggggctcatggcgcgggtagtgtttcactgggaaacgttcttcctaccgcagacatcgcccaatttaaacagggggttaagtctgttgctgggaaaatggctgttctagcaaacggcgtgatgaatagcctgcaggataggtacggatcttactag

SEQ ID NO: 178375 - DNA, 1551 bp, synthetic construct
  misc_feature 1..1551: note = Description of Artificial Sequence: Synthetic coding sequence
  source 1..1551: mol_type = other DNA
atgggcgaccccagcaagcaggacatcctgaccatcttcaagcggctcaggtctgtcccgacaaacaaagtgtgctttgactgcggcgccaaaaacccctcctgggcttctattacatatggcgtcttcctctgcatcgattgttcagggtcccatagatcacttggggtacacttgagtttcattcgctccaccgaactcgattccaactggtcctggtttcaactgcggtgtatgcaggttggaggaaatgcatctgcctcaagttttttccaccagcatggttgctcgactaacgataccaacgcgaaatataacagtagggcagctcaattatacagagaaaagattaagagtctggctagccaggcaacccgtaaacacggcaccgacttatggttagactcgtgcgtggtccctccgctctctcctccccccaaagaggaagacttttttgccagtcatgtgtccccagaggttagtgatacagcctgggcttccgctattgctgaaccatcatctctcacaagtagacccgtagaaaccaccttggagaataacgaaggagggcaagagcaaggaccgtcagtggaggggctcaatgttcccactaaggcaacactcgaggtgagctcaatcataaagaaaaagccaaaccaggcgaaaaaggggctcggagcgaaaaaagggagtctcggagctcagaagctagcgaatacatgtttcaacgagatcgaaaagcaggcacaggccgccgacaagatgaaggagcaagaggatttggccaaagtggtctcaaaggaagaatcaatcgtctcgtcactcagactggcatacaaagaccttgagattcagatgaaaaaagacgaaaagatgaacatttctggcaaaaaaaacgttgacagtgatcggttaggcatgggattcgggaactgcaggtcagttatcagtcatagtgtgacaagtgacatgcagaccatcgagcaagagtcacctattatggcgaaaccccggaaaaagtataatgacgacagcgatgactcttattttacgtctagctcctcttactttgatgaacctgtcgaactgcgcagttcttcttttagcagttgggacgactcctccgattcatactggaaaaaggaaacctcaaaggatacagagacagtcttaaaaacaacgggctacagcgatagacctaccgccagacgtaagccggattacgagcctgtggagaacacagacgaagcacaaaaaaagttcggaaacgtcaaggctatctcctccgacatgtacttcgggaggcagtcgcaggccgattatgagactagggccaggctggagaggctttctgcttcatcatctatctcctcagccgacctctttgaggaacctcggaaacagcctgcggggaactattctcttagctccgtgcttcccaacgctcccgacatggcacagttcaagcagggagtgcgtagcgttgccgggaaacttagtgtcttcgccaatggggtcgtcaccagcatccaggatcgctatggttcatag

SEQ ID NO: 178376 - DNA, 1335 bp, synthetic construct
  misc_feature 1..1335: note = Description of Artificial Sequence: Synthetic coding sequence
  source 1..1335: mol_type = other DNA
atgggcgaccccagcaagcaggacatcctgaccatcttcaagcggctgaggtctgtccccaccaacaaggtttgtttcgattgtggggctaagaatccaagttgggcctcaatcacatacggcgtgttcctatgcatcgactgcagtggctcacatcgttccctcggtgttcatctttcatttatcaggtcgactgaactcgatagcaactggtcctggttccagctgaggtgtatgcaagtgggggggaacgcctcagccgtcagcgacactgcctgggccagcgccattgcagaaccttctagcctgactagtcgccccgtagaaactacactggaaaacaatgagggagggcaggagcagggtcccagtgtagaagggctgaacgtacctactaaagcgaccttggaggtttcaagcattatcaagaagaaacctaatcaggccaagaagggactgggcgccaagaagggcagcctgggcgcccaaaagctggccaacacctgcttcaacgagatcgagaagcaggcccaggccgcagacaagatgaaagagcaagaggacctggctaaggtcgtatcgaaggaggagtctatcgtttcatccctgagactagcttataaggatctagagattcagatgaaaaaagatgaaaaaatgaacatttccggtaaaaaaaacgtagacagtgacagactggggatggggttcgggaattgtagatcagtaatttcgcattctgtcacctctgacatgcagaccattgagcaggagtcaccaattatggcaaagcctagaaagaagtataacgatgactctgacgacagctattttacatcttctagctcatatttcgacgagcccgtggagctgcggtcttcttcattcagttcatgggatgatagttccgactcttactggaagaaggagacatctaaggacactgagactgttctaaaaactaccgggtatagcgacagacccaccgcccggaggaagcctgactacgaacctgtggagaatactgacgaggcacagaagaagttcgggaatgtgaaggccatcagctctgatatgtattttggaaggcagtctcaggccgattacgaaaccagggctcggctggagaggctctctgcctcttcttctatttccagtgccgatttattcgaggaaccacgtaaacagcctgcaggcaactactctctgtcctctgtgctgcctaatgcgcctgatatggcacaattcaagcagggggtgcgatccgtggctggaaaactatctgtgttcgcaaacggcgtagtgactagcatacaagatcgctacggttcctag

SEQ ID NO: 178377 - DNA, 1419 bp, synthetic construct
  misc_feature 1..1419: note = Description of Artificial Sequence: Synthetic coding sequence
  source 1..1419: mol_type = other DNA
atgggcgaccccagcaagcaggacatcctgaccatcttcaagcggctacgatctgtgccaacaaacaaggtgtgttttgactgcggggccaagaacccatcgtgggcttccatcacctatggagtgtttctgtgcatcgattgttctggctcccaccgttcccttggagtccacctctctttcatccgctccaccgagctagacagtaactggagctggttccagttacggtgtatgcaggtcggagggaatgccagtgcactgtggctggactcctgcgtggtgccaccattgtcaccgccaccaaaggaggaagactttttcgcttcccacgtcagtccagaagtgtccgataccgcttgggcaagcgctatcgctgagccaagctccttgacatcccgtcccgtggaaacgactctcgagaataatgaaggaggacaggaacagggcccctctgttgaagggctgaacgtgccgactaaagccactctggaggtgtcgagcatcattaagaaaaaaccaaaccaagctaaaaagggattgggtgccaaaaaaggctccctgggtgctcaaaagctcgccaatacttgcttcaacgaaattgaaaaacaggctcaggctgctgataagatgaaggagcaggaggatctcgcaaaagtagttagcaaagaggagagcatagtcagctctctgagactagcttacaaggatttagagatccagatgaagaaggacgaaaagatgaatatcagcggcaagaaaaatgttgattctgacagactggggatgggttttggaaattgccggagcgttatctctcacagtgttactagcgacatgcaaacaattgagcaggagagccctatcatggccaaaccaagaaagaaatataatgatgattcagacgatagctacttcacatcttcttcaagctacttcgatgaaccggtggagttgcgatcgtctagtttctcgtcctgggatgatagttcagactcttactggaagaaggagacctcaaaggacactgaaacggttctgaaaaccacgggctattcagataggcctacagcccgacggaagcctgactatgagccggtggagaataccgatgaggcccagaagaaatttgggaatgtgaaagctatttcttcagatatgtactttgggcggcagagccaggcagattacgaaacgcgggcgcgcctggagaggctgtctgcaagttcctccatttcctccgccgatctattcgaggaaccccggaagcagccagcaggcaactattctctgtccagcgtgttaccaaatgccccagacatggcacagttcaagcagggagtgcgatcagtcgcgggaaaactttccgtgtttgccaatggggttgtgactagcatccaggatagatacggatcctag

SEQ ID NO: 178378 - DNA, 822 bp, synthetic construct
  misc_feature 1..822: note = Description of Artificial Sequence: Synthetic coding sequence
  source 1..822: mol_type = other DNA
tgactggccctgttccaggtgagcgacaccgcctgggccagcgccatcgccgaaccatcctcgctgacttcaaggcccgtggaaaccaccttggagaataacgagggcggacaggagcaaggcccgtcagtagaaggactgaacgtgcctacaaaggccaccttggaggtgtcttcaatcatcaaaaaaaaacccaatcaggcaaaaaaggggctgggtgcgaagaaggggtccttgggtgctcaaaaactcgccaacacatgcttcaacgagatcgaaaaacaggcccaggcggccgacaagatgaaggaacaggaggacttagccaaggtggtatccaaggaagaatcgattgtttcatcccttcgcctggcatacaaagatctggaaatacaaatgaaaaaagacgagaaaatgaatatctctggcaagaagaacgtggactcagataggctgggcatgggatttgggaattgtaggagtgtcatctctcattccgtcacctcggatatgcagacaatcgaacaggagtcacccatcatggccaagccaagaaaaaaatacaatgacgattctgacgatagctacttcacctcctcttcccggcctactgctcgcagaaaaccagattacgagcctgtggaaaatacagatgaggcgcagaagaaattcggcaatgtcaaggccatctcttctgatatgtacttcggcaggcagtcccaggctgattacgaaaccagggcccgactcgagagattatcggctagctcctcaattagttccgccgatctcttcgaggagcccagaaaacaacccgcatag

SEQ ID NO: 178379 - DNA, 459 bp, synthetic construct
  misc_feature 1..459: note = Description of Artificial Sequence: Synthetic coding sequence
  source 1..459: mol_type = other DNA
atgggcgaccccagcaagcaggacatcctgaccatcttcaagcggcttaggagcgtccctactaataaggtctgcttcgattgtggtgcaaagaaccctagctgggcctcaattacctacggcgtgtttctttgcatcgattgctctggttcacatcgaagccttggagttcacctgtcatttattcggtcaacagagctggactctaactggtcctggtttcagctccgatgcatgcaggtagggggaaacgcaagtgccgtgagtgacacagcctgggcgagcgccatagccgaacccagttcccttacatctagacccgtcgaaacgacacttgagaacaatgaaggcgggcaggagcagggtccttcagttgaagggctgaacgtgcccactaaagcaacactggaagttagtagcataatcaagaaaaaacctaatcaggccaaaaaaggctag

SEQ ID NO: 178380 - DNA, 5550 bp, synthetic construct
  misc_feature 1..5550: note = Description of Artificial Sequence: Synthetic coding sequence
  source 1..5550: mol_type = other DNA
atgtacgagggcaagaagaccaagaacatgttcctgacccgggccctcgagaagatcttggccgacaaggaagtgaaaaaggcgcaccactcacaactgagaaaggcctgtgaggtggccctggaagagataaaggctgaaaccgagaaacaatcccctccgcatggagaggccaaagccgggtcctcaacgttacctcccgtgaagtcgaagaccaacttcatcgaggcagataagtactttctccccttcgagttggcctgtcagtctaaatgtccccgtatcgtgtccacatctctagactgcctccagaagctgatcgcctacgggcacctgaccggaaatgcacccgattccactactccaggcaagaaactgattgaccggattatcgagacaatatgcggctgttttcagggaccgcagactgacgaaggagtgcagctccaaataatcaaggctctccttacggcagtaaccagccagcatattgaaatccatgaaggcactgtgctgcaggccgtaagaacttgttataacatttacttggccagtaaaaacctgatcaaccaaactactgctaaagccactctcacacaaatgctgaatgttatttttgccagaatggaaaatcaagccctgcaggaggccaaacaaatggaaaaggaacggcaccgccaacaccatcatctcctccagtcacctgtcagccaccatgaacctgagtccccacagttgcggtatttaccacctcaaactgttgatcatattagccaggagcatgaaggggatcttgatttgcatacgaatgacgtggacaagtcattacaggatgataccgagcccgagaacgggtcagacatctcttcagcagagaacgagcagacagaagccgaccaggcaaccgctgccgaaactttgtccaagaacgaggtgctctatgatggggagaaccatgattgtgaagaaaaaccgcaggatatcgtgcagaatattgtggaagagatggttaatattgttgtgggtgatatgggagagggtactactataaacgcctctgccgacgggaatatcgggacaattgaggacggaagcgatagcgaaaatattcaggctaatggaattcccggcactcctattagtgtcgcatacaccccatccctgcccgatgatagactgtccgtctcatctaacgacacacaagagtccggaaattcatccggcccatccccgggcgcgaagttttctcacatccttcagaaggatgcgtttttggtttttcgatcgctctgcaaactctcaatgaaaccactgagcgacgggcccccggatcccaaaagccatgaactgcgcagcaagatactctcactgcagcttttgctttccatactccagaatgcaggtcccatttttaggaccaatgagatgtttataaacgcaataaaacagtacctgtgcgttgccctaagcaaaaacggagtctcatctgtccccgaagtgtttgaattgagcttaagtatttttctcaccttactgtctaactttaaaactcacttgaaaatgcagattgaggtgttttttaaagaaattttcctgtatatcctggagaccagcactagctcatttgaccataagtggatggtgatccagactcttactcggatatgtgccgatgctcagagcgttgtggatatttacgtgaattatgattgcgatttgaacgccgcaaacatttttgagaggctagtgaatgacctgtccaaaatcgctcagggccgtgggtcacaggagctcggcatgtctaatgttcaagaactgagcctgcggaaaaagggactcgagtgtcttgtttctatcctgaaatgcatggtggagtggtcaaaggatcagtatgtaaaccccaacagccagacaacactgggccaggaaaagccctccgaacaggagatgtccgagatcaagcatcccgagaccataaatcgttacggatctcttaactcgctggaatccaccagcagttccggtattgggtcttatagcactcagatgtctggaacagataatccggagcagttcgaggtgttaaaacaacagaaggaaattattgagcaaggcatcgacctgttcaataaaaagccaaagagaggcattcagtacttgcaggaacaaggtatgctgggcacaaccccagaggacatcgcgcagttcctgcaccaggaagagaggcttgactccacccaagtcggggagttcctgggcgataatgacaagttcaataaggaagtcatgtacgcatacgtggaccaacatgattttagtgggaaggattttgtgtccgctctgcggatgtttcttgaaggatttcgactgccaggcgaggcccagaagattgacaggctgatggaaaaatttgccgcgcgttacttggagtgcaaccagggccagactctcttcgcctcagctgacacagcgtatgtcctggcctactcaataattatgctcacaacagacctccacagcccacaggtgaagaataaaatgacaaaagagcagtatatcaagatgaatcgcggaattaacgatagcaaagatctgcctgaggagtatctgtccgctatttacaacgagatcgctggcaagaaaattagcatgaaggaaactaaggaattgaccatccctactaaaagctctaagcagaacgttgcttccgagaaacagcgaagactcctctataacttggagatggagcagatggctaagacggccaaggccctgatggaagccgtcagccacgttcaggctccctttacctccgccacccatctggaacacgtacgcccaatgttcaagctagcctggactccattccttgcagcatttagcgtgggattacaggattgcgacgacaccgaggttgcatcattatgtcttgagggtatcagatgtgctattagaatcgcttgtattttcagtatccagcttgaaagggacgcctatgtgcaggcgttggccagattcacacttctaacagtgtccagtgggatcactgagatgaagcaaaagaacatcgatactataaagacgctgatcacagtggctcacaccgatggcaactatctgggaaactcatggcatgaaatcctcaagtgcatcagccagctggaactggctcaattgatcggtaccggtgttaaaccaaggtacatctcaggcactgtcagaggcagggaaggcagcctcacaggcactaaagaccaagccccagacgaattcgtcggtctggggcttgtcggggggaacgttgattggaaacagatcgcctccattcaggagtcgattggagagacgagctcccaatcagtcgtggtcgcagttgaccggatcttcactggctctacccgactggatggcaacgctatagtggatttcgtacgctggctgtgtgctgttagtatggacgagctgctgtctaccacccaccctcggatgttcagcctgcagaagattgttgagatctcatactataacatggggcgtatccgtttgcagtggtctcgcatctgggaggttattggcgatcattttaacaaggtgggctgtaacccaaacgaggacgtcgcgatcttcgctgtggactctcttcgacaactgtccatgaaatttctggagaaaggcgagctggcaaacttccggtttcagaaagactttttgaggccttttgaacatataatgaaacggaatcggtcaccaacaatccgtgatatggttgttcgctgcattgcccaaatggtaaactcgcaggccgccaatattcgctcaggatggaagaacatcttctccgttttccatttggcagcttcagatcaagacgagagcatcgtggagttggcatttcagacaactggtcatatcgtgacactcgtattcgagaagcacttcccagccacgatcgactccttccaggacgcagtaaaatgcctctctgaattcgcctgcaatgccgcatttccagatacgtcgatggaggcgatcaggctgatcaggcactgtgccaagtacgtgtcagacagacctcaggctttcaaggaatatacctctgatgatatgaacgtggcccccgaggacagagtctgggtcagaggatggttcccaatcttattcgaactgagctgcattatcaatagatgcaaacttgatgtccgcaccagagggctcaccgtgatgttcgagattatgaaaacctacggacatacctacgaaaagcattggtggcaggacttgtttcgaatcgtctttagaatttttgataacatgaagctgccagagcagcagaccgagaaagctgagtggatgaccaccacgtgtaatcatgctctatacgccatttgcgatgtgttcacgcagtacttggaagtactctcagatgttctacttgacgacatcttcgcccagttgtactggtgcgtgcagcaggacaacgagcagctggcccggtctggcactaattgtttggagaacgtggtgattcttaatggcgagaaatttacactcgagatatgggataaaacatgcaactgcacattggacattttcaaaaccactattcctcacgctctccttacctggaggccgaactccggagagacagctccaccccccccaagccctgtcagcgaaaagccgctggacactatctctcagaagagcgttgacattcatgattctatccagccccggtccgtcgacaatcgccctcaggctcccctggtatcagccagcgctgtcaatgaggaagtttctaagatcaaatcgaccgcaaaattcccagaacagaaactgtttgccgcgctgctcattaaatgtgtagttcagctcgaacttattcagaccattgataacattgtgtttttccccgcgacatcaaaaaaggaggacgccgaaaatctggccgctgctcaacgcgatgctgttgattttgatgtgagggtggacacacaggaccaaggcatgtatcgcttcctgacgtcccagcaattgttcaagttactcgattgcctgctggagagccataggtttgcgaaagccttcaactctaataacgaacagagaacggcattgtggaaggctggtttcaagggtaaatccaaaccaaatctcctcaagcaggagactagctctctggcatgcggcctgcgaattttgtttagaatgtacatggacgaaagtcgggtgtccgcctgggaagaagtgcagcaacgacttctcaatgtgtgctccgaagccctcagctactttttaactctgacctcagaaagccaccgggaggcatggacaaacttgctcctcttgttcctcacaaaagttctgaaaatttccgataaccgcttcaaggcccacgcgagtttctattacccgctcctttgtgaaatcatgcagttcgatctcatccccgagctgcgcgctgtgctgcgtcgctttttcctgcgaattggtgttgtctttcagatcagccagcccccggaacaagaactcgggatcaacaagcagtag

SEQ ID NO: 178381 - DNA, 5358 bp, synthetic construct
  misc_feature 1..5358: note = Description of Artificial Sequence: Synthetic coding sequence
  source 1..5358: mol_type = other DNA
atgcaggagagccagaccaagagcatgttcgtgagccgggccctggagaaaattctggcggataaggaggtgaaacgacctcagcactctcaactgaggcgtgcctgtcaagtcgcactggacgaaattaaggcagagatagaaaagcagcggctagggactgccgcccctcccaaagcgaattttatcgaagcagacaagtactttctgccgtttgaactagcatgccagtccaagagtcccagagttgtctcaacttcgttagactgcctacagaagctgatcgcctatgggcacatcacaggcaatgccccagattcaggtgcacccggcaaacggctcatcgaccgaatagttgaaaccatttgctcttgctttcaagggccacagaccgacgaaggtgtccagttacagattattaaagccctcctgacagctgtgacgagcccccatatcgagatacacgaaggtacaattcttcagactgtccggacctgctacaacatctatctggcgtccaagaaccttatcaaccaaaccacggccaaggcaactctgacacagatgctaaacgtcatcttcacccggatggaaaatcaagtacttcaggaggctcgggagttggaaaagccaattcagtctaaacctcagtcccccgtaattcaggctgccgccgtgagccccaaatttgtccgtctcaagcactcgcaggcccagtccaaaccaaccacgccagaaaagacagatcttacaaatggcgagcacgccagaagcgattctggtaaggtgtcaactgagaatggcgacgcgcctagggagaggggatcctctctctccggtacagacgacggggcccaggaggtggtgaaggacatcctcgaggacgtggtgacttctgctattaaggaggctgccgagaagcacgggttgacagagccggaacgcgttctgggcgaacttgagtgtcaggagtgcgctatcccacctggggtagatgagaactcccagactaacggaatcgccgatgatcgccagtccctgagttccgccgataacctggagtctgatgctcaagggcaccaggtggccgctaggtttagccatgttctgcagaaggatgcttttctagtgttcagaagtctgtgtaagctctcaatgaaacctctgggggaggggccgccggacccaaagtcacatgaacttcggtccaaggtggtgtcactgcaattgctactatctgttctgcagaatgctgggccggtttttcggacccacgagatgtttattaatgctattaagcagtatctttgtgtggctctgtccaaaaatggggtgagtagtgtgccagacgtgttcgaactctccttggcaatatttctgacactacttagcaattttaagatgcacctcaaaatgcagattgaagtgtttttcaaagaaatttttttgaatattctggagacctctacatcctctttcgaacataggtggatggtaatccaaacacttaccaggatctgtgctgacgcccagtgcgtggtggacatctatgtgaactatgattgcgacctaaatgctgctaacatctttgaacggctggtgaacgatctgtcgaagatagcacaggggcgctcagggcacgaactgggaatgactcccttacaggaactgtccctgagaaagaagggtcttgagtgcctggtttccatccttaaatgtatggtggaatggtccaaagacctatatgtcaatcccaatcaccaaacatccctcggccaagaaagactgaccgaccaggaaattggggacggcaaaggactggatatggctcgccggtgtagtgttacatctatggaatcaactgtctcctcaggcacccagaccacggtacaagatgaccccgaacagttcgaagttattaaacagcagaaagaaattatcgagcacggcatcgagttgtttaacaagaagcctaaaagagggatccagtttctccaggagcaggggatgcttggcacttcggtggaagacatcgctcagttcttgcaccaggaggagcgtctggacagtacccaggtcggggacttcctgggcgatagcgctaggttcaataaagaggtgatgtatgcctacgtcgaccagctggacttctgtgaaaaggagttcgtttcggctttaaggacctttctggaggggttcaggctgccaggcgaagcgcagaagattgatagactgatggagaaatttgccgctcggtacattgaatgtaaccagggccagacactgttcgcatcagcggatacggcctacgtcctcgcatatagcataattatgctgaccactgatctgcactctccacaggtgaagaacaagatgaccaaagaacagtatattaagatgaaccgggggatcaatgactccaaagacttgcccgaagaatacctttcgagcatttacgaagagatcgagggaaagaagattgcaatgaaagaaacaaaggagttaacaatcgccaccaaaagcacaaagcaaaacgttgcctctgaaaagcaaaggaggcttctctacaacctcgaaatggagcaaatggccaagacggccaaggccttaatggaagccgtgtcccacgctaaggcaccattcaccagcgccacccacctggatcacgtgcgcccaatgtttaagctcgtttggacccccttgctcgctgcctatagcatcgggctgcaaaactgtgacgacactgaggtagcctctctgtgtctcgagggaatcagatgcgccattcggattgcctgcatctttgggatgcagctggagagggatgcatacgtgcaggcactagctcgattttcactgctgactgccagcagtagtattaccgagatgaaacagaaaaatatcgatactatcaaaacactcatcaccgtggctcataccgacgggaattatctgggaaactcatggcatgaaatcttgaaatgtattagtcaactcgagctggcacagttaatcggaacaggcgtgaaaactcggtacctgtccggcagcggcagggagagagaaggatctcttaagggccacacattagccggcgaggagttcatgggccttggcctcgggaacttggtatcagggggggtcgataaacgtcagatggcatccttccaggaaagtgtgggagagaccagcagtcaaagcgtcgtcgtagctgttgatcgcatattcaccggatccaccaggttggatggaaacgcgattgtagattttgtgcggtggctgtgtgccgtatctatggatgagttggccagcccacatcacccgcgtatgttttcactccaaaagatagttgaaatctcttactataatatgaatcgcatccgtcttcagtggtcaagaatctggcatgtaattggcgaccactttaataaggtggggtgcaatcccaatgaggatgttgccatttttgcagtggattccctgcggcagcttagtatgaagttcctcgagaaaggagagctggctaattttcgatttcagaaagacttccttaggcctttcgaacacataatgaaaaagaatcgcagccccaccattcgagacatggctatcaggtgtatagcacaaatggtcaactcccaggctgcaaatattcggagtggttggaagaacatctttgccgtcttccatcaggccgccagcgatcacgacggaaatatagtcgagctggctttccagacgacatgccatatcgtgaccaccatttttcaacaccattttcccgccgctattgatagtttccaggacgctgttaaatgcctgagtgaatttgcttgtaatgcggcattccctgacacttcaatggaagctatccgcctgattagattttgtggaaagtatgtgagcgagaggcccagggtgctgcaggagtacactagtgacgatatgaatgtcgcccctggagacagagtctgggttcgagggtggttccctattctgtttgagctgagttgtataatcaatagatgtaagctagatgtccgtacgcgcggtctaacagtcatgtttgaaatcatgaagagttacgggcatacgtttgaaaaacattggtggcaggacctcttcaggatcgtgttccgcatctttgacaatatgaagcttccagaacaactgtccgaaaaaagcgaatggatgacgacaacctgcaaccacgctctgtatgctatttgtgatgtgttcacacaattttatgaagctctcaatgaggttctcctctctgatgtgtttgcccagctccagtggtgtgtcaaacaggacaatgagcagcttgcgagatccggtacaaattgtctcgagaacttggtgatttctaacggagagaagttctccccagaagtgtgggatgagacatgtaactgcatgctggacatattcaagaccacaatccctcacgtgttgctgacatggcggcccgtgggcatggaggaggattccagtgagaagcacttggacgtcgaccttgatcggcaatcattgtcttccattgacaaaaacccctctgagcgcggacagagccaactcagcaacccaactgacgactcttggaagggacggccttacgctaatcagaagctgttcgcctcactattgattaaatgtgtggtgcagctcgagcttatacagaccatcgataatatcgtcttttacccagccacttcaaagaaggaagacgctgaacacatggtggcggcgcagcaagatacattggacgcggacatccacattgagacagaggaccagggcatgtataagtatatgtccagtcagcacttattcaaactgctggattgcctgcaagagtctcacagtttcagcaaagccttcaactctaattacgagcaacggacagttttgtggcgggccggattcaaaggcaagtcgaaacctaacttgctaaagcaggaaacttcctcccttgcttgctgtctgcgtattctctttcgcatgtacgtggatgagaatcgtagggattcttgggaagagatccagcagaggctgttaaccgtgtgtagtgaggccttggcttatttcatcacagtgaacagtgagagccatcgagaagcatggacatccctgttgttgttgcttctcaccaagacactcaagatcaatgacgagaagtttaaagcccacgcttctatgtactatccctacttatgcgaaatcatgcagttcgacctcatcccagagctccgggctgttctgcgtaagttcttcttgagaatcggagtagtctacaaaatctggattcccgaggaacctagtcaggtgccagccgctctgagtcccgtctggtag

SEQ ID NO: 178382 - DNA, 2499 bp, synthetic construct
  misc_feature 1..2499: note = Description of Artificial Sequence: Synthetic coding sequence
  source 1..2499: mol_type = other DNA
atgcaggagagccagaccaagagcatgttcgtgagccgggccctggaaaagatcctggcagataaggaagtgaagaggcctcagcattctcagttacgacgggcttgccaagttgcattagatgagataaaggcagaaattgagaagcagcggctcggtaccgctgcaccgccaaaggctaacttcattgaggcagacaagtattttctgcccttcgaactggcatgccaatcaaagagcccacgggtggtgtcaacatctcttgattgtcttcaaaaattaattgcttatggccatatcaccggaaacgcgccggattctggcgctcccgggaagcgactgatcgataggatcgttgaaactatatgttcctgcttccaaggtcctcaaacggacgagggcgttcagctgcagatcatcaaagctcttctgactgcagtgactagcccacacatcgagatccacgaaggcactattttgcagactgtgagaacttgttacaatatctaccttgcctcaaagaacttgatcaaccagaccactgccaaggctacactcacccagatgctgaatgtgatcttcacccgcatggagaaccaggtgttgcaggaggccagagagctggagaagcctatccagtcaaagccccagtctcccgtcatccaggcagcagctgtgtcccccaagttcgtgcgcttgaagcactctcaggcgcagagcaagcccactacacctgagaagactgatctgacgaacggtgaacatgcacgttctgattccggaaaggtaagtacggaaaacggggacgccccgcgagagcggggcagtagtttgagtggcacagatgatggagcacaggaggtcgttaaggacattctcgaggatgtggttacctcagccattaaggaggccgccgagaaacacggtttaacggagcccgagagagtactgggtgagttggagtgccaagaatgcgcgattccaccgggagtggatgaaaattctcagaccaatggtattgccgacgatagacagagcctgtcttctgccgataacctggagagcgatgctcagggacaccaggtcgccgctcgtttcagtcacgtccttcaaaaggatgccttcctggttttccggagcctctgcaagttgtccatgaaacccctgggggagggcccgcccgatccaaagagccacgagctgagaagtaaggtcgtatctttgcagctgctcttgagcgtccttcagaatgctggcccagtattcagaacacacgagatgttcatcaatgccatcaagcagtatctttgcgtcgctctgagcaagaatggcgtctcttccgtgcctgacgtctttgagcttagcctggcaatcttcttgacactgctgtccaatttcaagatgcatctgaaaatgcagattgaggtattctttaaggagatcttcttgaatatactcgagaccagcacatcctcctttgagcaccgctggatggtcattcagacacttacgcggatttgcgcggacgcacaatgtgtagttgatatttatgtgaactacgactgcgacttgaacgctgctaacatttttgagcgacttgtgaatgacctctccaagatcgcccagggccgttcaggtcacgagttaggaatgacacctttacaggaactaagccttagaaagaagggcctagagtgtctggtaagcatactaaagtgtatggtcgaatggtccaaagacctgtacgttaaccctaatcatcagacttcattaggccaagaaaggctgactgaccaggaaattggggatggcaaaggcttagatatggccaggaggtgctccgtaacgtctatggaatctaccgtgtcctctgggacccaaaccaccgttcaggacgatccagagcagtttgaggttatcaagcagcagaaggaaattatagagcacggaatagaactgttcaacaaaaagccaaagcgagggattcagtttctccaggagcagggtatgcttggaacctcggttgaggacatcgcacagttcctgcaccaggaagagcgcctggacagtactcaagtgggggactttctaggagattcggcacggttcaacaaagaggtcatgtacgcgtatgtcgatcagctcgacttttgcgagaaagaatttgtgtccgccctgagaacattcctcgaagggtttagactgcccggggaagctcaaaaaatcgaccgactgatggagaagtttgccgccaggtatatcgagtgtaaccaaggacaaactttgttcgcttctgccgatactgcatacgtcctggcatattctattatcatgctcacaacggacctccattcaccgcaggtaaaaaacaagatgacaaaggagcagtatatcaagatgaaccgcggcataaacgatagcaaagatctccctgaggagtacctttcttcaatttacgaggagattgaaggcaagaagatcgctataaaaaagaactag

SEQ ID NO: 178383 - DNA, 591 bp, synthetic construct
  misc_feature 1..591: note = Description of Artificial Sequence: Synthetic coding sequence
  source 1..591: mol_type = other DNA
atgggcagcgtgaacagccggggccacaaggccgaggcccaggtggtgatgatgggattggattctgccggcaaaacaacacttctgtataagctcaagggtcatcaattagtcgagactctgcctactgtcggatttaatgtcgagccgttgaaagctccgggtcacgtgtctttgaccctgtgggacgttggtggccaggcgccgttgcgggcaagttggaaagactacctggaaggtactgacatcctagtatacgtactggactctactgacgaagccaggctgccagaatccgccgccgagttaaccgaagtgctgaacgacccaaacatggctggagtaccgtttttagtactggcaaataagcaggaggcacctgacgcgctccccttgctgaagatcagaaataggttgtccctggagcggttccaagaccattgctgggagctgcggggctgtagcgccctgaccggagaaggcctgcccgaagctctgcaaagcttgtggtccctgcttaagtcacgctcttgcatgtgtctgcaggccagggctcacggcgcggaacgcggcgattcaaagagaagttag

SEQ ID NO: 178384 - DNA, 966 bp, synthetic construct
  misc_feature 1..966: note = Description of Artificial Sequence: Synthetic coding sequence
  source 1..966: mol_type = other DNA
atgttcagcctgatggccagctgctgcggctggttcaagcggtggagagaacctgtgcggctggccaataagcaggacaaggagggagctttgggtgaagccgacgtgatcgaatgtttatcactggaaaagctcgtgaacgaacacaagtgcctgtgccagatcgaaccctgctcggccatatccggatacgggaaaaagatcgataagtcaataaaaaagggcttgtattggctcctgcatgtgatcgcgcgagattttgatgccctaaacgagcgaatacaaaaggaaactactgaacaacgggccctcgaggaacaggagaagcaagagcgggccgaaagagttcggaaacttagagaggagcgcaagcagaacgagcaggagcaggcggaactggatgggacttccggtcttgccgagctagaccccgaacccactaatccttttcaacccattgcaagcgtgatcatcgagaatgaaggcaagctggagcgcgaaaaaaagaatcaaaaaatggagaaggattccgatggctgtcaccttaaacacaaaatggagcacgagcagatcgaaacgcagggacaagtgaatcacaacggacagaagaataacgagttcgggctggtggagaactataaagaggctttaactcagcaactcaagaacgaagacgaaaccgacaggccaagccttgagtccgctaacggcaagaaaaagacaaaaaagctccgcatgaagcggaatcaccgggtggagcccttaaacatcgatgattgcgcacccgagagccctactcctccgcctccacctccacctgtgggctggggaacacctaaagtaaccagattaccgaagctggagcctctgggcgaaacccaccacaatgacttttatagaaaaccactgcccccgctggcagttccccagaggcctaactcagatgcccacgacgtgatatcctag

SEQ ID NO: 178385 - DNA, 1287 bp, synthetic construct
  misc_feature 1..1287: note = Description of Artificial Sequence: Synthetic coding sequence
  source 1..1287: mol_type = other DNA
atgttcagcctgatggccagctgctgcggctggttcaagcggtggcgggaaccagttcggaaggtaactctcctgatggtgggtcttgacaacgccgggaaaaccgccaccgccaaagggattcagggggaatatccagaggacgtggcgcctacagtcggcttttctaagattaatctcaggcaaggcaaatttgaggtcaccatcttcgacctcggcgggggcatccgaattagaggcatctggaaaaattactatgctgagtcgtatggagtgatattcgtggtagatagttccgacgaggaaaggatggaggaaaccaaggaagcgatgtccgagatgctgcgccatccccgcataagtggcaagcctattctggtgttagctaataaacaggataaagaaggggctctgggggaggctgatgtgatcgagtgccttagccttgaaaagctagtgaacgaacataaatgtctgtgtcagatcgaaccttgcagcgctatttcagggtatggaaagaaaattgataagtctatcaaaaagggattatattggctgctacacgtcattgccagagatttcgatgccctaaacgagcgaatccagaaggagactactgagcagcgggccctggaagagcaggagaaacaggagagggcagagagagttaggaaattacgcgaggagagaaaacagaatgaacaagaacaagccgagctagatggtacatctggtttggctgagctcgatcccgagcctactaacccatttcaacctatcgctagtgtgataattgagaatgagggaaagcttgagcgtgaaaaaaagaaccagaagatggagaaggatagcgatgggtgccacttgaaacataagatggagcacgagcagatcgagacccagggacaggtgaaccataacggccaaaagaataacgaattcggccttgttgagaattataaagaggcactcacacagcagcttaagaatgaggacgagacagaccgcccgtcgttggagtctgcgaacggcaagaaaaagaccaagaagctgcggatgaagaggaaccaccgagtcgagccccttaacatcgacgattgtgctcccgaaagtcctacaccacctcccccacctccccccgtgggctggggcactcccaaagttaccagattgcccaagctggagccactcggcgagacgcaccacaatgatttttatcgcaaacccctgccacccctggccgtcccccagcgcccaaattccgatgcacacgatgtaatctcctag

SEQ ID NO: 178386 - DNA, 1287 bp, synthetic construct
  misc_feature 1..1287: note = Description of Artificial Sequence: Synthetic coding sequence
  source 1..1287: mol_type = other DNA
atgttcagcctgatggccagctgctgcggctggttcaagcggtggcgcgaaccagttcgcaaggtgaccctgctcatggtcggcctcgacaacgctggaaaaactgccactgccaaaggcatacaaggcgagtaccccgaagacgtcgcccctacagtgggtttcagcaagatcaatcttagacagggcaaatttgaagttactattttcgatctgggaggtggaatccgcatacgcggaatatggaaaaattactacgccgaatcttatggcgtcatcttcgtcgtggattcatctgacgaggagaggatggaggagacgaaggaagccatgtccgaaatgctgcggcaccccaggatttctggaaagccgattcttgtcctggccaataaacaggataaagagggtgcgctaggtgaagctgatgttatcgagtgcctgagtctggagaaactggtcaatgagcataagtgcctctgtcagatagaaccttgtagcgccatctctggctacgggaagaaaatcgataagagtatcaagaagggtttgtattggcttctccatgttatagcaagagattttgacgccctaaacgagaggatccagaaggagacaaccgagcagcgcgctcttgaggagcaggagaagcaagagagggcagagcgcgtgcgtaagctgcgggaggagcgcaagcagaatgagcaggagcaggctgagctcgatggcactagtgggctcgccgagctggatccagaacccacaaatccattccagcctattgcctccgtgataatcgaaaacgagggaaagctcgagcgcgagaaaaaaaaccagaaaatggagaaggattccgacgggtgccatttgaagcataagatggagcatgagcagatcgagactcagggacaggttaatcacaacggccagaaaaacaacgaattcgggttggtggagaattacaaagaagccttgacccagcagttgaagaacgaggacgagaccgatcgtccaagcctcgaatctgctaatggtaaaaaaaagactaagaagctgcgaatgaaacgcaatcaccgcgtggagccattgaacatcgacgattgcgctcctgaatcaccgacaccccccccacctccccccccggtcggatggggaacccctaaggtgacgcggctccctaagctagaaccacttggggagactcaccataacgacttttacagaaagcccctgccgcctctggcagttcctcaacgccccaactcagacgcccatgatgttatatcttag

SEQ ID NO: 178387 - DNA, 978 bp, synthetic construct
  misc_feature 1..978: note = Description of Artificial Sequence: Synthetic coding sequence
  source 1..978: mol_type = other DNA
atggaggagaccaaggaggccatgagcgagatgctgcggcacccccgtataagcggcaaacctatcctggtattagctaacaagcaggataaggagggtgccttgggtgaggctgacgtgatcgagtgcctcagtcttgagaaactagttaacgaacacaaatgtctctgccagatagaaccatgtagcgctatttcagggtatggcaagaaaattgataagagtattaagaaaggcctctattggctcctacatgtaatcgcccgcgacttcgacgctttgaacgagaggatccaaaaggaaaccacggagcaaagggcactagaggagcaggaaaagcaggagagagcagaaagagttcgcaagcttcgcgaggaaaggaagcaaaatgagcaggaacaagccgagctcgatgggacctccggccttgcagaactggatcccgaacccaccaacccattccaacctatcgcgtccgtcataatcgagaacgaggggaaactcgaacgcgagaagaaaaaccaaaaaatggagaaggactctgacggctgtcacctaaaacataaaatggaacatgaacaaattgagacccagggccaggtcaatcacaacggccagaagaataacgaatttggactggtcgagaactacaaagaggctttaacccagcaactgaaaaacgaggacgaaactgatagaccatctctcgagtcggcgaatggtaagaaaaagacgaagaaactgagaatgaagcgaaatcacagagtcgagccactcaatatcgacgattgtgctcccgaaagtcccacaccacctccacccccacctccagttggatgggggactccaaaggtgaccaggctgccgaagctggaaccgttgggagagacccaccacaacgatttctacagaaaaccgctgcctccactcgcagtgccacagaggcccaatagtgacgcccacgatgtgatctcttag

SEQ ID NO: 178388 - DNA, 450 bp, synthetic construct
  misc_feature 1..450: note = Description of Artificial Sequence: Synthetic coding sequence
  source 1..450: mol_type = other DNA
atggagaaggacagcgacggctgccacctgaagcacaagatggagcatgaacagatcgaaactcaggggcaggtgaaccacaatggacaaaaaaacaatgagtttggcctggttgagaattataaagaggccttaactcagcagctgaagaatgaagacgagaccgatcgcccctcgttagaatccgcgaacgggaagaagaaaactaaaaaattaagaatgaagcggaaccaccgcgtggaacctctgaatatagatgactgtgccccagagagtcccacaccaccaccaccaccaccccccgtagggtgggggacccctaaagtcacaagattgcctaagttggaacccctcggagagacacaccacaacgacttctacagaaagccgctacctccactggctgttccccagcgccccaactccgatgctcacgatgtgatttcttag

SEQ ID NO: 178389 - DNA, 579 bp, synthetic construct
  misc_feature 1..579: note = Description of Artificial Sequence: Synthetic coding sequence
  source 1..579: mol_type = other DNA
atgggcagcctgggcagcaagaacccccagaccaagcaggcccaggtcttgttgcttggcctcgactccgctggaaagtctacactgctgtataagctcaaactggcaaaagatatcactaccatccctacaatcgggttcaacgtagagatgatagagctggaaaggaatctgagtctaaccgtgtgggatgtgggaggacaggagaaaatgaggaccgtgtggggatgctactgcgagaacaccgacggtctggtgtacgttgtcgatagcaccgataagcagaggctggaagaatcgcagcgccagtttgaacatatactaaaaaacgaacacatcaaaaacgtaccagtagtcctcttagcgaacaaacaggacatgcccggggccctgacagcagaagatatcactcgtatgttcaaggttaagaaattatgctccgacagaaactggtacgtccagccatgctgcgccctgacaggcgaaggtctggcacaggggttccgcaagctgactggatttgtgaagtcacacatgaaatctagaggagacactttagctttttttaagcaaaattag

SEQ ID NO: 178390 - DNA, 555 bp, synthetic construct
  misc_feature 1..555: note = Description of Artificial Sequence: Synthetic coding sequence
  source 1..555: mol_type = other DNA
atgggcctgctgaccatcctgaagaagatgaagcagaaggagcgggaattgaggctcctcatgctcggcctggataacgccggcaagactacaatcctgaagaagttcaatggagaggacatcgataccatatctcctacgctggggttcaatattaagaccctggaacacaggggattcaagttaaacatctgggatgtgggggggcaaaagtccctgcggagctactggcggaattacttcgagtctaccgacggtctgatttgggtggtggattccgctgaccgccagcgcatgcaggattgccagagagaactgcaaagcttgctggtggaggaacgcctggcaggtgccaccctgctgattttcgctaacaaacaggatctgccaggggccctgtcatcaaacgccatacgcgaagtcctggagctggattccatcaggtcccatcattggtgcatccagggctgttcggccgtgactggtgagaaccttcttcccggcatcgattggctgctcgatgatatcagctcgcggatttttacagccgactag

SEQ ID NO: 178391 - DNA, 555 bp, synthetic construct
  misc_feature 1..555: note = Description of Artificial Sequence: Synthetic coding sequence
  source 1..555: mol_type = other DNA
atgggcctgctgaccatcctgaagaagatgaagcagaaggagcgggaactaagactgttaatgttaggattggataacgcaggtaaaacaacaatattgaaaaagtttaacggagaagacattgataccataagtccaactctcggctttaacattaaaacccttgagcaccgtgggttcaagctgaatatctgggatgtagggggacagaagtccctgaggtcttactggaggaattattttgagagcacagacgggcttatttgggtcgtcgactcagccgatcgccagaggatgcaggattgtcagagagaattacagagcttattggttgaagagcgcttggccggagcgaccctgctgatttttgcaaataaacaggatcttcctggcgctctgagttccaatgccatcagggaagtgctggagctggatagcattcggagccaccactggtgcatccagggctgctctgccgtgactggagagaacctgctcccaggcatagactggttactggatgacatatcttcccgtatcttcacagctgattag

SEQ ID NO: 178392 - DNA, 474 bp, synthetic construct
  misc_feature 1..474: note = Description of Artificial Sequence: Synthetic coding sequence
  source 1..474: mol_type = other DNA
atgggcctgctgaccatcctgaagaagatgaagcagaaggagcgggagttgcggctgttgatgttagggttggacaatgccggcaaaaccaccattctgaaaaaatttaatggtgaggacatcgatactatttcgccgactcttggttttaatattaagacccttgaacaccgcggctttaagctcaacatttgggacgttggagggcagaagagcctgcgcagttattggcggaattacttcgaatctacagatggactgatctgggtggtggattctgctgaccgacagagaatgcaagactgccaacgggagctgcaaagtctcctggtcgaagaggtactcgagttggactctattagatcccaccactggtgtattcagggttgttcagccgtgacgggggaaaatctcctgccaggtatcgattggctcttagacgacatttcttcccgtattttcaccgcagattag

SEQ ID NO: 178393 - DNA, 549 bp, synthetic construct
  misc_feature 1..549: note = Description of Artificial Sequence: Synthetic coding sequence
  source 1..549: mol_type = other DNA
atgggcctgctgagcatcctgcggaagctgaagagcgcccccgaccaagaagtgcggatactgctcctgggccttgataatgcaggaaaaacaacattgctaaagcagctcgccagtgaggacatttcccatattacaccaacgcaggggtttaatattaagagcgtgcaatcacaggggtttaagctgaacgtctgggacataggaggtcagcgtaagattcgaccttattggaaaaactatttcgaaaatactgacatactcatctacgtgatcgattccgccgaccgaaaacgcttcgaggagactggtcaggagctcgcggagctcctggaagaggagaagctgagctgcgttccagttcttatctttgcgaacaaacaggacttgctgacagctgcacccgcctccgagattgcagaaggcttgaacctgcatacaattagggatagggtctggcagattcagtcctgcagcgcactgaccggagagggcgtgcaagacggcatgaactgggtttgcaaaaatgtgaacgcaaagaaaaaatag

SEQ ID NO: 178394 - DNA, 606 bp, synthetic construct
  misc_feature 1..606: note = Description of Artificial Sequence: Synthetic coding sequence
  source 1..606: mol_type = other DNA
atgggcaaccacctgaccgagatggcccccaccgccagcagcttcttgccccactttcaggcgctccacgtcgtggtgattggactagattccgccggaaagacgtctttgttatacagactgaaatttaaagaattcgtgcagagcgtgccaaccaaggggttcaatactgagaagatacgcgtcccgctgggtgggtctagagggatcaccttccaggtgtgggatgtgggcgggcaggagaaattaaggccactatggcggtcttacacccgtcgaacggacggcctggtatttgtcgtggacgcagcggaggccgagcgcttggaagaagcaaaggtggagttgcacaggatcagcagggccagcgacaaccaaggagtgcctgtgctggtccttgccaataagcaagaccagccaggcgcactgtccgcagccgaggtggagaagagactggcggtccgagagctcgcagcagcaaccctgacacacgtgcagggatgttccgcagtggacggcttagggctccagcaggggctggaaaggctgtacgagatgattctgaagagaaagaaggcagcgagaggggggaagaaacgcaggtag

SEQ ID NO: 178395 - DNA, 561 bp, synthetic construct
  misc_feature 1..561: note = Description of Artificial Sequence: Synthetic coding sequence
  source 1..561: mol_type = other DNA
atgggcctgctggaccggctgagcgtgctgctgggcctgaagaagaaggaggtccatgtgctgtgcttaggactcgataacagtggtaagactacaatcatcaacaaactcaaaccctctaatgcccagagccaaaatattctgccaacaatagggttcagcatagagaagtttaagtctagctctttgtctttcacggtgtttgatatgtcaggacaagggagataccggaatctgtgggagcattactacaaggagggacaggcaatcatattcgtgatagacagctcggatcgccttagaatggtggtagcgaaggaggaactcgacactctgctcaatcaccccgatataaaacaccggcgtatccccatcctcttctttgctaacaagatggatctgagagatgccgtcacatcagtgaaggtgagccagcttctctgcttagaaaatatcaaggataaaccctggcacatttgcgcctcggatgccattaagggggagggtcttcaggagggtgtcgattggctgcaagaccagatccagactgtgaagacctag

SEQ ID NO: 178396 - DNA, 561 bp, synthetic construct
  misc_feature 1..561: note = Description of Artificial Sequence: Synthetic coding sequence
  source 1..561: mol_type = other DNA
atgggcctgctggaccggctgagcgtgctgctgggcctgaagaagaaggaggttcacgtgctctgccttggtctggacaatagtgggaagaccacaattatcaacaaactgaaaccctccaatgcacagagccagaatatcctccctactatcggctttagcattgagaaatttaaatcttcctccctgtccttcactgtgtttgatatgagcggccagggacggtatagaaacctgtgggaacattactataaagaaggtcaggccattatttttgtgatcgattcaagcgaccggctgcgcatggtcgtcgcaaaagaggaactggacaccctgcttaatcacccagatatcaagcatcggcggattcccattctgttctttgccaacaagatggacctgcgtgacgcggttaccagcgtgaaggtgtcacaattactgtgcttggaaaacattaaagataaaccttggcacatctgtgccagcgatgccattaagggcgaaggtttgcaggaaggcgtggactggctgcaggaccagattcagaccgtcaagacctag

SEQ ID NO: 178397 - DNA, 366 bp, synthetic construct
  misc_feature 1..366: note = Description of Artificial Sequence: Synthetic coding sequence
  source 1..366: mol_type = other DNA
atgggcctgctggaccggctgagcgtgctgctgggcctgaagaagaaggaagtccacgtcctgtgtctgggactggacaattctggaaagacaaccattatcaataaactgaagccgtctaacgcacagagccagaatattctccccacaatcggcttcagcattgagaaattcaagtctagcagcctgtcgttcaccgtgttcgacatgagtggacaaggacgatataggaatctctgggagcattattacaaggagggtcaagcaatcattttcgttatcgactcaagtgaccgcttgcggatggtggtggctaaagaggaactggacacacttctcaatcatcccgatattaaacatcgctag

SEQ ID NO: 178398 - DNA, 561 bp, synthetic construct
  misc_feature 1..561: note = Description of Artificial Sequence: Synthetic coding sequence
  source 1..561: mol_type = other DNA
atgggcctgctggaccggctgagcgtgctgctgggcctgaagaagaaagaggtgcacgtactctgcctcggcctggataactccggcaagacgacaatcatcaataagttgaaaccatccaacgcccagagccagaatattttacccaccattggattcagcatagaaaaattcaaaagttccagcctctccttcactgtgttcgatatgagtggacagggtcgatataggaatctgtgggagcactattataaagaagggcaggcaattatcttcgtgatcgatagctccgatcgtttgcggatggtggttgccaaagaggagctggacactttactcaatcatccagacataaagcatcgcaggatacctatactgtttttcgcaaacaaaatggaccttcgggacgcggttacgtccgtcaaggtgtcccagctgctttgtctggagaacataaaagataaaccatggcacatatgcgcttccgacgccatcaagggtgaagggctccaggagggcgttgattggttacaggaccagatccagacagttaaaacctag

SEQ ID NO: 178399 - DNA, 561 bp, synthetic construct
  misc_feature 1..561: note = Description of Artificial Sequence: Synthetic coding sequence
  source 1..561: mol_type = other DNA
atgggcctgctggaccggctgagcgtgctgctgggcctgaagaagaaagaggtccacgtgctatgcctgggcctcgataattcagggaaaacgactattatcaacaagctgaaacccagcaacgctcagtcgcagaacattcttccaactattggcttttctatagaaaagttcaaatcatcatcactttcttttaccgtcttcgacatgtctggccagggtagatacaggaacctctgggagcattactataaagagggtcaagccattatttttgtcattgactcatccgatcgcctcagaatggttgtcgccaaggaagaactggataccctcttaaatcatcccgacatcaaacatcgcaggatccccatactgttctttgccaataagatggacctgagagacgcggtgacatctgtcaaagtctcccagctgctctgcctagaaaacatcaaggacaagccgtggcacatctgcgcctctgacgctatcaaaggagaaggactgcaagagggtgtggactggctccaagatcaaatacagacagttaagacctag

SEQ ID NO: 178400 - DNA, 564 bp, synthetic construct
  misc_feature 1..564: note = Description of Artificial Sequence: Synthetic coding sequence
  source 1..564: mol_type = other DNA
ctgcggcccacctggaaggccctgagccaccccgcctggcccgaggaaaagaacaagcagattctggtgctgggtctggacggagccggtaaaaccagtgttctgcattctctcgcatcaaatagggttcaacactccgttgcccctactcaggggtttcatgctgtttgtattaacaccgaggacagtcagatggagtttctggaaatcggcggcagtaaaccgtttcggtcctactgggaaatgtacctgtcaaagggcctcctgctgatctttgtggtcgattctgccgaccatagtagactgcctgaagccaagaagtacctgcaccagctaatcgccgccaacccagttttgccccttgttgtgttcgcgaacaagcaggatctagaagccgcataccacatcaccgatatccacgaagcacttgccctatctgaagtcggaaatgacaggaagatgtttttatttggaacatacctcaccaagaatgggagtgagatcccgtctactatgcaggatgccaaagacctcatcgctcaactggcagccgacgtccagtag

SEQ ID NO: 178401 - DNA, 1083 bp, synthetic construct
  misc_feature 1..1083: note = Description of Artificial Sequence: Synthetic coding sequence
  source 1..1083: mol_type = other DNA
atggagcgggccggccccgccggcgaggagggcggcgcccgggaggggaggcttttgcctagagcccctggcgcttgggtgttgcgggcctgtgctgaaagggccgccctggaagttggagccgcaagcgcagacaccggagtcaggggctgcggtgcccggggacctgctcctctgctcgccagtgccggcggagggcgagcccgtgacggaacatggggagtgaggactaaaggttcgggcgcagccctcccgtctcgcccagcgagccgtgcagcacctagacccgaggcttcttctcctccattacctctggagaaagctaggggaggcctgtctgggccacagggaggcagagctcggggtgctatggcccatgtggggtcccgcaagcgtagtcggagcagaagccggtcccgagggcgcggaagcgaaaaaaggaagaagaaaagtcggaaggatacctcccggaattgttcggcctccaccagccagggccgcaaggcatccacggctcccggggccgaagcctcaccgtctccttgtatcacggaacggtccaaacaaaaggccagacggcggactaggtccagtagctcatcatcctcaagctcttcctcatcttcatcatcatctagcagcagcagtagtagcagctctagtgatggccgtaaaaaaagaggaaagtataaagataaacgacggaagaagaaaaaaaaacggaagaaattgaaaaaaaaggggaaggaaaaggctgaggcccagcaagttgaggctctgccgggccctagcctggatcagtggcatcggagcgccggggaggaagaagatgggcctgtgctcaccgacgagcagaaatctagaattcaggctatgaaaccgatgactaaggaggagtgggacgcccgacagagcatcatccgtaaggtcgtggaccccgagacaggccgaaccagacttattaagggagatggggaggtattggaagagatcgtcaccaaagaaagacatcgtgagatcaataaacaggctactagaggagactgcttggccttccagatgcgcgcgggtcttctcccatag

SEQ ID NO: 178402 - DNA, 1017 bp, synthetic construct
  misc_feature 1..1017: note = Description of Artificial Sequence: Synthetic coding sequence
  source 1..1017: mol_type = other DNA
atggagcgggccggccccgccggcgaggagggcggcgcccgggagggtaggcttcttcccagagcccccggtgcatgggtgctgcgtgcctgcgccgagcgggccgccctggaagtcggcgccgcctccgccgatacaggggttagaggctgcggcgcccgtggccctgcgccgctcttagccagtgctgggggcggacgggccagggatggcacgtggggggtgcgcaccaaggggtcaggcgctgctcttccatccagacctgcttcacgggcggcgcctaggccagaggcttctagccctcctttgccgctggagaaggcaaggggcgggctgtctggtccacagggcggcagagcccgtggcgccatggctcatgtaggcagcaggaaacggtcacggtcccggagccgctccaggggacgcggcagcgagaagaggaagaagaagagcagaaaggacacatctagaaactgtagcgcgagtaccagtcaggagcgcagtaagcaaaaggcccgtcggagaacccggagctcaagctcaagctccagtagctctagcagctccagttcctcttcgtctagttcaagttcatcttcatcctctgacggaagaaagaagcgcggtaagtataaagataaacggcgcaagaaaaagaagaagcgcaagaaactgaagaagaaagggaaagagaaggccgaagcgcagcaggtagaagcacttcctggcccttcactcgaccagtggcatcgatctgctggcgaggaggaagacgggccagtgttaacagatgaacaaaagtcccgtatccaggctatgaaacctatgactaaggaggagtgggatgccaggcagtcgattatccgcaaggtggtggatcctgagacgggccggacgcgcctcattaaaggagacggcgaggtactggaagagatcgttaccaaggagcgacatcgcgagattaataaagtgggagttgcgcctctacctgcgataaggccacagctatgcctgtag

SEQ ID NO: 178403 - DNA, 1059 bp, synthetic construct
  misc_feature 1..1059: note = Description of Artificial Sequence: Synthetic coding sequence
  source 1..1059: mol_type = other DNA
atggagcgggccggccccgccggcgaggagggcggcgcccgggagggacgcctgctgccccgcgcaccaggagcttgggtgttacgggcgtgtgccgagcgcgcggccctcgaagtgggcgcagcctctgcagacaccggagtgcgtggatgcggcgccaggggaccagccccgctcctcgcctctgctggaggcggccgcgctcgagacgggacctggggggtgagaacgaaaggctctggtgctgccctgccttccaggcctgccagccgcgccgccccacgtccagaggcgagttcacctcctttgcctctggagaaggcacggggtggactgagcggtccgcaggggggccgcgcaagaggggctatggctcacgttggttcccggaagaggagtagaagtcgcagcagaagtcgtggacgcggctcggagaagaggaaaaagaaatctaggaaggacacttcacgcaactgcagcgcctccacctctcaaggacgtaaggcaagcacagcccccggcgccgaagagagaagcaaacaaaaggccaggaggcgcacgcgcagttcttcgtcaagtagtagtagcagctctagttctagtagctcatcctcttcttccagcagttcctctagtagtgatggcagaaaaaagcgaggaaagtacaaggataaacgacggaaaaagaaaaagaagcgcaaaaaactgaagaagaaaggcaaagagaaggcagaagcccaacaggttgaagccctgcccggtccatcattggatcagtggcaccgctctgccggggaagaagaggacggacctgtgcttactgacgagcagaagagtcgaatccaggccatgaaacctatgacgaaagaggagtgggatgcgaggcagagcattatcaggaaggtggtagatccagaaacaggaaggaccagattaataaaaggagacggcgaagttttagaggaaatagtgaccaaagaaagacatcgagagatcaataagcaagcaacacgaggggactgcctggcctttcagatgagagccgggcttctgccctag

SEQ ID NO: 178404 - DNA, 1026 bp, synthetic construct
  misc_feature 1..1026: note = Description of Artificial Sequence: Synthetic coding sequence
  source 1..1026: mol_type = other DNA
atggagcgggccggccccgccggcgaggagggcggcgcccgggagggcagactccttccaagagctccaggggcttgggtcctgcgtgcctgcgccgagagggctgcgctggaagtgggagctgcctccgccgacacaggcgtccgcgggtgtggggctcggggccctgctcctcttctggccagcgccggtggaggacgcgcgcgagatggtacctggggagttcgtaccaaggggagcggtgctgcactgccatctcggcccgcctcaagagctgcacccaggccagaggcctcttcccctcctttacccctggaaaaggctagaggaggtctgtctggcccacagggcggacgcgcgcggggagccatggcacacgtaggaagcaggaaaaggtctaggtcgaggtctcgcagccgcggtagaggcagcgagaaacgaaagaaaaaaagcaggaaagacacttccagaaactgctcggcttcaacatctcaggaaagatcaaagcagaaggcgaggaggcgcactaggagctcctcttcctcttcatcatccagctcgtccagctcatccagctcctcatcaagctcttcttcttcctcatcagacggacggaagaagaggggaaagtataaagacaaaaggcggaagaaaaagaagaaaagaaaaaagcttaaaaaaaagggcaaggagaaggcggaggcgcagcaggtggaggccttgccaggtcccagtctcgaccagtggcaccgtagtgcaggtgaggaagaagacggtccagtcctcactgatgagcagaaatcccggattcaagccatgaaaccgatgaccaaggaagagtgggacgccagacagagtattattcgcaaggtcgtcgatcccgagactggaagaacccgactgatcaagggagacggggaagtgttggaggaaatcgttaccaaggagaggcaccgggagataaacaagcaggccacccggggtgattgtttggccttccaaatgcgggctgggttgctcccctag

SEQ ID NO: 178405 - DNA, 567 bp, synthetic construct
  misc_feature 1..567: note = Description of Artificial Sequence: Synthetic coding sequence
  source 1..567: mol_type = other DNA
atggacgtgaacatcgcccccctgcgggcctgggacgacttcttccccggaagcgaccggttcgctaggccggattttcgagatatctccaaatggaacaatcgcgttgtcagtaatttgctgtattaccagaccaactacctggtggtagccgccatgatgatatccatcgtgggtttcctcagccctttcaacatgatcctaggaggcattgtcgtggtgctcgtgtttacgggattcgtgtgggctgcccacaacaaggacgtgctgcgccgcatgaagaaaaggtatcccaccactttcgtgatggtcgtgatgctcgcgagctattttcttataagtatgtttggaggcgtcatggtctttgtgtttgggatcacatttccactgttgctgatgttcattcacgcctctttgaggctgagaaatctgaagaataagctggaaaacaaaatggagggaataggtcttaagaggactcccatgggtatcgtgctggacgcgctggaacaacaagaggaaggtattaatagactgactgattacataagtaaagtgaaggagtag

SEQ ID NO: 178406 - DNA, 411 bp, synthetic construct
  misc_feature 1..411: note = Description of Artificial Sequence: Synthetic coding sequence
  source 1..411: mol_type = other DNA
atggacgtgaacatcgcccccctgcgggcctgggacgacttcttcccgggctcagaccgcttcgctcggcccgactttcgcgacatttctaagtggaacaatcgggtggtttctaatctactgtactatcagaccaactacttggtggtagcagccatgatgatctcaattgttgggttcctttccccttttaatatgattctggggggcatcgtcgtggtgctcgttttcactggcttcgtgtgggccgcccacgacgtgaggtatggcggacatgttggcgaattgttcccctacctgcatgtatggagatcacacggtctgtgcgtctggcactactttagtttcgccgtggatgtctatccctgtattgtcgaaacgtcagagccccaagagcagacgggagagtag

SEQ ID NO: 178407 - DNA, 819 bp, synthetic construct
  misc_feature 1..819: note = Description of Artificial Sequence: Synthetic coding sequence
  source 1..819: mol_type = other DNA
atggtgcggtgctacgtggagatcgtggagaagctgcccgagcggcggccggaccccgccacaatagaaggttgcgcccaactgaagcctaataactatttgctggcctggcatacaccctttaatgagaaagggagcggatttggggcggctacgaaggccatgtgcataggactgaggtactggaaaccggagaggcttgaaaccctgatagaggtgtccgtggagtgtggacgaatgacccataatcatcctaccgggtttctggggtccctctgcactgctctctttgtgagcttcgccgctcaaggaaaaccactggtccagtggggccgagacatgctcagagccgtgcctttggccgaggagtactgtagaaagacaatccggcacacagctgagtaccaggaacattggttttacttcgaagcaaagtggcagttctacctggaagagaggaaaattagtaaggactccgagaataaagcaatatttccagataactacgatgcggaggaacgtgaaaagacctaccgcaagtggagtagcgagggcaggggcggacgcaggggccacgacgctcctatgatcgcctacgatgcccttttggcagccgggaatagttggacagaactttgtcacagggccatgtttcatggaggagagtcagccgcgaccgggactatagcaggatgtctgttcggtctgctgtatggtttggatttggtgccaaaaggactgtaccaagacctggaagataaggagaaattagaagatttgggtgccgcattgtaccgcttgtcaacggaggagaaatag

SEQ ID NO: 178408 - DNA, 1065 bp, synthetic construct
  misc_feature 1..1065: note = Description of Artificial Sequence: Synthetic coding sequence
  source 1..1065: mol_type = other DNA
atggagaagttcaaggccgccatgctgctgggcagcgtgggcgacgcgctgggatatcgcaacgtatgtaaggagaattccaccgtgggcatgaaaatacaagaggagctacaaagatccggaggcctggatcacctggtgctgtcacccggagaatggcctgtcagtgataatacaattatgcacattgccacagctgaagcactcacaacagattattggtgcctggacgacctctaccgggagatggttcgttgttatgtggagattgttgagaagttacccgagcgcagacccgatcctgccaccatcgagggctgcgctcagctcaaacctaataactatctcctggcgtggcatactccgttcaatgagaaaggctccgggttcggcgcggccaccaaagccatgtgtatcgggctgcggtattggaaacctgagagactagagacattgatcgaggtgagcgtagagtgtggaagaatgacccataatcacccaactggcttcctcggtagcctctgcaccgccctttttgtttcgtttgctgcccagggaaagccactggtgcagtgggggagagacatgctgagggcagtgcctctcgccgaagagtactgtcggaaaactattcggcataccgctgaatatcaagaacactggttttatttcgaggccaaatggcagttctatctcgaggagagaaagattagtaaggatagcgaaaacaaggccattttccctgataattacgatgccgaagagagggaaaagacataccggaagtggagctctgagggtagaggcggccggcgcggtcatgatgcaccaatgatcgcctatgacgctcttctcgcggcgggtaattcctggacagaactctgtcatagggctatgttccacgggggtgaatcagcagcaaccggcactatcgcgggttgtttgtttggtctgttgtacggtttagacctggtgccgaagggtctttatcaggatctcgaggacaaggagaaactagaggacctgggtgccgccctctatagactgagtacggaggaaaaatag

SEQ ID NO: 178409 - DNA, 531 bp, synthetic construct
  misc_feature 1..531: note = Description of Artificial Sequence: Synthetic coding sequence
  source 1..531: mol_type = other DNA
atggtgcggtgctacgtggagatcgtggagaagctgcccgagcggcgtccagatcccgccactattgagggctgtgctcagctcaagccaaacaattacctgcttgcttggcacacaccttttaacgaaaagggcagcggcttcggggcggcaaccaaggcaatgtgcatcggcctcagatactggaagccagaacggctagaaactcttatcgaggtctccgtggaatgcggaaggatgactcataatcatccaacgggctttctggggagcctgtgtacagctctgtttgtatctttcgccgcgcagggaaaacctctggtgcaatggggtcgggatatgctccgagcagtgccactggcagaggaatactgcagaaagaccataaggcatactgcggaatatcaggagcattggttctacttcgaggccaagtggcaattctacctggaggaacgaaagatttctaaggactccgagaataaggcgatcttcccagacaattacgacgctgaggaaagggagaaatag

SEQ ID NO: 178410 - DNA, 1092 bp, synthetic construct
  misc_feature 1..1092: note = Description of Artificial Sequence: Synthetic coding sequence
  source 1..1092: mol_type = other DNA
atggccgccgccgccatggccgccgccgccggcggcggcgccggcgctgcgcgctcattgagtagatttaggggctgtctggccggcgcactcctgggtgattgtgtcggcagcttctatgaagctcacgatacagtggatctgacctctgtgctgaggcacgtccagagtttagagccggaccctggcaccccagggtctgagcgcaccgaagccctgtactacacagacgacacagctatggcacgcgccctcgtgcagtcccttctggccaaggaggccttcgacgaagtagatatggcccacagattcgcccaagagtacaaaaaggacccagatcgtggctatggggcgggagtcgtcaccgtgtttaagaagctcctaaatcccaaatgtagggacgtgtttgaaccagcacgtgcccagttcaacgggaagggatcatacggcaacggtggtgcaatgcgcgtggccggaatcagtcttgcctattcctcagttcaggacgttcagaagttcgcccggctgtctgctcagttgacccacgcctcttccttggggtacaacggcgccattctgcaggctcttgccgtacacttagccttacaaggagaatccagctctgagcacttcttgaagcagttgctcggacacatggaagatctcgaaggcgatgcgcagagtgtgctcgacgcacgcgagctaggtatggaggagcgaccttactcctctcgtcttaagaagattggtgaattgcttgaccaggcatcggtgaccagggaagaggtcgtttcagaactgggaaacggaatcgctgcttttgaatccgtgccaacagccatttactgtttcctgagatgtatggagcctgatcctgagattccttcagcttttaatagtcttcagcgtacgctcatctattccattagcttaggcggggatacagatacgatagccacaatggcaggcgctatcgctggcgcttactacggaatggaccaggtgccggaaagctggcagcagtcctgcgaaggctatgaagaaaccgatatcttagcacagagcttacacagggtgttccagaaaagctag

SEQ ID NO: 178411 - DNA, 852 bp, synthetic construct
  misc_feature 1..852: note = Description of Artificial Sequence: Synthetic coding sequence
  source 1..852: mol_type = other DNA
atggcccgggccctggtgcagagcctgctggccaaggaggccttcgatgaagtggatatggcacacaggtttgcccaagagtataagaaggaccctgaccgggggtatggagccggggtcgtgaccgtttttaaaaagttgctcaaccccaaatgtagggatgttttcgagccagcccgcgctcagttcaatgggaaaggaagctatggcaatggcggagctatgcgcgtggccgggataagtcttgcttattcttcagtgcaggatgttcagaagttcgcacgtctctctgcacaattgacccatgcctcctccctgggctacaacggggccattctccaggccctagcagttcacctcgcgcttcagggggagagctcctctgaacattttcttaagcagcttctcggccacatggaagatctcgagggtgacgcacagtcagtgctggatgcacgggaactgggcatggaagaacggccgtactccagtcgactcaaaaagatcggtgaactgctggatcaagccagtgtaactagggaagaggtggtgtctgagttgggtaatggtattgctgcctttgagagcgttccaaccgcgatctactgttttttgaggtgcatggagccagacccagaaatcccttcggcctttaatagccttcagagaacgctgatctatagcatctcacttggaggggatacagatacgatcgccactatggcaggagccattgctggcgcgtattatggaatggatcaggttcctgagtcttggcagcagagttgcgagggttatgaggagaccgacattctggctcaaagtctgcacagggtcttccagaagtcctag

SEQ ID NO: 178412 - DNA, 630 bp, synthetic construct
  misc_feature 1..630: note = Description of Artificial Sequence: Synthetic coding sequence
  source 1..630: mol_type = other DNA
atgcgggtggccggcatcagcctggcctacagcagcgtgcaggacgtgcagaagtttgcccgcctaagtgcccagctgacccatgcctcttcccttggctacaacggcgccatcttacaagcccttgccgtacacctggccctccagggggagtccagtagcgagcacttcttgaaacagctgctaggccatatggaggatttagagggtgatgcgcagtctgtgctggacgctcgggagctggggatggaggaacgaccatactcatctagacttaagaaaattggggagctcctcgatcaagcctccgtgactcgcgaagaggttgtgtcagagctcgggaatgggattgccgctttcgagtctgtgccgacagctatctattgttttttgcgatgcatggagcccgacccagaaattcccagcgcctttaattccctacagcggacgcttatatactctatcagtctaggtggtgatactgatactattgccacaatggctggcgctatcgccggtgcatattacggcatggatcaagtgcctgagagctggcagcagtcttgtgaggggtacgaagagacagacattctggcccaatcactccacagggtctttcaaaagtcttag

SEQ ID NO: 178413 - DNA, 984 bp, synthetic construct
  misc_feature 1..984: note = Description of Artificial Sequence: Synthetic coding sequence
  source 1..984: mol_type = other DNA
atgcagatgcccgccatgatgagcctgctgctggtgagcgtgggcctcatggaggcgctgcaggcccaaagtcaccccatcacaagaagggacctattttcccaagaaatacagttggacatggctttggcatcctttgatgaccaatacgccggctgcgccgccgccatgaccgctgcattacccgatctgaatcatactgaattccaggccaaccaggtatatgccgacagttggaccttggctagctcacagtggcaagagcggcaggctcgatggcctgaatggagcctgtcccccacccgtcctagcccaccgcctctaggctttcgcgatgaacacggcgtcgctttactggcctatacagcaaactcaccactgcacaaggaattcaatgctgcagttagagaagccggtcgcagtcgcgcccattatctgcaccatttctcttttaaaacccttcatttcttgctgacggaagccctgcagttattgggctcaggccaaagacctcctagatgtcaccaggtctttagaggcgtgcacgggctgagatttcgacctgcagggccgagggctactgtaagattgggggggttcgcctcggcctctctgaaacatgtggctgctcaacagtttggagaggacaccttttttggcatatggacctgtctgggggcaccaattaaagggtacagcttcttcccaggggaagaggaagtgctaattcctccatttgagacctttcaggtgatcaatgcaagccgtttagcgcagggccctgccagaatctacttacgtgctctcggcaaacacagtacttataactgtgagtatattaaagataagaaatgcaagtctggaccttgccaccttgacaattctgcaatggggcagtccccactatccgcggtttggtctttacttctgctattgtggttccttgttgtgagagccttcccagatgggccgggcctcctgtag

SEQ ID NO: 178414 - DNA, 1104 bp, synthetic construct
  misc_feature 1..1104: note = Description of Artificial Sequence: Synthetic coding sequence
  source 1..1104: mol_type = other DNA
atgaagaccggccacttcgagatcgtgaccatgctgctggccaccatgatcttagtggacatcttccaggtcaaggctgaggtgctggatatggccgacaacgccttcgatgatgaatacctgaagtgcactgatcgcatggagatcaaatatgtgcctcagctcctgaaggaagagaaggcgtcgcatcagcagcttgacaccgtgtgggaaaatgccaaggcaaagtgggcagcaaggaagacacagatcttccttcccatgaatttcaaggacaaccacggtattgccctgatggcctatatttccgaagctcaggaacagacacccttttatcatctattttccgaagcggttaaaatggcaggtcagtctagagaagactatatatacggcttccaattcaaagcttttcacttctatctgacaagagctctgcagttattacggaaaccctgtgaggccagttcgaagactgtggtgtataggacctcacagggcacaagcttcacattcggcggcctgaaccaggcccggttcggccatttcaccctagcgtactctgctaagcctcaggcggctaatgaccagttgactgtactatctatctacacctgtctgggggttgatattgagaatttccttgacaaagaatcagagaggataacactcattcccctgaatgaggtcttccaggttagtcaggagggagccgggaacaatctgattttacagtccatcaataagacctgctcgcattacgagtgtgcctttctgggggggctcaagaccgagaactgtatcgaaaacctggaatactttcagccgatctacgtgtataaccctggagaaaagaaccagaaattggaggatcatagcgagaagaattggaagcttgaagaccacggagagaagaaccaaaagctggaggaccacggggtgaaaattttagagccaacacagatccccgcacctggcccggtgcccgttcccgggccaaagagccatccgtccgcctccagcgggaagttgttgctgcctcagttcggaatggtgatcatattaatcagtgtaagcgccatcaacctgttcgttgccctctag

SEQ ID NO: 178415 - DNA, 1137 bp, synthetic construct
  misc_feature 1..1137: note = Description of Artificial Sequence: Synthetic coding sequence
  source 1..1137: mol_type = other DNA
atgaagaccggccacttcgagatcgtgaccatgctgctggccaccatgattttggtcgatatcttccaggtcaaagccgaggtgctggatatggctgacaatgcattcgacgatgaatatctgaaatgcactgacagaatggaaataaaatatgtgccacagctgctaaaagaggagaaagccagccaccagcagttggacaccgtgtgggagaacgcaaaagctaaatgggcagcccgcaagacacagatctttctgccgatgaatttcaaggataatcacggcattgcactgatggcgtacatctcagaagcccaggaacagacgcccttctatcacctgttctccgaggccgtgaagatggcagggcaatcacgggaagattacatctacgggttccagtttaaagcctttcacttttaccttaccagagctctccagcttctccggaaaccttgtgaagcaagttcaaagaccgtggtatatcgcacctcccagggaactagctttacgttcggcggcttaaaccaggcacggtttggccactttacccttgcatattcggcaaaaccacaggcagctaatgaccaactgacggttctctccatctatacctgcctgggggtcgatattgaaaacttcctcgacaaagagagtgagcgtattacacttattccactgaatgaggtgttccaggtgagccaggaaggtgccggcaacaatctgatcctgcagtcaatcaacaagacgtgctcccactatgagtgcgccttcctgggagggctgaaaaccgagaactgcatagagaatctggaatactttcagccaatttatgtctataatccaggggaaaagaatcaaaagcttgaggaccacagcgagaaaaattggaagctggaggaccacggtgagaaaaatcagaaattggaagatcacggggtcaaaattttggaacctacccagatccccgaggataagtctcaagggaatataaacaacccaaccccgggacctgtccccgtgcccggaccgaagtcccatcctagtgctagcagcggtaagttgctgctccctcaattcggaatggttataatcctcatttcagtttctgcgatcaatctgttcgttgccctatag

SEQ ID NO: 178416 - DNA, 1170 bp, synthetic construct
  misc_feature 1..1170: note = Description of Artificial Sequence: Synthetic coding sequence
  source 1..1170: mol_type = other DNA
atgaagaccggccacttcgagatcgtgaccatgctgctggccaccatgatcctggtagatattttccaggtaaaggctgaggtgctcgacatggccgacaacgcttttgatgacgagtacctcaaatgcaccgaccgtatggaaattaagtatgtgccacaacttcttaaggaggagaaagcttcccatcagcaactggatacagtctgggaaaacgccaaagcgaaatgggctgcgaggaagacccaaattttcctgccaatgaattttaaagataaccatgggatcgcactgatggcatatatctcagaagcccaggaacagaccccgttctatcatcttttttccgaagccgtcaagatggcaggtcagtcacgcgaggattacatctatgggtttcaatttaaggccttccacttctacctcaccagggccctgcagctcctcaggaagccctgcgaagcatcttcaaagaccgtggtgtacaggaccagtcaaggaacctcttttacatttggtggactcaaccaggccaggtttgggcatttcactcttgcatactccgcaaaaccacaagcagccaacgatcaactcactgtgctctctatctatacgtgcctcggagttgacatcgaaaattttttggacaaagagtctgagaggataacattgattccgctgaacgaggtgttccaagtaagtcaggagggagccggtaataatctgatcctgcaaagcattaataagacctgtagtcactacgaatgcgctttcctggggggcctcaaaactgagaattgtatcgaaaatctcgaatatttccagccaatatacgtttataatccaggagaaaaaaaccaaaagctggaggatcactctgagaaaaattggaagttggaagatcatggggagaaaaaccagaagttagaagatcacggtgtgaagatcctggagcccacccagatacctggtatgaaaatcccggaaccatttcctctgccggaagataagagtcagggaaatataaataatcccacacccggccccgtgcccgtaccaggaccgaagtctcaccccagcgcttcctccggcaaactgctacttccacagttcgggatggtgatcatactgatttccgtatctgctattaacctgtttgttgccctttag

SEQ ID NO: 178417 - DNA, 390 bp, synthetic construct
  misc_feature 1..390: note = Description of Artificial Sequence: Synthetic coding sequence
  source 1..390: mol_type = other DNA
atgaagaccggccacttcgagatcgtgaccatgctgctggccaccatgatcctggtcgacatcttccaggtgaaggctgaagtcctggacatggcagataatgctttcgacgacgagtatctcaagtgtacggaccgcatggagattaagtatgtccctcaactcctcaaagaagagaaggcatcgcatcagcaactggacactgtctgggagaacgcaaaggcaaagtgggcagccaggaagactcagattttcctgcccatgaactttaaggacaaccatggaatagcccttatggcctatatctccgaagcccaggagcagactcccttctaccaccttttctccgaggcagtaaaaatggcggggcagtctagggaggactactag

SEQ ID NO: 178418 - DNA, 528 bp, synthetic construct
  misc_feature 1..528: note = Description of Artificial Sequence: Synthetic coding sequence
  source 1..528: mol_type = other DNA
atgaagaccggccacttcgagatcgtgaccatgctgctggccaccatgattcttgtcgacatcttccaggtgaaggccgaggttctcgacatggccgacaatgctttcgacgacgagtatttgaaatgcactgacaggatggagattaaatacgtgccgcagcttctgaaggaagaaaaggccagtcaccagcagcttgacacagtatgggaaaacgctaaagccaaatgggccgcccgcaaaactcaaatcttcctgcccatgaatttcaaagataatcacggcattgctctgatggcctacatttccgaggcccaggagcagacacctttctaccacctcttcagtgaggctgtgaaaatggccgggcagtcgcgcgaagactacatttacggcttccagtttaaggcatttcacttttacctgacgagagctctgcagcttctaaggaagccgtgcgaggcctcctccaagacagtcgtttaccggacttcccaaggcacgtcattcaccttcggaggactgtag

SEQ ID NO: 178419 - DNA, 609 bp, synthetic construct
  misc_feature 1..609: note = Description of Artificial Sequence: Synthetic coding sequence
  source 1..609: mol_type = other DNA
atgaagaccggccacttcgagatcgtgaccatgctgctggccaccatgatcctggtagatattttccaagttaaggccgaagtgctggacatggccgataatgcgtttgatgacgagtacctgaagtgcacagatagaatggaaataaagtacgtgccgcagctgctgaaggaagaaaaggcctcccaccagcagctggacacagtgtgggaaaacgctaaggccaagtgggctgcaagaaagacccagatctttctgcccatgaatttcaaggacaatcatggcattgctcttatggcatatattagtgaggctcaggagcaaacccctttttaccatctttttagcgaggctgtgaagatggctgggcagtccagagaggattacatttacggattccagtttaaagcttttcatttctatctcactcgtgctctgcagctgttacggaaaccctgcgaggcaagctcgaaaacggtggtctatcgtacgagccaaggtacgtcttttacgttcggcggcctgaatcaagccagatttggccatttcactctagcatacagtgctaaacctcaggctgccaacgatcaactgacggtgctcagttag

SEQ ID NO: 178420 - DNA, 324 bp, synthetic construct
  misc_feature 1..324: note = Description of Artificial Sequence: Synthetic coding sequence
  source 1..324: mol_type = other DNA
atgaagaccggccacttcgagatcgtgaccatgctgctggccaccatgattttggttgacatttttcaggtgaaagccgaggtgcttgatatggcagacaatgcctttgatgatgagtatctgaagtgcactgatcgcatggaaattaagtacgtgccccaattactgaaggaagagaaagcctcgcaccagcagctggacacagtatgggaaaatgctaaagcgaaatgggccgcacgtaagacccagatctttctgccaatgaacttcaaagacaatcatggcatcgcactcatggcttatatctccgaagctcaagaatag

SEQ ID NO: 178421 - DNA, 456 bp, synthetic construct
  misc_feature 1..456: note = Description of Artificial Sequence: Synthetic coding sequence
  source 1..456: mol_type = other DNA
atgagcggccggggcaagcagggcggcaaggtgcgggccaaggccaaatctcgctcaagccgcgcgggactgcagtttccagtggggcgggtgcaccgcttactgcgaaaaggcaattatgccgaaagggtcggcgcgggtgcgcccgtctacctcgcagcagttctggagtatctgacagctgaaatcctggagctggccggcaatgcggctcgcgacaataaaaaaaccagaattatcccccggcatctgcaactggctatcagaaacgacgaggagctgaacaaactgctgggcaaagtaaccatcgcccagggcggagtcctgcctaatattcaggctgtgttactgccgatatgtgagcattccggaccatcctccggcaaaattccgtctgatcgggcagagttaggtgccggctcggtgtgcggtcacatttttcagaaggtcgagtag

SEQ ID NO: 178422 - DNA, 177 bp, synthetic construct
  misc_feature 1..177: note = Description of Artificial Sequence: Synthetic coding sequence
  source 1..177: mol_type = other DNA
atgggccccctgatcaaccggtgcaagaagatcctgctgcccaccaccgtaccccccgccaccatgagaatatggttattgggcggcctgctgccctttctgctgctgttgtcagggcttcagcgcccaactgaaggtagtgagctgccagcccgtaacgcctcactcattctttag

SEQ ID NO: 178423 - DNA, 876 bp, synthetic construct
  misc_feature 1..876: note = Description of Artificial Sequence: Synthetic coding sequence
  source 1..876: mol_type = other DNA
atggccctggccgccctgatgatcgccctgggcagcctgggcctgcatacatggcaagcccaggctgtgccaattcttcccctgggtttggctcctgatactttcgatgacacgtatgtgggctgtgccgaggagatggaggaaaaagcggcccctttattaaaagaggagatggcacaccatgccctcctgcgggagagctgggaggccgctcaggagacctgggaggataagaggaggggccttaccttgccacccggcttcaaagcccagaatgggattgcaatcatggtgtatactaattcatcaaacacactgtactgggaactgaatcaggccgtcagaacgggcggtggcagccgcgaactctatatgaggcactttccatttaaggctctgcatttttaccttatccgcgctctccagttgctgagaggctccggcgggtgctcgcgcggaccgggcgaggtggtctttcgtggggtggggtcccttaggtttgaaccgaagcggctcggggattcggttcggctcggtcaatttgcaagtagctccttagacaaagccgtggcgcatagattcggaaatgcaacgctcttttctctcactacttgtttcggcgcacctattcaggcattctcagttttccctaaagagagagaggtgctgattccccctcacgaagtgtttctcgtgacacggtttagtcaggatggtgcccagagtctagtaactttatggagctacaatcagacctgttctcattttaattgtgcctacctggggggagaaaaacgccgggggtgtgtatcggctcccggagccctgggcacaggtgaccttcacatgacaaaacgccacttacagcaaccatag

SEQ ID NO: 178424 - DNA, 720 bp, synthetic construct
  misc_feature 1..720: note = Description of Artificial Sequence: Synthetic coding sequence
  source 1..720: mol_type = other DNA
atggccctggccgccctgatgatcgccctgggcagcctgggcctgcacacatggcaagcgcaggctgtgcccatccttccattgggcctcgcccccgacacatttgatgatacctacgttgggtgtgctgaggaaatggaggagaaggcagcccccctgttgaaggaagaaatggcacaccatgcactattgagggaaagctgggaagcggcccaagagacttgggaagataaacggagaggtttgacattgcccccgggctttaaggctcagaacgggatcgctattatggtttacacgaacagtagcaataccttgtactgggagctgaaccaagccgtaaggacaggcggcgggtcccgagaattgtacatgcgacatttcccttttaaagcactccacttctacctcatcagagctttgcaactattgagagggtcaggaggttgcagccgcggccctggagaagtggtgttcaggggtgttggctctcttagatttgagcctaagaggttaggagattcagtcagactcgggcagttcgcctcgagcagtttagacaaggcggtggcccatagattcggcgaaaaacgacgcggctgcgtctcggccccgggcgtacagctaggctctcagtcagagggcgcgtctagcctcccaccatggaaaactctcctgctcgctcccggcgagtttcagctgagcggcgtcggcccctag

SEQ ID NO: 178425 - DNA, 876 bp, synthetic construct
  misc_feature 1..876: note = Description of Artificial Sequence: Synthetic coding sequence
  source 1..876: mol_type = other DNA
atggccctggccgccctgatgatcgccctgggcagcctgggcctgcacacatggcaggcccaggcagtaccaattctacctttgggactggcacccgatacttttgatgacacatacgttggatgtgctgaagaaatggaagaaaaggctgccccactgcttaaagaggagatggctcatcatgcattgttgagggagtcttgggaggcggctcaagaaacatgggaggacaaaaggcggggcctgacactgcctcctggcttcaaggcccaaaacggcatcgccatcatggtttacaccaacagttcaaacaccctttattgggagctgaatcaggctgtccgaactggaggcggttctagagagctgtacatgaggcattttcctttcaaggccctgcacttttacctgatcagggcgttgcagctcctgagagggagcggaggatgcagccgcggacctggcgaagtcgtgttccgcggggtggggagcttacgctttgagcctaaaaggctcggagattcagtccggctggggcagtttgctagttctagcctagacaaggccgtggcccaccgtttcgggaatgcgaccctgttctcactgacaacatgtttcggcgctcccatccaggctttctcagtgtttcccaaggaacgcgaggtccttatccccccacatgaagttttcctggtaacccgctttagccaggacggagcccagtcgcttgtaacactgtggtcatacaatcagacctgctcccacttcaactgcgcctacctcggcggagagaaaagacggggatgcgtttcagcccctggcgccctggggacaggcgacctgcacatgacaaaacgacatctgcagcagccatag

SEQ ID NO: 178426 - DNA, 1401 bp, synthetic construct
  misc_feature 1..1401: note = Description of Artificial Sequence: Synthetic coding sequence
  source 1..1401: mol_type = other DNA
atggtgttcctgagcggcaacgccagcgacagcagcaactgcacccagccaccagcgcctgtcaatattagcaaggccatcttgcttggcgttatcctagggggcttaattttattcggcgtgcttgggaatatcttagtaatcctctccgtggcttgccaccgtcaccttcacagcgtaacccactattacatcgtgaacctggccgtggctgatctgttactgacaagcaccgtgcttcccttctctgctattttcgaagttctgggttattgggcatttggcagggtgttctgcaacatctgggctgcagtggatgtcctgtgttgcactgcttcaattatgggcctgtgcatcatttcgatagacagatatatcggagtgagttaccccctcagatatcctaccattgtgacccagagacggggtttgatggctcttttatgcgtttgggcactttctctagtcatcagcattggcccgctgtttggatggcgccagcctgcccctgaggacgaaacaatctgccagatcaacgaggagcccggatacgttctgtttagtgcccttggaagcttttacctacctctggctataatcctggtaatgtactgccgggtctatgtcgtagccaaaagggaatcccggggactaaagagtggtctgaaaactgacaagagcgactccgagcaagtaacccttcgtattcacaggaaaaatgcccccgctggtggcagcggtatggcctctgctaagactaaaactcatttttctgtgaggctgcttaaattctccagagaaaagaaagccgccaagactctgggaatagtagtcggctgtttcgttctatgttggttgccgttctttttggtgatgccgatcgggtcctttttccccgattttaagccgagcgaaacagtcttcaagattgtattttggttaggctacttgaactcatgtattaaccccatcatttacccctgtagttcccaggaattcaagaaggcatttcagaatgttttgaggatacaatgcctgtgtaggaagcagtcatccaagcatgctttgggctataccctccatcccccttcacaggcggtggaaggacagcacaaggatatggttcgcatcccggtagggtcgcgcgagaccttctaccggatttccaagacagacggggtgtgcgaatggaagttcttctctagcatgccgcgcggatccgcccggatcacagtgtccaaggaccagagcagttgcacgacagccagagtgaggtctaagtctttccttcaggtctgctgttgcgtaggccctagcacgcctagtcttgataaaaaccaccaggtgcccactatcaaggtccatactatttccctgtccgaaaatggcgaagaggtgtag

SEQ ID NO: 178427 - DNA, 1368 bp, synthetic construct
  misc_feature 1..1368: note = Description of Artificial Sequence: Synthetic coding sequence
  source 1..1368: mol_type = other DNA
atggtgttcctgagcggcaacgccagcgacagcagcaactgcacccagccccccgccccggtgaatatctcaaaggcaatccttctcggtgttatactgggaggactaatcctctttggcgtgttgggcaatatcttggtgattctaagtgtggcatgccatcgtcatctgcactccgtcacacattattacatcgtcaatcttgccgtagcggatttactgctgacttccaccgtgctccccttttctgcgatatttgaggttctggggtactgggcatttgggcgtgtgttctgtaacatctgggcagcagtggacgtgctgtgttgtaccgccagcatcatgggcctgtgtatcatctcaatcgacaggtacataggagtgagctatcctttgcggtaccccacaatcgtgactcaacgaagaggcctgatggcactcttgtgcgtttgggccctgtcgctcgttattagcattggccccctgtttggctggcgtcagccggctcctgaagacgagacaatctgccagattaatgaagaacctggctacgtcctctttagtgcgctgggatctttttaccttcctctcgcaatcatccttgtcatgtactgccgggtttacgtggtggctaaaagggagtcaagaggactgaagagtggtctcaaaaccgataagtctgattccgagcaggtaacgctcagaattcatcgaaagaatgcgccagcaggcggaagcgggatggccagtgctaaaacgaaaacgcacttcagcgtacggttactgaaattcagtagagagaagaaagccgccaagacacttggcatagtcgtggggtgcttcgtgctgtgctggctgccattcttccttgtgatgcctatcggatctttctttcctgactttaaaccttcggaaaccgttttcaagatcgttttctggctggggtatcttaatagttgtataaatcctatcatctacccttgtagttctcaggagtttaagaaagccttccagaatgttttaagaatacaatgcctgtgccgtaaacagagttccaagcacgctttgggttataccctccatcctccatctcaggcagtggaaggccagcacaaagacatggtccggatccctgtcggtagccgagagacattttacaggatttccaagacagacggggtatgcgagtggaaatttttcagctctatgcctcgtgggagtgccagaattacggtcagtaaggatcagagcagctgtaccacagcacggcgtggaatggactgcagatacttcaccaaaaattgtcgagagcacatcaaacatgtgaattttatgatgcccccgtggcggaaaggaagtgaatgttag

SEQ ID NO: 178428 - DNA, 975 bp, synthetic construct
  misc_feature 1..975: note = Description of Artificial Sequence: Synthetic coding sequence
  source 1..975: mol_type = other DNA
atggtgttcctgagcggcaacgccagcgacagcagcaactgcacccaaccaccagcgcctgtcaacatttcaaaagcaatcttgctgggtgtgatccttggggggctgatcctcttcggtgtgctaggcaatattctggtcatcttatctgtggcctgccaccgtcacctgcattcggtgactcactattatatcgttaatctcgcagtggcagatctgctgctgactagtaccgtactgcccttcagtgctatctttgaggtacttggctattgggcatttggccgtgtgttttgtaatatttgggcagccgtcgacgtgctgtgttgtactgcctcaatcatgggactatgcatcattagtatcgataggtatatcggcgtgtcctatcccctacgataccctaccatcgttacacagaggagaggcctgatggctcttctgtgcgtgtgggccctaagtctggtgatttctattggaccgctctttggatggcgccagcccgcaccagaggatgagaccatttgtcagatcaacgaggagcccggctatgtcctgttttccgccctgggctcgttctacttgccccttgccatcatcctcgtcatgtactgccgcgtgtatgtggttgccaaaagagagagccggggattaaagtccgggctgaagaccgacaagtccgattccgagcaggtcaccctccgcatacaccgaaagaatgcgccggcgggtggaagcgggatggcatccgccaagaccaagacacacttttcggtgcgcctactgaaatttagccgggagaagaaagccgccaagaccctgggaattgtggtcggatgctttgtgttgtgttggctgcccttcttcttggtaatgcccattggcacctacatcctcaagtacgacgttttgttctggcgcaaagggctgtccgtgtgcacccggctgcgcgagcgtaaggagatcaagaattag

SEQ ID NO: 178429 - DNA, 1029 bp, synthetic construct
  misc_feature 1..1029: note = Description of Artificial Sequence: Synthetic coding sequence
  source 1..1029: mol_type = other DNA
atggtgttcctgagcggcaacgccagcgacagcagcaactgcacccagcctccggcaccagttaatatcagtaaagcgattcttctaggcgtcatccttgggggactcatactgtttggcgtgctcggtaatatcctggtgattctcagcgtggcctgtcacagacacctgcactcggttacccattactatattgtgaacctcgctgtcgccgacttgttacttactagcacagtattgcccttcagcgctatatttgaagtgctcgggtactgggcgttcggacgtgtgttttgtaacatctgggcagccgtggacgttctgtgttgcaccgccagtattatgggtctctgcattatctccatcgataggtacattggagtgtcctaccccctgagataccctacgattgtgactcagcggcggggcctgatggctctactgtgtgtatgggccctctcactcgtgataagcattggtcctctcttcggctggagacagcctgcacctgaggacgagactatctgccaaatcaatgaagaaccgggttacgtgctcttcagcgctctggggagtttctacctgcctctcgcaataattttagttatgtattgtcgggtgtacgtggtggccaagagggagtctagaggtttgaagagcggcctgaaaacagataagtccgattcagaacaggttacattgcgaatccacagaaagaatgcaccagctggtggaagtggcatggcctcagccaagacaaaaacccacttctcagtgcgtctcctgaagtttagcagggaaaagaaagcagcgaaaaccttaggcatcgtggtgggctgttttgttctgtgttggctgcccttttttctggtgatgcctatagacgaggaaacagaagcccaggagggtaagaatgactccccctcatttaaacagcccgttcaccacgcagccgtcttagggctggaagtgatggagaaagagaacctcgagggagtgtctaggaaggacacctgcggggtctggtag

SEQ ID NO: 178430 - DNA, 1401 bp, synthetic construct
  misc_feature 1..1401: note = Description of Artificial Sequence: Synthetic coding sequence
  source 1..1401: mol_type = other DNA
atggtgttcctgagcggcaacgccagcgacagcagcaactgcacccagccacctgcacctgtcaatattagtaaggccattttactcggcgtcatcctgggaggcctgatcctgttcggagtcttaggaaacattttggtaattctcagcgttgcctgccataggcatctccattcggtgacccactattacatcgttaacctcgccgtggccgatctgctgctgacgagcaccgtcctacccttctctgccatcttcgaagtgctgggctattgggcctttggtagggtgttctgcaacatttgggcagccgtggacgttctgtgctgcactgcatctattatgggcctttgtattatttcaatcgataggtacatcggagtgtcctatcctctcagatacccgacaatcgtgacccaaagacgcggcctgatggctttactatgcgtatgggcgttgagcctggtcatcagcataggacctctgtttggttggagacagcccgccccagaagatgagactatttgtcagatcaatgaggaacccgggtacgtcctgttcagcgcactgggatccttctacctgcccttagccatcattctggtgatgtactgccgtgtttatgttgtcgctaagagggagtcccgtggattaaagagtggcctgaaaaccgacaagtctgatagcgagcaggttacgttaaggatccatcgcaaaaacgctcctgctggcgggagtggaatggctagtgccaaaaccaagactcatttttctgtgaggctcctgaagttctcccgagaaaagaaggctgccaagacattgggcattgtggtgggctgtttcgttctctgttggcttccctttttcctggtcatgcctatcggatcgttttttccggacttcaagccttcagagacggtgttcaaaattgtgttttggctggggtacctaaactcctgcatcaatcccatcatctatccttgttcttcacaggagtttaaaaaggcctttcaaaatgtgttgagaatccagtgcctgtgtcgaaagcagagtagcaagcatgccttgggatacacgctccacccccccagccaggctgtggagggccagcataaggatatggtacgcattcccgttggcagccgggaaacattctacaggataagtaagaccgatggggtgtgtgaatggaagtttttcagctccatgccaagaggctctgctcgtattaccgtcagcaaggaccaaagcagttgtacaacagcccgcgtgcgctcaaaatctttcctccaggtctgttgttgtgtcgggccctcaacccccagcctcgataaaaatcaccaagtccccaccattaaggttcacacgatcagcctttccgagaatggcgaagaagtgtag

SEQ ID NO: 178431 - DNA, 1119 bp, synthetic construct
  misc_feature 1..1119: note = Description of Artificial Sequence: Synthetic coding sequence
  source 1..1119: mol_type = other DNA
atggtgttcctgagcggcaacgccagcgacagcagcaactgcacccagccccccgctccggtgaatatttctaaggccatacttctaggggtcatcctagggggactgatcctgttcggcgtgctcggaaacattctggtcatcctgagtgtggcttgccaccgacacctgcactccgtgactcactactacatagtaaatctcgccgtggctgacctcttgctgacttcaaccgtactcccattctccgccatatttgaggtcctggggtactgggctttcgggagggttttttgcaatatttgggcagccgttgatgtgctgtgttgtacagccagtataatgggactttgcattatttccattgacagatatatcggggtgtcatatccactcagataccctacaatagtgacccaaagaagaggcttgatggccttgctgtgtgtgtgggctttaagcctggtcatttccatcggccctctgtttgggtggcggcagcctgcgcctgaagacgagacaatttgtcagataaacgaggagccgggatacgttctgtttagtgctctggggagtttttacctccccttagccattatcctggtgatgtactgccgggtgtacgtcgtggctaaacgtgagagccggggactgaagtccggcctgaaaactgacaaaagcgacagtgaacaggtcaccctccgcatacaccggaaaaacgcccctgccggcgggagtggaatggcctccgcaaaaacgaaaactcacttctcagtgaggctgcttaagttcagcagggagaaaaaggctgcaaaaacattagggatcgtggtgggctgcttcgtgctgtgctggctcccctttttcttggtcatgcccatcggcacacatacccatgacatgaagcctgcgagccgccctcgtctcttatctttgctgccgaaggagggcgaacacgaaacccaccactggagttgtgacccactcagcctggaatcaaccccgggcgctcaggaaccctgtctgaccctgggctttaccagcttgtcaagcatccatctgacgaaggctcagatacagcatgtgactgtgacagacaccgggaagacggtcacatag

SEQ ID NO: 178432 - DNA, 1290 bp, synthetic construct
  misc_feature 1..1290: note = Description of Artificial Sequence: Synthetic coding sequence
  source 1..1290: mol_type = other DNA
atggtgttcctgagcggcaacgccagcgacagcagcaactgcacccagcctccagcacctgtaaacatcagcaaagccatcctgctcggagtgattctagggggtttaatcctctttggagttcttggcaatatattagtgatcctctccgtagcatgccatcgacacttgcacagcgtgacgcactattacatcgtcaacttggctgtggccgatctgctcctcactagcaccgtgctgcccttttccgctatcttcgaggtgctggggtactgggctttcggccgagtattttgtaacatttgggctgcggtggacgtactttgctgtaccgcttcaatcatggggctgtgcataattagcatcgatcgttatatcggtgttagctatcccctccggtatccaactatcgtgacccagcggcggggcctcatggcactgctctgtgtctgggccctgagcctggttatctctattggaccactgttcggctggagacagccagcccccgaagatgagaccatatgtcagatcaatgaggaacccggctatgttctcttcagcgctctgggctccttctacctacccctggccattattctggtaatgtactgtcgggtgtacgtggtagctaagcgagagtccagagggctcaaaagcggtctcaagaccgacaagagtgactcagagcaggtgacactgaggatccatcgcaagaatgccccagctggcggaagcggcatggcctctgctaagactaagacccacttttcagtgcgcttgctgaagttttctcgcgagaaaaaggcggccaaaaccctcggtattgtagtgggatgttttgtcttgtgctggttgcccttttttctggtgatgcccatcggctccttcttccccgactttaagccatcagaaactgtgttcaagattgtgttctggctgggttatctgaactcttgtatcaaccctattatctacccctgttcctcacaggaatttaagaaagcctttcagaatgtactgcgcattcaatgcctgtgtcggaaacaatcttccaagcacgccctcggttacactctccaccccccgtcccaagcagtagagggtcagcacaaagatatggtgaggatccccgtgggatccagagaaaccttctaccgcatttccaaaacggatggcgtatgtgagtggaagtttttctcctcaatgcctcggggttcagctagaatcacagtcagtaaggaccagagttcatgcactaccgcccgagggcacacacccatgacctag

SEQ ID NO: 178433 - DNA, 1428 bp, synthetic construct
  misc_feature 1..1428: note = Description of Artificial Sequence: Synthetic coding sequence
  source 1..1428: mol_type = other DNA
atggtgttcctgagcggcaacgccagcgacagcagcaactgcacccagccacccgcacccgtcaatatctccaaggcgatacttctgggagtaatactcggaggattaatcctgttcggcgtcctcgggaatatcctcgtaattcttagcgtcgcatgtcatcggcacctgcatagcgtgacgcactattacatcgtgaacttggctgtcgccgatcttctcctgacgagcactgttttgccgtttagtgccattttcgaagtgttggggtattgggcatttggccgcgtgttctgcaatatttgggcagcagtggatgtgctatgttgtaccgctagcatcatgggtctgtgcattatctctattgaccgatatattggggtgagttaccccctgcgatatccaacaattgtgacgcaacgcaggggcctcatggctttactgtgcgtctgggcactatcactcgtgatatctataggcccgctctttggctggcggcagcccgcccctgaagacgaaactatttgtcagattaatgaggagccaggatatgtgctgtttagtgccttaggcagcttctatttacccctggccatcatcctggtgatgtactgccgggtgtacgtggtagcaaaacgagagagcaggggcctgaaatccgggctgaagacggataaatctgactcagagcaggtcactttgcggattcatagaaagaatgcccccgccggtggaagcggcatggccagcgccaagaccaagactcacttctcagtgaggctgcttaagtttagccgggaaaagaaggccgccaaaaccctggggatagttgtgggttgctttgtactgtgctggctgccattctttctggtcatgcctatcggatccttcttccctgatttcaaaccaagcgagacagtgtttaagattgtcttttggctcggctacctgaacagctgtatcaaccccataatatacccctgttcttctcaagagttcaaaaaggcttttcagaatgtgcttcgtatccagtgcctatgtagaaagcagtctagtaaacacgctctcgggtatacactgcatccgccctctcaggctgtggaaggacagcacaaggacatggtccgtattcctgtgggctcccgggaaacattctatcggataagcaaaacggacggtgtctgcgaatggaagttcttttcaagcatgccacgaggttctgcgagaatcaccgtgagtaaggaccagtcttcctgcactacagcacgcacgaagtcacgctcagttacaagactggagtgttcgggaatgatcctggcgcattgtaatctgaggttacctgggtccagggactctcccgcttctgcttctcaagcggccggcaccacaggcatgtgccatcaggcagacgctacaaggcctagctag

SEQ ID NO: 178434 - DNA, 1113 bp, synthetic construct
  misc_feature 1..1113: note = Description of Artificial Sequence: Synthetic coding sequence
  source 1..1113: mol_type = other DNA
atggtgttcctgagcggcaacgccagcgacagcagcaactgcacccaaccaccagccccggtcaacattagtaaggctatactgctcggagtgattttggggggcctgatcctcttcggcgttttgggaaatattcttgtgatactttctgtcgcatgccaccggcatttgcactctgtgacacactattatatcgtcaacctcgctgtggccgacctgctactgacaagcaccgtgcttccgttttccgcaattttcgaggtgctaggctattgggctttcgggcgagtgttttgcaatatttgggctgctgtggatgttctctgttgtaccgcctccatcatggggctatgcatcattagtattgacaggtatattggcgtgtcttacccacttcggtatcccacaattgtgacccagagacgcgggttgatggctctactgtgcgtgtgggcccttagcctggttatttccatagggcctctattcggttggcgtcaaccggctccggaggatgaaacgatctgtcaaattaacgaggagcccggctacgtccttttctctgcactgggctcattttacctgcccctggccattatcctggtgatgtactgtagggtgtacgtggtcgcaaagagggagagccgaggcctaaaatccggcttaaaaaccgacaaatccgactcggaacaggttaccctcagaatccacaggaagaatgccccggctgggggaagcgggatggcaagtgcaaagacgaaaacacacttctcagtgagactgttgaaattctctagagaaaagaaagccgcaaagactctcgggatcgtggttgggtgctttgtgctgtgctggctccctttctttctcgtgatgcctatagatgaggtgtctttgtgtcaccaggccggtgtgcaatggcacgacctgggtagtctgcagcctccaccaccaggctttaaacgcttctcctgcctgagccttccttctagctgggactaccgcgacgtccccccgggccgtagacatcaggcgcagcttatattcgtttttctggtggaaacaggctttcaccacgtcggacaagacgacctagacctgctcacaagctag

SEQ ID NO: 178435 - DNA, 1284 bp, synthetic construct
  misc_feature 1..1284: note = Description of Artificial Sequence: Synthetic coding sequence
  source 1..1284: mol_type = other DNA
atggtgttcctgagcggcaacgccagcgacagcagcaactgcacccagcctccggcccctgttaatatttcaaaagccatactgctaggagtgatactaggaggtcttatcctgtttggcgtgctggggaacatcctcgtcatcctgtccgtcgcttgtcatcggcacctccactctgttacccactattacatagtgaatttggccgtcgcggacctcctgctcacatctacagtcctcccttttagtgcaatcttcgaggtgttggggtattgggccttcggcagggtcttctgcaacatctgggccgctgtagacgttctttgttgcactgctagcattatgggcctttgcattataagcattgacaggtacattggggttagctatccgctgcgctacccaactatcgtgactcagcgccgcgggctgatggccctgctctgtgtctgggcattgagtctggtgatctcgatcggacccctgttcgggtggcgtcagccagcacctgaagacgagactatttgtcagattaacgaagagcccgggtatgtgttgttctcagccctcggctccttttacctgcctctcgccataatcctggtcatgtattgtagagtgtatgtggtagctaagagagagagcaggggactgaagagcggtcttaagactgacaagtccgatagtgaacaagtgacacttaggatacatcgcaagaatgccccagctggtggttctggaatggcctcagcaaagactaaaacccattttagtgtccgactactcaagttctctagagagaaaaaggctgctaaaactctcggcattgttgtgggctgctttgtgttgtgttggctcccattcttcttggttatgcctataggatcattcttccctgactttaaaccttccgagaccgtgtttaaaattgtgttttggcttggctaccttaactcctgtatcaatcccatcatctacccttgttcatcacaggagtttaagaaagcgtttcaaaacgtgttaagaattcagtgtttatgtcggaagcaatcatcaaagcatgctttgggctatactctgcatccaccatcacaggccgtggaaggccagcataaggacatggtgcgcataccggtcggtagccgagagacgttctaccgaattagtaagaccgacggagtctgcgagtggaagttctttagttccatgccacggggcagcgcaaggatcactgtctctaaggaccaaagtagctgcacgacagctcggtcctcagggttttag

SEQ ID NO: 178436 - DNA, 1563 bp, synthetic construct
  misc_feature 1..1563: note = Description of Artificial Sequence: Synthetic coding sequence
  source 1..1563: mol_type = other DNA
atgaaccccgacctggacaccggccacaacaccagcgcccccgcccattggggtgagctgaagaatgctaacttcacagggcctaaccagacctcctcgaactccactctgccccagctcgatataacccgtgcaatcagtgtggggctggttttgggcgccttcatcctgtttgccatcgtggggaatatactggtgatcctgtccgtagcttgtaataggcatctgcggaccccaaccaattacttcatcgtgaacctcgcaatggccgatttgctgctctcctttaccgttctgcccttttccgccgcgttggaagtgctcggatactgggtcctcggcagaatcttttgcgatatttgggccgctgtcgacgttctgtgttgtactgcctcaatcctttccctgtgtgctatttccatcgatcgatatataggggtccggtatagcctccaataccccacgctcgtaactagacggaaagctattctggcccttctgagcgtctgggtactgtctaccgtgatttccatcggacccctcttgggctggaaagagcctgcccccaacgatgataaagagtgtggggtcacggaagagcctttttacgcactgttctcctctctcggaagcttctacattcccctggccgtgatcttagtgatgtattgcagagtgtacattgtggccaagcggaccaccaagaatcttgaggccggcgtcatgaaggagatgtccaacagcaaagaactgacactgcgcatacacagtaaaaattttcacgaagacactcttagctccacaaaagccaaagggcacaacccacgttcctcaatagccgtcaaactgtttaaattttcacgagagaaaaaggctgcgaaaactcttggaattgtcgttggaatgtttatactctgttggttgcccttttttatcgcactgcctcttggttctctgttcagcactttgaaaccacccgacgcagtgttcaaggtagttttttggctggggtatttcaattcctgtctaaaccccatcatctacccctgttcgtcgaaagagtttaaacgtgccttcgtacggatcttgggctgtcagtgccgcgggcgcgggcgaagaagacgcagacgaaggagaaggctgggggggtgcgcttacacgtatagaccctggacgcgcggcggtagcctcgagaggtcacagtccagaaaagacagtttagatgactccggaagttgtttaagcggctcccaacggaccctaccatcagcaagccctagcccggggtatttaggaagaggcgctccaccacccgttgagttatgcgccttccctgaatggaaggcccccggcgccctgctgtctctgccggcccccgagccacctggaagacggggccggcatgatagcggcccccttttcacctttaagcttctaacggaacccgagtcccctgggacggacggtggtgctagtaacggagggtgtgaggcggctgccgacgtcgcaaatggccagcccgggtttaagtctaacatgcctctggctccaggacagttctag

SEQ ID NO: 178437 - DNA, 1719 bp, synthetic construct
  misc_feature 1..1719: note = Description of Artificial Sequence: Synthetic coding sequence
  source 1..1719: mol_type = other DNA
atgaccttccgggacctgctgagcgtgagcttcgagggcccccggcccgatagcagtgccggtggttcttcggctggcggggggggcgggagcgctggaggggcagcaccttccgagggcccagccgtcggcggagtgcctgggggcgccggggggggcgggggcgtcgtgggggccggaagcggcgaggacaatagatcttcagccggggagccagggtcagcgggcgcagggggcgatgttaatggaacagccgctgtgggtggtttggtggtaagtgcccagggggtgggggtgggcgtattcttagccgcgttcattctaatggcggtggcggggaacctcttggttatattgagcgtggcctgcaataggcatctccagaccgtgaccaattactttattgtcaacctggctgtcgccgatctcttgctctccgccaccgttcttcccttttctgcgacgatggaggtgctcggtttttgggcatttgggcgggctttttgtgatgtttgggccgccgttgatgttctgtgctgtacagcaagcattcttagcctctgcaccatatcggttgatcggtacgtcggtgtgcggcatagcctcaagtatccggctattatgaccgaaagaaaggccgcagccatccttgccctcctttgggtcgtggctctggtggtgtccgtagggcccctgctgggctggaaggagcccgtgccccccgatgagaggttttgtggaataaccgaggaggccggctacgcggttttcagttcggtttgtagcttttatcttccaatggctgtgattgtggtgatgtactgtcgcgtttatgtggtggctcgctcaactacccgttccttggaagctggggtgaagagggaacgcggcaaggcctccgaggtggtgttgaggatccattgccgaggcgctgcgaccggggccgatggtgctcacggtatgcgctcagccaaaggccataccttcaggtctagtctttccgtccgcctgctgaagttcagtcgcgaaaagaaggcagctaagacattggctatcgtcgtgggagtgttcgtcctgtgttggttccccttcttcttcgtgctcccactgggctcactcttcccacagttgaagccttctgagggcgtgttcaaagtgatcttctggctcggctacttcaactcctgcgtgaacccgctgatctacccctgttcatcacgtgaattcaaacgggcctttctacgccttcttcgatgtcaatgtcggagacgcaggcggcgccgacccctttggcgggtgtatggacaccactggcgggcgagcacaagcggtctccgtcaggactgtgcccccagctcaggagatgcgccaccaggagctcccctggccctcacagctctgccagatcccgaccccgagcccccaggaacacctgagatgcaagcccccgtcgcatcccgccgaaagccgccttcagcattccgagagtggcgcctattagggccgtttcggagacctacgacccagctgcgtgctaaggtatcctcgctaagccataaaattcgggcaggaggcgcacagcgggctgaagcagcttgtgcccagagaagcgaggtggaggctgtgtccctgggggtacctcacgaggtagctgagggtgcaacgtgccaggcctacgagcttgcggactattcgaacctccgcgaaacagatatctag

SEQ ID NO: 178438 - DNA, 1344 bp, synthetic construct
  misc_feature 1..1344: note = Description of Artificial Sequence: Synthetic coding sequence
  source 1..1344: mol_type = other DNA
atggaccaccaggacccctacagcgtgcaggccaccgccgccatcgccgccgcgatcacattcctgattctgttcacaatttttggtaatgccctcgtgatactggcggtgctgacaagcaggagtctgcgagcgccccaaaatctattcttggtgagtctggcggccgcagacatcctggtcgcaaccctgattataccgtttagtctcgcaaatgagctgctgggctactggtactttcggagaacatggtgcgaggtttacctagctctggacgtacttttctgtaccagcagtattgtccacttgtgtgccatctctctcgacaggtactgggccgtgagtcgcgccctcgaatataactcgaagaggacacctcggcggataaaatgcattatcttgacagtgtggctgattgccgcagtgataagtctcccaccccttatctataagggggaccagggccctcagcccagagggaggccgcaatgcaaactgaaccaggaggcttggtacatcctcgctagcagcatcgggagcttcttcgccccctgcctgattatgattctggtgtatctcaggatttacctgatcgctaagagatctaaccggcggggcccccgggctaaggggggacccggtcagggcgaaagtaagcagccacggccagatcatggcggggcactggcctcggccaaactacccgcactggcttccgtcgcgagcgcacgagaggtcaacgggcatagcaaatccactggagaaaaggaagagggcgaaacacccgaagatacaggaacccgagcactgcctccttcttgggctgctttgcccaattcggggcaaggccagaaggaaggggtgtgtggtgccagccccgaagacgaggccgaagaggaggaagaagaggaagaggaatgcgagcctcaggccgttcccgtgagtccagcttccgcatgttcgccccccttacaacagccacaaggcagcagagtgcttgccaccctgagaggccaggttcttctaggccgaggtgtgggggcaattgggggccagtggtggagaagaagggcgcagcttaccagagaaaaacgtttcacgtttgtgttagccgtagtaatcggggttttcgtgctctgctggttccccttttttttcagctatagtctgggggcaatttgtccgaagcattgtaaggtgccccacgggctgtttcagttcttcttctggatcgggtactgcaatagttccctcaaccctgtcatttacaccatctttaaccaggactttaggcgggccttcagaaggattctgtgcagaccctggacccagacagcctggtag

SEQ ID NO: 178439 - DNA, 1389 bp, synthetic construct
  misc_feature 1..1389: note = Description of Artificial Sequence: Synthetic coding sequence
  source 1..1389: mol_type = other DNA
atggccagccccgccctggccgccgccctggccgtggccgccgccgccggacctaatgcatctggggcaggggagcggggctcaggtggggttgctaatgcttctggagcgtcgtggggccctccaagaggacaatactctgccggcgcagtcgccgggctggccgccgtagtggggttcctgattgtctttacggttgtgggaaatgttctggtggtaatcgctgtactgacttctcgggctctgagagcacctcagaatctgttccttgtcagccttgcctccgctgatattcttgtcgctacactggtgatgcctttctccctggctaatgaattgatggcctattggtattttgggcaagtgtggtgcggcgtgtatctggccttggacgtgctgttttgcacctcctccattgtgcatttgtgtgctattagtctggacaggtattggagtgtgacccaggcagttgagtataatctcaaacgcacaccacggagagtaaaggcaacgatcgttgccgtgtggctcatctctgccgtgatctctttccctcctctggtgagtctgtatcgacaacccgacggcgccgcatacccccagtgtggacttaacgatgagacctggtatatattaagcagttgcattggaagcttttttgccccttgcctgataatgggcctggtatatgcccgcatctatcgggtggctaagctgcgaacacgtacactctccgaaaagcgagcccctgtcgggccagatggagctagtcccacgactgagaacggtctgggggccgccgcgggcgccggggagaacggccactgcgctcctccccccgccgatgtcgaaccggatgaatcctccgcagcggccgagaggcgacgccggcgcggcgctctccggcggggcggcaggagaagagcaggtgcagaaggcggtgcgggtggggcggatgggcagggtgctggaccaggagctgccgagtctggagcactcactgccagccgctccccgggccctggcggaaggttatctagagcgtcatcccgctcggtggaattcttccttagcaggcggagacgcgccagatcctctgtctgtaggcggaaggtggcccaggcaagggaaaaacgcttcacatttgtgttagcagtagtaatgggtgtctttgtgctctgctggttccccttttttttttcttattccctttatggcatctgcagagaggcttgtcaggttcccggcccgttattcaagtttttcttctggataggttactgcaacagctctcttaaccctgtgatttacactgtgttcaatcaggatttccgaaggtcctttaaacatatcctgtttcggcgccggcgtagaggctttcgccagtag

SEQ ID NO: 178440 - DNA, 2070 bp, synthetic construct
  misc_feature 1..2070: note = Description of Artificial Sequence: Synthetic coding sequence
  source 1..2070: mol_type = other DNA
atggccgacctggaggccgtgctggccgacgtgagctacctgatggccatggagaaatcaaaggctacaccggcagctagagctagcaaaaaaatcctgttgcccgagcctagtattcggtctgtgatgcagaagtacctcgaggacaggggcgaggtcactttcgagaagatattttcccagaaattgggttatctgttgtttagggatttttgcctcaaccacctggaagaggctaggcctctggtggagttctatgaggagattaagaaatatgaaaagctggagactgaggaagagcgggtggctcgaagtcgcgagatttttgactcctacattatgaaagagttattagcttgcagccatccgttcagtaagtccgccaccgagcacgtgcaggggcatctgggtaaaaagcaagtgcctcctgacctgttccagccctacatcgaggagatatgtcagaacctgaggggagatgtgttccagaagtttatcgaatctgacaaatttacacgcttttgtcagtggaagaacgtggagctgaacatccatcttacaatgaatgatttcagcgttcaccgcattattggccggggaggatttggagaggtctatgggtgtaggaaggccgatactggcaagatgtacgccatgaagtgtctggacaaaaagcgtataaagatgaagcagggtgagaccctagcattgaatgagcgcatcatgctaagtctcgtctcaactggggattgtccattcatcgtgtgtatgtcatatgcgttccatacgcctgataagttaagcttcatccttgatctaatgaacgggggagaccttcactatcatttatctcaacatggtgtcttttccgaagccgatatgcgcttttacgccgccgaaataattctggggcttgagcacatgcacaacaggtttgtcgtctatcgggatctgaaacccgccaatatattgctggacgaacatggacacgtccgcataagcgatctggggctcgcctgcgatttcagcaagaaaaagccccatgcaagcgtgggaactcatggctacatggccccagaagtactgcaaaaaggtgtggcctacgactcctctgccgactggttctccctggggtgcatgctattcaaattgctgagaggacactctccatttaggcagcataaaacgaaggataaacacgagatagatagaatgaccctaacaatggccgtagagttgcccgacagcttcagccctgaacttaggtcactgctcgagggactgctccagagggacgtgaataggagactaggttgcctgggtcggggggctcaggaggtgaaagaaagtccgtttttccgctcacttgattggcagatggttttcctgcagaagtatccgcctcccctgatccccccacgtggcgaagtgaatgccgcagatgcattcgacatcgggagctttgacgaagaggacactaaaggaataaaactcctcgattccgaccaagaactataccggaatttccccctgacaatttccgagcggtggcaacaggaggtagccgagacagtgtttgacacgatcaatgctgagacagacagacttgaggcccggaaaaaggctaagaacaaacagttgggacacgaggaagattacgcactgggtaaagattgcataatgcatggatatatgtctaagatgggcaacccttttcttactcagtggcaacgcaggtacttttaccttttcccaaatagattagagtggcggggcgaaggagaagcccctcagagcctgctgacgatggaagagattcaatccgtggaggaaacgcaaattaaagagagaaaatgcctgctgctcaagatcaggggcgggaaacagtttatcctccagtgcgattctgatcctgagctggtgcagtggaaaaaggaacttagagatgcctatcgggaggcgcagcagctggtgcagcgcgtcccgaagatgaaaaacaagcctagaagcccagttgtggaactctcgaaggtgcctctcgtgcagcggggcagcgctaacggcctctag

SEQ ID NO: 178441 - DNA, 2067 bp, synthetic construct
  misc_feature 1..2067: note = Description of Artificial Sequence: Synthetic coding sequence
  source 1..2067: mol_type = other DNA
atggccgacctggaggccgtgctggccgacgtgagctacctgatggctatggagaagagtaaagccacacctgctgcacgcgcttcaaaacgcatcgtcctccccgagccgagtatccggtccgtcatgcagaagtatctggccgagaggaatgagattacgtttgacaagatattcaatcagaagataggcttcttgctttttaaagacttctgcttaaatgaaatcaacgaggcagtgcctcaagttaaattctacgaggaaattaaggaatacgaaaaacttgacaacgaagaggatcgactgtgtagaagcaggcaaatatacgacgcgtacatcatgaaagaactgctgtcatgttcacaccctttcagcaagcaagctgtggaacacgtgcagtcccacttaagcaagaagcaggtcacaagcaccctttttcagccctatatcgaagagatctgcgagtcactccgaggtgacatcttccagaaattcatggaatccgacaaatttacccgtttctgtcagtggaagaacgtcgagcttaacatccatctgacaatgaatgaatttagcgtgcacaggatcatcgggaggggaggcttcggcgaggtgtacggttgccgaaaggccgacactggcaaaatgtacgctatgaaatgcttggacaagaagcggatcaagatgaaacagggagaaacattggctttaaacgaacgcattatgctttcccttgtgtcaactggtgattgtccgttcatcgtctgcatgacatatgccttccacactccggataaactttgtttcatcctggacttaatgaatgggggcgatctccactatcacctgagccaacatggggtattctccgaaaaagagatgagattctacgccacggagattattctcgggctcgaacatatgcacaaccgatttgtagtatacagagatttaaagcctgcgaacattttacttgacgaacacggccacgcaagaatctccgacctcggcctggcttgcgatttctccaaaaaaaaaccacacgcaagcgtcggcacccatggatacatggcaccagaggtgttacagaagggaactgcgtacgatagcagtgccgactggttttcacttgggtgcatgctatttaagttgttaagaggccattccccgttccggcagcataagaccaaggacaagcacgagatcgaccgcatgaccctcacagtaaacgttgagctgccggatacgttcagtccagaattgaagtcattgctggagggccttctccagagagatgtgtccaagcggttagggtgccacggaggaggaagccaagaagttaaagaacactcgttttttaaaggagtggattggcagcatgtttatctgcagaaatatcccccccctctcattcctccccgcggcgaggtcaatgccgccgatgctttcgacattggatccttcgatgaagaagataccaaaggcatcaagttgttggactgtgatcaggaattgtataagaattttccactggttatcagcgagcgatggcaacaggaggtgactgagactgtgtatgaggcagtgaacgctgataccgataagatcgaggctaggaaaagagccaagaacaagcaactggggcatgaagaagactatgcacttggcaaggactgtattatgcatggatacatgctcaaattgggcaatccgttccttacccaatggcagagacgttacttttatctgttccctaatagactggaatggcggggcgagggagagagccgccaaaatctcctgaccatggagcagattctgtccgttgaagagacccagatcaaggacaagaagtgcattttattccggatcaagggagggaagcaattcgtgcttcagtgtgagtccgatccagagtttgtgcagtggaagaaagagcttaatgaaaccttcaaggaggcccagaggctgctgagacgggccccaaagttcctgaacaagccacgcagtggtactgttgagctccctaagccatccttatgtcacaggaacagcaatggcctgtag

SEQ ID NO: 178442 - DNA, 1164 bp, synthetic construct
  misc_feature 1..1164: note = Description of Artificial Sequence: Synthetic coding sequence
  source 1..1164: mol_type = other DNA
atggccgacctggaggccgtgctggccgacgtgagctacctgatggccatggagaagagcaaggctacccccgcagccagagcttcgaaaaggatagtgctgccagaaccctcaatcagatctgttatgcagaaatatctggcagaacgaaatgagatcacctttgacaagatctttaatcagaagatcgggtttctccttttcaaggacttctgtctgaatgagattaatgaggcagtgccccaggtgaagttctacgaagagattaaggaatatgagaaactcgacaacgaggaagatcggctgtgtaggtctaggcagatatatgatgcctatataatgaaggagcttttatcatgttctcacccattctcaaagcaggcggtggagcatgtgcagtcacacctgtccaagaaacaggtcacatcaactttgtttcagccttacattgaagagatctgcgagagcctcaggggtgatatcttccagaagttcatggaatctgacaaattcacgcggttttgtcaatggaagaacgttgagctgaacattcacttaacaatgaacgagttttccgttcacagaattattggacggggcggcttcggcgaggtgtacggatgtcgaaaggccgatactggcaagatgtatgccatgaagtgcctggacaagaagcgcatcaaaatgaaacaaggcgagacactggcactaaatgagcgcatcatgttgtctctggtatctaccggcgattgccccttcatagtgtgcatgacctacgcttttcacacaccagataagctttgtttcatcctcgacctgatgaacgggggagatttacattatcatctctcacagcatggcgtcttctcagagaaggaaatgcggttctatgcaacagagattattctcggactggagcatatgcataaccggtttgtggtgtatcgcgatctgaaacctgctaacattctgctcgacgagcatggccatgcaagaattagcgatctggggctggcctgcgacttttccaagaagaaaccacatgcatccgttgggactcacggatatatggctccagaagtcctgcaaaaaggcactgcatatgatagctccgctgactggttttccctgggctgtatgctgtttaagctgctgcgcggatag

SEQ ID NO: 178443 - DNA, 1434 bp, synthetic construct
  misc_feature 1..1434: note = Description of Artificial Sequence: Synthetic coding sequence
  source 1..1434: mol_type = other DNA
atgggcgccggcgtgctggtgctgggcgccagcgagcccggcaacctcagttccgccgcaccgttgccggatggcgccgctaccgcagccaggctcctagttccagctagcccaccagcatctctcctgcctccagcttccgagtcgcctgagcctcttagccaacaatggactgccgggatgggtctgctgatggccctgatagtgctgcttatcgtggccggcaatgttctcgtgattgttgccatcgcgaaaacaccacggctgcagaccctgaccaacctgttcattatgagtttggccagtgcagacctagtaatgggcctccttgtcgtaccatttggcgccaccattgtcgtttggggtagatgggaatacggttcctttttctgtgagctctggacaagtgtggacgtgttatgtgtaacagcatcaatcgaaactctttgtgtcatcgcacttgatagatatctggcaatcacgagcccatttagatatcaaagcctcctgacgagggcccgcgccagaggcctggtgtgtactgtgtgggccatctctgccctcgtgtcattcttaccaattctcatgcactggtggcgtgccgaaagcgacgaggcccgcaggtgctataatgatccaaagtgttgcgattttgttactaacagggcgtacgcaatcgccagctctgtggtctctttctacgttcctctttgcatcatggcattcgtttacctcagagtctttagagaagcccagaagcaagttaaaaaaattgactcctgcgagcgcaggtttctgggtggaccagcccgccctccgagcccatcccctagccctgttcccgcccctgccccaccgcccggtcctccaaggcctgctgcagcagcggccacagcacctctggctaatggaagggccggtaagcgccggcccagccgattagtcgcactccgcgaacaaaaagccctgaagactctgggtatcattatgggagtgttcaccctctgttggttgccgttttttctcgctaatgttgttaaagcttttcaccgagagctggtacccgatcggcttttcgtcttttttaactggctgggctatgccaattccgcatttaaccccataatttattgccgttcccccgattttcgcaaagccttccaggggctgctgtgttgtgcacggagagctgcccggcggagacatgccacacacggtgatcgaccacgagcctcgggatgcctggcaagacctggcccgccaccgtctcctggagcagcatccgacgacgatgatgatgacgtagtcggagcaaccccgccggccaggctcctcgagccctgggcgggttgcaatggcggagctgccgcagacagcgattcttccctcgacgagccatgcaggccagggttcgcctcagagtctaaagtttag

SEQ ID NO: 178444 - DNA, 1242 bp, synthetic construct
  misc_feature 1..1242: note = Description of Artificial Sequence: Synthetic coding sequence
  source 1..1242: mol_type = other DNA
atgggccagcccggcaacggcagcgccttcctgctggcccccaacgggtcccatgctcccgatcatgatgtgacacaggagagagatgaggtctgggtggtcggtatggggattgttatgtcactaattgtactcgccatcgtgttcggcaatgtcctggtgatcacagcgatcgccaaatttgagcggctacagacagtaaccaattacttcatcacaagcttggcgtgtgccgatctcgtaatgggcctggctgttgtgccttttggtgcagcccacatactaatgaagatgtggactttcggcaacttctggtgtgaattctggacttctatagatgtcctgtgtgtgaccgcatcgatcgagacgctctgtgtgatagccgtggaccgatacttcgcaataacctctcccttcaagtaccagtccttactaacaaagaacaaggcgagggtgatcattctcatggtatggattgtaagtggcctcacaagcttcctgcctatccaaatgcactggtatcgggctacccaccaggaggcaattaattgctacgcaaacgagacttgttgcgacttttttaccaatcaggcttacgccatagcgtcctctatagtgagcttttacgtcccattggtcatcatggtatttgtgtatagtagggttttccaggaagccaaaagacaactgcaaaagatcgataaatcagaggggcgattccacgtgcagaacctctcccaggtggagcaggacgggcggaccggacacggactgcggcgaagtagcaagttctgcctgaaggaacacaaggctctgaagacattaggcatcataatgggtacctttactctgtgctggctccccttttttatcgtcaatattgtacatgtgattcaagataacctgatccggaaggaggtctacatcttactgaattggataggctatgtaaactccgggtttaatcccctcatctactgtcgcagccccgactttcggattgcatttcaggaactcctctgcctgcggcgctcaagtctcaaggcatacggtaacggatattcttctaatgggaacacaggagagcagagcggctatcatgtggaacaggagaaagaaaacaaattactgtgcgaggatcttccaggcacggaggatttcgtagggcatcaggggaccgtccccagtgataatatcgattctcagggaaggaactgttcgacgaacgattctctcctatag

SEQ ID NO: 178445 - DNA, 1227 bp, synthetic construct
  misc_feature 1..1227: note = Description of Artificial Sequence: Synthetic coding sequence
  source 1..1227: mol_type = other DNA
atggccccctggccccacgagaacagcagcctggccccctggcccgatctgcccacgctggcccctaatacagctaacaccagtggcctgccaggggtgccatgggaagctgcccttgccggagctctgctggctctggctgtgctcgccacagtcggcggcaatctgctggtcatcgtagctatcgcatggactcctaggctacagacaatgaccaatgtcttcgttacatcgctggccgcagcagacctggtgatgggcctcttggtggtcccccctgcagcgacccttgcgctgacaggccactggccgttgggtgctactgggtgcgagctgtggaccagtgtagacgtcctatgcgtcaccgcaagcattgaaacactatgtgccctggctgttgaccggtatctggctgttaccaaccctctacggtatggtgcacttgtgaccaagaggtgtgcgaggacagctgttgtgctagtgtgggtcgtctctgctgctgtgtcctttgccccaattatgagtcagtggtggagggtgggggctgacgcggaggcacagaggtgccacagtaatcctagatgttgcgcgtttgcatcaaacatgccctacgtgctgttgtcgtcttcagtctccttttacctgcctctgctcgtgatgctctttgtatatgctcgcgtttttgttgttgccactcgccagttgcgcctcctgagaggggaacttggacggttccctccggaagaatctccgcctgcaccgagccgctcacttgcccctgccccagtcggcacctgtgctccccctgagggggtgccagcgtgtggtagacggcctgctaggctgctccccctgcgtgagcacagagcactgtgtacactgggactgattatggggaccttcacgctctgctggttgccctttttcctggccaatgtgctgagggccctagggggcccgtccctcgtgcccggcccagcctttcttgcactgaattggctaggatacgctaacagcgccttcaatcccctaatatattgccgcagccctgatttccgcagtgcctttagacgactgctctgtcgatgcggcaggcggcttccgcccgaaccatgcgccgccgcaagacctgctctattcccttccggggtgcctgcagctagaagctccccggcccagccccggttgtgtcagcgcctggacggagcctcttggggagtgtcctag

SEQ ID NO: 178446 - DNA, 1044 bp, synthetic construct
  misc_feature 1..1044: note = Description of Artificial Sequence: Synthetic coding sequence
  source 1..1044: mol_type = other DNA
atggccgccggcaccgccgtgggcgcctgggtgctggtgctgagcttgtggggcgctgtggtaggggcccaaaatattaccgcccgaattggtgagccactcgttctgaaatgcaaaggggcccctaagaagccgccccagcggctcgagtggaaactgaacactggcaggacagaagcttggaaagtcttatcccctcagggaggcgggccctgggactctgtggcacgcgttctgccaaacggtagcctgtttctgcccgccgtggggatccaggatgaaggcattttcagatgccaggccatgaataggaatggtaaggagaccaagtccaactaccgagttcgggtgtatcagatcccgggcaagcctgaaattgtagacagcgcatccgagctcacagcgggagtccccaataaagttggcacctgtgtgagcgagggaagctacccagctgggaccctgagctggcatctcgatggaaagcctctggtgccgaatgagaagggtgtatcagtgaaagagcagactagacggcatccagagactggtttatttaccttgcagtccgagttaatggtgacccccgcgcgcggcggtgacccacgcccgactttctcctgttcctttagcccgggcctgcctaggcatcgggcattgaggactgcgcccatccagccacgggtgtgggaacctgttcctctggaggaagtccaattggtggtggagcctgagggcggcgctgtcgcacccgggggtactgtgacccttacatgtgaagtgcctgcccagccatcaccccagatacattggatgaaggatggggtccccctgccacttcctccatcccctgtcttgattcttcctgagattggaccccaggaccagggcacgtattcttgcgtggcaacgcatagctcacatggacctcaagaaagtcgagccgtgagcatctctatcatagagccaggagaagagggacccacggcgggggagggctttgataaagttagagaagccgaagactcaccgcagcacatgtag

SEQ ID NO: 178447 - DNA, 702 bp, synthetic construct
  misc_feature 1..702: note = Description of Artificial Sequence: Synthetic coding sequence
  source 1..702: mol_type = other DNA
atggccgccggcaccgccgtgggcgcctgggtgctggtgctgagcttatggggcgctgtcgtaggggcgcaaaacatcacagcacgtataggcgagcccctggtcctgaaatgcaaaggagcccccaagaagccccctcagcgacttgagtggaaattaaataccggccgtaccgaggcttggaaagtgctaagccctcagggcggcggcccctgggattctgttgcccgcgtactgcctaacgggtctttatttcttcccgccgtcggaattcaggacgagggcatttttcgatgccaggctatgaataggaatggtaaagaaactaagagtaactatcgcgtgagggtgtaccaaatcccgggaaagccagagattgtcgactccgcctcagagttgacagccggcgtgccaaataaagtcgtggaagaatctcggcgtagcaggaaaagaccttgtgaacaggaagtaggtacttgtgtcagcgaaggcagttatccagccggcaccttatcctggcatctggatgggaaacctctggtgcccaacgagaaaggcgtgtctgtgaaggagcagacacgacggcacccggaaactggcctctttacactacaatcagaactcatggtgacccccgcccggggtggagacccacggccaacatttagctgtagctttagccctggtttaccccggcattag

SEQ ID NO: 178448 - DNA, 402 bp, synthetic construct
  misc_feature 1..402: note = Description of Artificial Sequence: Synthetic coding sequence
  source 1..402: mol_type = other DNA
atgaaggacggcgtgcccctgcccctgccccccagccccgtgctgatcctacccgagatcgggccccaagatcagggaacatactcctgcgttgcgacacactccagtcacgggccacaggagtcccgggccgtatctatcagcatcatagaacccggggaggaagggccaacagccggatctgtcggggggagcgggttaggaacccttgcactggctctgggcattctggggggactaggtactgccgcgctcctcattggcgtgatcctctggcaacggcggcagcgtaggggcgaggagcgaaaggctcctgagaatcaagaagaagaggaagagcgcgcagagcttaaccagagcgaggaaccggaggctggggagagcagtactggcgggccttag

SEQ ID NO: 178449 - DNA, 366 bp, synthetic construct
  misc_feature 1..366: note = Description of Artificial Sequence: Synthetic coding sequence
  source 1..366: mol_type = other DNA
atggccgccggcaccgccgtgggcgcctgggtgctggtgctgagcctctggggcgctgtggtgggggcacaaaatattaccgcccgaatcggggagccactggtgctgaaatgtaaaggagcacccaagaagccccctcagagactggagtggaaactgaacacaggaaggacggaagcctggaaggttttgtcgccccaggggggcggaccgtgggatagcgttgctcgcgtcttacctaacggctccctctttctgcctgccgtgggcatccaggatgagggtatttttaggtgtcaggcaatgaacaggaatggcaaggaaaccaaatccaattggtggtggtcgcagaaggtggaacagtag

SEQ ID NO: 178450 - DNA, 1029 bp, synthetic construct
  misc_feature 1..1029: note = Description of Artificial Sequence: Synthetic coding sequence
  source 1..1029: mol_type = other DNA
atggccgccggcaccgccgtgggcgcctgggtgctggtgctgagcctctggggcgcggtggtgggagcacagaacatcactgccagaattggtgaacccttggtgcttaagtgtaaaggcgcccccaaaaagcctcctcaacgcctcgagtggaagctgggagggggcccatgggactctgtggctcgggtattgcctaatggaagcctgttcctgcctgctgtgggcatccaggatgaaggaatctttagatgtcaggccatgaacagaaatggtaaggaaaccaagtctaactatcgggtgcgggtgtatcagattcctggcaaacctgagatcgtggattctgcctctgagctgacagccggagtccctaacaaagtcgggacctgcgtcagcgagggcagctatcccgccggcactctcagctggcatctcgacggcaaacctctggtgccaaacgagaaaggggtgagcgtgaaggagcagactcgccggcaccccgaaaccggcctgtttactctgcagtctgagttgatggtgacgcccgcacgcggcggtgatcctagaccaacattttcatgttctttctcccccggtctgccccgacaccgcgcactgagaaccgcccctatccagccccgagtgtgggagccagtgccactggaagaggttcagctcgtggtggaacctgagggaggcgcagtagcccctggaggcaccgtaacattgacttgtgaggttccagcccagccttcaccacaaattcattggatgaaagacgtcagcgatctcgaacgcggagccggaagaaccagacgaggtggagcaaattgtcgtctgtgtggacggattcgtgcaggtaactccagtcccggacccggcgatcccgggagacccggggatagcagacctgcacattggggccatttggtagcaaaagctgctacgccacgaagaggagaagagggtcccaggaagccaggcggccgaggtggggcatgcaggacagagtcagtcggagggacctag

SEQ ID NO: 178451 - DNA, 885 bp, synthetic construct
  misc_feature 1..885: note = Description of Artificial Sequence: Synthetic coding sequence
  source 1..885: mol_type = other DNA
atgaaccggaacggcaaggagaccaagagcaactaccgggtgcgggtataccaaatcccaggcaagccagaaatcgttgactctgcctcagagctgaccgctggggtgcctaacaaggtgggaacttgtgtgtctgagggcagttaccccgccggcactcttagttggcatctggatggcaagccccttgtcccaaatgagaagggcgtgtccgttaaggagcaaaccagacgacatccagaaacaggtctgttcactcttcagtccgagctcatggttacaccagcgcgcggcggcgatccgaggccaacattctcctgcagtttctctcctgggctgcctagacatagagctctgaggacagctccaatacagcctagagtgtgggagcctgtcccccttgaagaagtgcaacttgtcgttgaacccgaaggaggcgccgtggcccccggcggtaccgtcactctgacttgcgaagtccctgctcagccatccccacaaatacattggatgaaggatggagtgccgcttcccctgccgccttctcccgtgctgattctacctgaaatcggcccacaggaccaaggtacctattcctgtgtagctacacatagtagccacggcccgcaggagtcccgcgcagtgagcatcagcattatcggctcagtggggggcagcggacttggcacattggctctcgcgctcggaatattaggggggctcggtacagccgctttgctgatcggtgtcatcctgtggcagagaaggcagagacggggagaagaaaggaaagcaccagagaatcaggaagaggaggaagaacgtgcggagctgaaccagagtgaagaacctgaagcaggggaaagttcaacaggcggaccatag

SEQ ID NO: 178452 - DNA, 1308 bp, synthetic construct
  misc_feature 1..1308: note = Description of Artificial Sequence: Synthetic coding sequence
  source 1..1308: mol_type = other DNA
atgggcgccggcgagcgggtgcaggcccccccccgggccgaggccacagccggcaggggggctgaccgagctagaaccctggaaggatctcgcatggcggccgggacagcagtgggcgcctgggttctggtgctaagtctatggggggctgtagtaggcgcccagaacatcaccgccagaatcggggagcccctggtcctgaaatgcaagggggcaccaaaaaagcccccacagcgcctggaatggaaattaaatacagggaggaccgaggcatggaaggttctgtcaccccagggtgggggcccttgggatagcgtggcaagagttctaccgaacgggtctttgttcctgccggctgtgggcatacaggatgaggggatcttcagatgtcaggcaatgaatcggaatggaaaggagacaaagtccaattacagggtgcgggtttaccaaatccccggaaagcctgagatagttgatagcgccagtgagttgacagcaggggttcccaataaggtaggcacatgcgtctctgagggctcttacccagcaggaaccctgtcatggcatttagacggtaagccactcgttccaaacgagaagggcgtctctgtaaaagaacagacacgccggcacccggaaaccggcctttttactcttcaatcggaactcatggtcacgcctgccaggggtggggacccacggcctacgttcagctgctccttctcacccggattgccccgacacagggctcttcgcaccgcaccaattcagcccagggtgtgggaaccagtacccctggaagaggtccagctggtggtagaaccggagggcggtgccgtggcccctggcgggactgtaacccttacatgtgaagtgcccgcacagccctctccgcagattcattggatgaaggatggggtgccattaccgctcccaccaagtcccgtgcttatcctaccagagatcggtccacaggaccagggcacatactcttgcgtggccacacacagttcccatggccctcaagagtccagggcagtctccatctccatcattgagcctggcgaggagggcccaaccgccggctctgtagggggatctgggctgggaaccttggccctggctttaggaatcctagggggcttggggacagccgccctcctaattggcgttattttgtggcagcgaaggcaaaggcgcggagaggagcgaaaggccccagagaaccaggaggaggaagaagaacgagccgaactcaatcagtccgaagaaccagaggccggtgagtcctccacgggcggaccttag

SEQ ID NO: 178453 - DNA, 1215 bp, synthetic construct
  misc_feature 1..1215: note = Description of Artificial Sequence: Synthetic coding sequence
  source 1..1215: mol_type = other DNA
atggccgccggcaccgccgtgggcgcctgggtgctggtgctgagcctgtggggggccgtggtgggcgcccagaacattaccgctcgtatcggggagcctctagtgctcaagtgcaagggcgcacccaagaagcctcctcaaaggctggaatggaagttgaacaccggccgcaccgaggcctggaaagtcctgtctccccaggggggcggaccatgggattccgtcgccagagtgctacccaacggctccttattcttgccagccgtcggaatccaggacgaggggatcttcaggtgccaggcaatgaaccgcaacggaaaggaaaccaaatcaaattatcgcgtccgggtctatcagatccctggaaagccagagatcgtagattctgcatcagaactgacagccggagttccaaataaagtcggtacctgtgtaagcgagggtagttaccccgcgggcacactttcctggcacttagacggaaaacctctggtgccaaatgagaagggagtatcagtgaaggagcaaactcgccgccaccccgagactggcctcttcacccttcagtcggaactgatggtgacgcccgcacgcggtggcgaccctagacccacatttagttgttcatttagccccggactcccgaggcatagggctcttcgcactgctcccatccaacctagagtgtgggaaccggtgcctctggaggaggtgcagcttgtggtagagcccgagggtggcgccgtggctccaggaggaaccgtgaccctcacatgtgaagtcccagcgcaaccctcgcctcagatccattggatgaaagacggcgtgccacttccactgcccccttccccagttctgatcttaccagaaatcggtcctcaggatcagggaacttactcatgcgtggctactcactccagccacgggccacaggaaagtcgagccgtgtccatttcaattatcgaacccggagaggagggacccacagccggcagtgtcggaggcagcggactcgggacactggccttggccctgggtattctagggggcctcggtacggcggctcttttaatcggggtgatcctttggcagcgtcgtcagcggcggggggaggaaagaaaagccccggagaaccaggaagaagaggaggaaagggccgaattgaaccagagtgaggaaccagaggccggagaatcttctacaggtggcccgtag

SEQ ID NO: 178454 - DNA, 1044 bp, synthetic construct
  misc_feature 1..1044: note = Description of Artificial Sequence: Synthetic coding sequence
  source 1..1044: mol_type = other DNA
atggccgccggcaccgccgtgggcgcctgggtgctggtgctgagcctgtggggagcagtcgtaggagcccagaatattacagcacgtataggcgagcccctagtcttaaaatgtaaaggggcccctaaaaagccaccccaacgcctggagtggaagctgaatacggggcgtaccgaggcctggaaggtcctctctccccaggggggcggcccatgggattctgttgcccgggtgttgcccaacggctccttattcctcccagctgtcgggattcaagacgaaggcatcttcaggtgccaagcgatgaataggaacgggaaagaaaccaaatctaactacagagtgagggtctaccagatacccggaaaacccgagatcgtagatagcgcttcagaacttaccgcaggcgtcccaaacaaagtgggtacctgcgtgtccgagggcagttatccagccggcaccctctcctggcacctggatggaaaacctctcgtgcccaatgagaaaggagtaagcgtcaaggagcagacaagacggcacccggagactggcctgttcacattgcagagcgaattgatggtgacaccagctaggggcggcgatccacgccccactttctcctgctctttcagccccggccttccccgccaccgtgcccttcggaccgcccctattcagccccgggtctgggaaccagtcccgctggaagaagtacagctggtggttgagccagaaggtggagcagtggcaccgggtgggactgtgaccctgacctgcgaggtgccagctcagcctagcccgcaaattcattggatgaaggatggggttccgctgcctctcccaccgagcccggttctgattctccccgaaatcggacctcaggatcaggggacctacagttgcgtagccacacactcttcacacggaccccaagagtcacgcgccgtcagtatctccattatcgaaccaggtgaagaggggcccactgccggcgaaggcttcgacaaggtaagagaagccgaggattccccacagcatatgtag

SEQ ID NO: 178455 - DNA, 1029 bp, synthetic construct
  misc_feature 1..1029: note = Description of Artificial Sequence: Synthetic coding sequence
  source 1..1029: mol_type = other DNA
atggccgccggcaccgccgtgggcgcctgggtgctggtgctgagcttgtggggtgcagttgtgggcgcccagaacattactgccaggatcggcgaaccactggttctgaagtgcaaaggagctccaaagaagcctccccagagactcgagtggaagctgggggggggtccctgggatagcgttgcacgggtgttgccaaacggcagcctcttccttcccgctgtgggcatccaggatgagggtatattcaggtgtcaggccatgaacagaaatggcaaggaaaccaaaagcaattatcgagtgagggtttaccagatacccggaaagcccgagattgttgactctgccagtgaacttactgctggcgtccctaataaagtgggcacctgcgtcagcgagggaagctacccagcggggacactgtcatggcacctggatggtaagcccctggtccccaacgagaagggagtgtctgttaaagagcagaccagacggcatcctgaaaccggattgtttaccctgcagagtgaactgatggtgacaccagctaggggtggtgacccacgccctactttctcctgttctttctcacctggcctgccacgtcacagagccctgaggactgctcccatccagccgagagtatgggaacctgtgcccctcgaagaggtacagctggtggtcgagcccgaagggggcgcagtggcgcctggaggaacggtaactctcacctgcgaggtcccggcccagcccagtcctcaaattcactggatgaaggatgtgtctgacctagagcggggggcagggcgaactagacgggggggagctaactgtcgcctctgtggtcgtatccgagccggcaactcttccccaggtcctggggaccccggccgccctggagattcacgtcccgcgcactggggccatctggtggccaaggccgcaactccaaggaggggtgaagaaggaccccgcaaacccgggggcaggggtggagcttgtcggacggagtcagtgggagggacctag

SEQ ID NO: 178456 - DNA, 1029 bp, synthetic construct
  misc_feature 1..1029: note = Description of Artificial Sequence: Synthetic coding sequence
  source 1..1029: mol_type = other DNA
atggccgccggcaccgccgtgggcgcctgggtgctggtgctgagcctgtggggggccgtcgtgggggcacagaacattacagcaaggattggcgaacccctggtgctgaagtgcaaaggcgctcccaagaagcctccacagaggctggaatggaagctgggaggcgggccctgggacagcgtcgctcgggttttacctaatgggagtctattcctacctgcagtggggattcaggacgagggaatctttcgctgtcaggccatgaataggaacggaaaggagaccaagagtaattaccgagtccgcgtctatcaaattcctggaaaaccagagatcgtcgatagcgcaagcgagctcacagcaggagtgcctaacaaggtgggcacctgtgtcagcgaaggcagttacccggccggcaccctgagttggcatctcgatgggaagccactagtgccaaacgaaaagggggtctctgtcaaggaacagactcgtaggcatcctgagacgggtctctttacactgcaatccgagcttatggtgacgccggcacgtggtggagatccccggcctaccttttcctgttctttcagtccaggcctgcctcgccaccgggcactacgcacagccccaattcaaccccgagtgtgggaacccgtgccccttgaagaggtccagctggtcgtggagccagaaggcggagcagtcgccccggggggcacagtgacattgacctgcgaagtgcccgcacaaccgtctcctcagatccactggatgaaggacgtcagcgacctggaacgtggagctggccggaccagacgtggaggagcaaattgtaggctctgcggcagaatccgcgcgggcaacagctcacccgggccgggcgatcctggcaggcctggtgacagtcgccccgctcactgggggcacctcgttgcgaaggctgccacaccgcggcgcggagaggagggcccgcgcaagccggggggtcgcggcggggcttgtaggactgagtcagtaggcgggacgtag

SEQ ID NO: 178457 - DNA, 702 bp, synthetic construct
  misc_feature 1..702: note = Description of Artificial Sequence: Synthetic coding sequence
  source 1..702: mol_type = other DNA
atggccgccggcaccgccgtgggcgcctgggtgctggtgctgagcctgtggggagcagtggtgggagcacagaacatcaccgcaaggatcggtgagccacttgttctcaaatgtaaaggagctccaaagaagcctccccaacgactcgagtggaagctgaatactggccgcactgaagcatggaaggtgctatcaccacagggaggcggcccttgggattccgtggctagagttttgccgaacagctccctgttcttaccagcggtggggattcaggacgaggggattttcaggtgccaagctatgaatcgtaacggcaaggagacaaagagcaactatagagtccgcgtgtatcagatccccggaaaacccgaaatcgtcgatagcgccagtgagttgactgcgggggtacccaataaggtcgtggaggaatcccggaggtcaagaaaacgaccctgcgaacaagaagtgggaacatgtgtttctgagggttcttaccctgctggaacactctcttggcacctggacggtaagccactggtgcctaatgagaagggagtgtcagtaaaggaacagacccgacgacaccccgaaacaggtctcttcactctgcagtccgaacttatggtgactccggctcgaggcggtgaccctcgcccgacgttttcatgttcattctccccaggactacctaggcattag

SEQ ID NO: 178458 - DNA, 705 bp, synthetic construct
  misc_feature 1..705: note = Description of Artificial Sequence: Synthetic coding sequence
  source 1..705: mol_type = other DNA
atggccgccggcaccgccgtgggcgcctgggtgctggtgctgagcctgtggggcgccgtggtgggtgcccaaaacatcacggcaaggatcggcgagccactggtgttaaagtgtaaaggcgccccaaaaaaacctccgcagcgtctcgagtggaaactcaataccggaagaactgaggcatggaaagtcctgagtccacagggtggaggaccatgggattcagtcgctagggtgctgccgaatgggtctctctttctgcctgccgtagggatccaggatgagggaatcttcaggtgccaggcaatgaataggaacgggaaagaaaccaagagtaattataggtctttgcgcaccttcacgattactgccagtgattggatatttcctccctcagaaatccccgggaagcctgaaatagtagacagtgcttccgagctgacagctggtgtacctaataaggtcggtacatgtgtgtcggaaggctcttatcctgccggaacactgagctggcaccttgatggaaagcctttggtgccgaacgagaagggcgtctccgtgaaggagcaaacgagaagacaccccgagactggactttttaccctccagagtgaactgatggtgacacccgctcgaggcggagatcccaggccaacattttcctgctctttctccccagggctgccgagacaccgcgctctcaggtag

SEQ ID NO: 178459 - DNA, 705 bp, synthetic construct
  misc_feature 1..705: note = Description of Artificial Sequence: Synthetic coding sequence
  source 1..705: mol_type = other DNA
atggccgccggcaccgccgtgggcgcctgggtgctggtgctgagcctctggggagcggtggtgggcgctcagaatatcacagcccgcattggcgaacccttggttcttaaatgtaaaggcgcaccaaagaaaccccctcagagactggaatggaagctgaacaccggacggaccgaagcatggaaggtgttatccccccagggcgggggtccttgggattctgtcgcacgagtgctgcccaatggaagcctgttcctcccagcagttggaatccaggacgaaggaatcttccgatgccaagcaatgaatcgaaatgggaaagagactaaaagcaattatcgcagcttgagaaccttcaccataaccgcctctgattggatcttccctccctccgagatcccagggaagccagaaattgttgacagtgcttcagaactgaccgccggtgtgccaaataaggtggggacttgtgtgtccgaggggagctatccagctgggactctgtcttggcacctggatggcaagccacttgtccctaatgagaaaggcgtttcagtgaaagagcagacaagacgccatcctgagacagggctgtttacacttcagtcagaactgatggttacccccgccaggggaggcgatccccggcccacattctcttgttcttttagtcctggacttccacgacatagagccctgagatag

SEQ ID NO: 178460 - DNA, 702 bp, synthetic construct
  misc_feature 1..702: note = Description of Artificial Sequence: Synthetic coding sequence
  source 1..702: mol_type = other DNA
atggccgccggcaccgccgtgggcgcctgggtgctggtgctgagcctgtggggggcagttgtcggagcgcagaatatcactgcccggattggggaaccgcttgttctgaaatgcaagggcgccccaaaaaagcctccccagcgcttggaatggaagctgaatacaggacggacagaggcatggaaggtgctatctcctcagggcggcggcccttgggacagcgtggcgagagtcctacccaatggaagcctatttctgcccgcagtgggtatacaggatgaaggtatcttcagatgtcaggccatgaacagaaatgggaaggagacaaaatccaattatagggtgcgagtttaccagatccccgggaagccggagattgtggattccgccagtgagctgaccgcaggcgtgccgaacaaggttgtggaggaaagccgacgcagtcggaagagaccttgtgaacaagaagtgggtacctgcgtgtccgagggctcctatccggccgggacactgagctggcacctggacggtaagcctttagtgcctaacgaaaaaggtgtcagcgtgaaggaacaaacaaggcggcatcccgaaaccggcttatttacattgcaatctgagctcatggtaactccagctcgggggggtgaccccagacctacattcagttgctcgttcagtcccggcctgcctagacactag

SEQ ID NO: 178461 - DNA, 1215 bp, synthetic construct
  misc_feature 1..1215: note = Description of Artificial Sequence: Synthetic coding sequence
  source 1..1215: mol_type = other DNA
atggccgccggcaccgccgtgggcgcctgggtgctggtgctgagcctctggggcgccgtagtcggtgcccagaatattaccgcccgtataggcgagcccctagttctgaaatgtaaaggcgcgccaaagaaaccgccacagaggctcgagtggaaacttaacacaggcaggaccgaggcctggaaggtgttaagcccacaggggggtggcccttgggacagtgtggcaagggtactaccaaattcaagcctcttcctgccggctgtgggcattcaagacgagggcatctttcggtgtcaggccatgaataggaatgggaaggagacgaaatcaaattacagggtacgcgtgtatcaaattcctgggaaacccgagatcgttgactcggcgagcgaactgacggccggagtcccaaataaggtggggacttgcgtgtccgagggtagctacccagctgggaccctcagctggcatctggatggcaaaccacttgtgcccaacgagaagggggtctccgttaaagaacagacccgcagacaccctgagactggcctctttacactgcaaagcgaactcatggtgacccccgcccgtggtggcgatccgaggccaacattttcctgcagctttagtccggggttgcctaggcaccgggccctaagaaccgcaccgattcaacctagggtgtgggaaccggtgcccttggaggaggtgcagctcgtggtggagcccgaggggggggcagtggctccagggggaactgttacattgacatgtgaagttccagcgcagccctcccctcagatccactggatgaaggacggcgtgcctctccccctgcccccaagtcccgttctgattttacccgaaattggaccacaggaccaaggcacatattcttgcgtggcaacccattcctcccacggaccacaagaatccagagctgtgtcaattagcattatcgaacccggagaggagggacccaccgcaggttctgtgggaggttccggactggggactttagcgctggccctagggattctgggtggcctgggcaccgctgcactgcttatcggcgtgatactatggcagagacgccagcgaagaggagaggaaagaaaggcaccggaaaatcaagaagaggaggaagaacgtgctgagttaaaccagtctgaggaaccagaagcaggggagagctccactggcggtccttag

SEQ ID NO: 178462 - DNA, 1044 bp, synthetic construct
  misc_feature 1..1044: note = Description of Artificial Sequence: Synthetic coding sequence
  source 1..1044: mol_type = other DNA
atggccgccggcaccgccgtgggcgcctgggtgctggtgctgagcttgtggggagccgtggtgggggcccagaatattacggctcgcattggagaaccgctggtcctgaaatgcaagggcgccccaaaaaaacccccgcagagactcgagtggaaactcaatacagggcgtaccgaagcatggaaggtgctcagtccacagggagggggcccctgggactccgtagccagggtactccccaacggttctttgtttctccctgccgtgggcatccaggatgaggggatattcaggtgccaagctatgaaccgaaacgggaaggagacaaaatcaaactacagggtccgggtgtaccagatcccaggcaaacctgagatcgttgatagcgcatccgagctgacagccggcgtacccaataaagtcggtacttgcgtgagcgaaggctcttatccagctgggacactctcttggcacctcgacggtaagcctctcgttccaaacgaaaagggagtgtccgttaaggaacaaacccgaaggcatccggagaccggcctcttcacactgcagtcagaactgatggtgacccccgcgaggggcggtgatcctagaccgacattctcttgctccttctcccctggccttcctaggcaccgggcactccgcaccgcccccattcagcccagggtgtgggaacctgtcccattagaggaggtccagctggtggtggagcccgaaggcggggctgtggctcctggcggtaccgtgactctgacttgcgaggtgcccgcccagccctcaccacagatacactggatgaaggatggcgttccgcttcccctgccaccgagtcccgtcctgatcctgccagaaatcggtccccaggatcagggtacttatagctgcgttgccacacacagcagtcacggccctcaggagagtcgtgctgttagcatctcgatcattgagccaggcgaggaaggtcccacggctggggaaggcttcgacaaggtgcgggaagccgaggactcgccccagcacatgtag

SEQ ID NO: 178463 - DNA, 702 bp, synthetic construct
  misc_feature 1..702: note = Description of Artificial Sequence: Synthetic coding sequence
  source 1..702: mol_type = other DNA
atggccgccggcaccgccgtgggcgcctgggtgctggtgctgagcctatggggggcggtggtgggcgcacagaatatcaccgcacggatcggcgaaccattggtactgaaatgtaagggtgcacctaagaagcctcctcaacgtttagagtggaagctgaacacggggaggaccgaagcctggaaagttctgtcccctcagggaggtgggccatgggacagcgtagcccgggtgctgccaaacgggagcctctttttacccgctgttggtatacaagatgaaggaatattcaggtgtcaggctatgaatcgcaatgggaaagagaccaaatccaactacagggtgcgcgtatatcaaatcccaggcaaacccgagatcgtggatagcgctagcgaactgactgcaggagttcctaataaagtggtggaggaaagtcgacggagtcgcaaacgaccttgcgaacaggaggtgggcacttgcgtgtctgagggatcctacccagcaggcactctctcttggcatctcgacggcaaacccctggttcccaacgaaaagggtgtgtcagtgaaggagcagacccgcaggcacccagaaactggactctttaccctccagagcgagctgatggttactcctgcccggggcggtgacccccgacctacctttagttgctcttttagccctggcctgccccggcattag

SEQ ID NO: 178464 - DNA, 1215 bp, synthetic construct
  misc_feature 1..1215: note = Description of Artificial Sequence: Synthetic coding sequence
  source 1..1215: mol_type = other DNA
atggccgccggcaccgccgtgggcgcctgggtgctggtgctgagcctgtggggagccgtcgtcggtgctcagaatattacagccaggatcggagaacctttggttctaaagtgtaagggggcacctaagaaacccccccagagactggagtggaaactgaacaccggccgtactgaagcatggaaggtcctctccccacaggggggcgggccgtgggactcagtcgctagagtgctgccaaacggtagcctctttttacctgccgttggcattcaggacgagggaatctttcgctgccaggccatgaaccggaatggcaaagagactaagtccaactatagagttcgcgtgtaccaaatacccggcaaaccagagatcgtggactctgcctccgaactgacagctggcgtgccaaacaaggtcggaacctgcgtctcagaaggctcatatcctgcaggtaccttgtcctggcacctcgatggtaagccactggtgccaaatgaaaagggcgttagcgtgaaagaacagacgagaagacatcccgaaacaggacttttcacactgcagtccgagctaatggtgacccccgctcgcggaggcgatccccgccctacatttagttgtagcttttctcctggcctgcctagacatagggcgctacgtacagcccccatacagcctagggtatgggagcctgtgccgctagaagaggtacaactggttgtcgaacccgagggaggagccgtcgctccgggaggtaccgtgaccctcacctgcgaagtgcctgcacaaccttccccccagattcactggatgaaggacggagtgccacttcccctgccccccagtcctgttctgatcctgccagagatcgggccccaagatcaaggcacatactcctgtgtcgctacacactcaagccacgggccccaggaatctagggctgtctcgatctcaataatagagcccggtgaggagggccccactgccgggagcgtaggaggctccggcctaggcactctggctttagcgctcggtatcttggggggcttgggaaccgctgcgctgctgattggtgttatcttgtggcagagacggcaaagacgaggtgaagagagaaaagctcccgagaatcaagaggaagaggaggagagagccgaactgaaccagtcagaagagccagaagcaggtgagtcatccaccggtggaccctag

SEQ ID NO: 178465 - DNA, 705 bp, synthetic construct
  misc_feature 1..705: note = Description of Artificial Sequence: Synthetic coding sequence
  source 1..705: mol_type = other DNA
atggccgccggcaccgccgtgggcgcctgggtgctggtgctgagcttgtggggcgcagtagtcggagctcaaaatataacggcaagaatcggggagccccttgttctgaaatgtaagggcgcgcctaagaagcctccacagcgattagaatggaagcttaacacggggcgcactgaagcttggaaggtgttgagcccccagggtggaggtccttgggatagtgtcgcgagggttttgcctaacagcagtctattccttcccgctgtgggaattcaggatgaaggaatctttagatgtcaagccatgaaccgcaacggaaaggagaccaagtctaattaccgttcactgagaactttcaccattacagcaagcgactggatatttccaccttcagagattcccggcaaaccggagattgttgatagcgcatctgaactcactgctggggtccccaacaaagtggggacctgcgtgagtgagggatcataccccgctggtaccctaagctggcatctggacggcaaaccgctggtacccaacgagaaaggagtttccgtgaaagagcagactcgcagacaccctgaaacgggtctgtttacattacagtcagagctcatggtgactccggcgagaggaggcgacccacggcccactttcagctgctctttcagccctggtcttccgcgccaccgggctctcaggtag

SEQ ID NO: 178466 - DNA, 1092 bp, synthetic construct
  misc_feature 1..1092: note = Description of Artificial Sequence: Synthetic coding sequence
  source 1..1092: mol_type = other DNA
atggccgccggcaccgccgtgggcgcctgggtgctggtgctgagcctctggggtgctgtggtgggtgcccagaacatcacggcgcggattggggagcctctcgtgctgaagtgcaagggcgcaccgaaaaaaccacctcagaggttggagtggaagctgaatacgggtagaacagaggcatggaaggtgctgtcgccccaaggcggtgggccctgggatagtgttgccagagttctgccaaacggaagtctgtttctaccagcagttgggattcaggacgaaggcatcttcagatgccaggcaatgaaccgcaacggtaaggagaccaaatcgaattaccgggttcgggtgtaccagattccaggtaagcccgagatcgtggattctgcttcagagctgactgccggtgttcctaacaaagtcgttgaggaaagcagaagatcccgtaaaagaccttgcgaacaagaagttggcacttgcgttagcgaaggatcatacccggcagggactctgagttggcatctggatggcaaaccgctggtgcctaatgaaaagggagtgtctgtgaaggagcaaaccagaaggcaccctgagactgggctgttcactctgcagtcggaactgatggtcacaccagcacgaggaggtgaccctcgccctactttctcctgcagcttttctcccggcctcccaaggcatcgggccctgcgaaccgccccgatccagccgagggtgtgggaacccgtgccgcttgaagaggtgcagctggttgtcgaaccagaaggtggggctgtggcgccaggcggcacagtcacgctgacctgtgaagttcccgcgcagccttccccacagattcactggatgaaggatggagtccccctgccactgccaccctcaccagtcctgattttgccggaaattggcccccaagatcaaggaacctattcctgtgtggccactcattcttctcacggccctcaggaatcacgggctgtttcgatttcaattatagaaccaggggaggaaggaccgacagccggcgaaggatttgataaggttagggaagcggaggacagcccccagcatatgtag

SEQ ID NO: 178467 - DNA, 1029 bp, synthetic construct
  misc_feature 1..1029: note = Description of Artificial Sequence: Synthetic coding sequence
  source 1..1029: mol_type = other DNA
atggccgccggcaccgccgtgggcgcctgggtgctggtgctgagcctgtggggtgcagtggtcggcgctcaaaacataaccgcccgtatcggagagcccctcgtgctgaagtgtaagggtgccccgaaaaaaccaccacagagactggagtggaaactgggcggcggcccgtgggattccgtggcacgcgtgctgcctaatggctccttgttcctgcccgccgtcggtatccaggacgagggaatcttccggtgtcaggcaatgaatcggaatggaaaggaaacaaaatccaactaccgggtgcgggtataccaaattcctggcaaacccgagattgtcgatagtgcttccgaactgactgcaggcgtgcccaacaaggtcgggacatgcgttagcgaaggctcgtaccccgctggaacactcagctggcatctcgatggcaaacccctggtaccgaacgaaaaaggcgtgtccgttaaggaacaaacccgacggcacccagagactggcctctttacactccagtctgaattaatggtgactccggcccgaggtggcgaccccagaccgaccttctcctgtagcttctccccaggactgcccagacaccgagccctgcgaaccgctcctatacaacctagagtatgggaacccgtaccccttgaggaggtgcagttagttgtcgagccagaggggggcgcggtagctcccggcgggactgtgacactgacttgtgaggtcccagcccagcccagtccccagattcactggatgaaagatgtctctgatttggaacgtggcgctggccggactcgtagaggaggcgcgaactgtcgtttgtgtgggagaattagggcagggaactcaagcccgggacctggcgacccaggacgccctggcgattccaggcccgcccactggggccatcttgtggctaaagccgccacccctagacggggtgaggagggacccaggaagcccggaggccgcgggggtgcttgtaggactgagtctgtgggagggacctag

SEQ ID NO: 178468 - DNA, 702 bp, synthetic construct
  misc_feature 1..702: note = Description of Artificial Sequence: Synthetic coding sequence
  source 1..702: mol_type = other DNA
atggccgccggcaccgccgtgggcgcctgggtgctggtgctgagcctgtggggggccgtggtgggtgcccaaaacatcactgcaagaattggggagcccttagttcttaagtgcaaaggcgcaccgaaaaagcctccacagcggttagagtggaaactgaacacaggtcgaacagaagcttggaaagtactgtcacctcaggggggcggtccctgggacagcgttgcaagggttctgcccaacggcagcctgtttttacccgccgtcggtatccaggatgagggtatttttagatgccaggctatgaacagaaacggtaaagagacaaagtctaactacagggtcagggtctaccagattccagggaagcccgaaattgtggacagcgccagcgagctgacagccggcgttcccaacaaggtcgtcgaagagtcccgcaggtctcgtaagcgcccctgtgagcaggaggtggggacatgtgtctcggaaggatcttaccctgcaggtaccctgagttggcacctggatggcaagcctttggtccctaacgaaaagggtgtgtctgtgaaggagcagacccgccggcacccagaaactggcctattcactttgcaaagcgaacttatggtgacccccgcacgcggtggggacccgcggcccaccttctcgtgtagtttctcacccggtttgcctcgacactag

SEQ ID NO: 178469 - DNA, 1029 bp, synthetic construct
  misc_feature 1..1029: note = Description of Artificial Sequence: Synthetic coding sequence
  source 1..1029: mol_type = other DNA
atggccgccggcaccgccgtgggcgcctgggtgctggtgctgagcctatggggtgcggttgtcggcgctcagaatataactgctaggattggggaaccattggtgttaaagtgtaaaggagctccaaagaaacctcctcagaggctcgagtggaagttaggcggcgggccatgggatagcgtcgcacgggttctccccaatggttctctgtttttgccagccgttgggattcaggatgaagggatcttccggtgccaagcaatgaatcggaacggaaaggagacaaaaagcaactatcgggttagggtgtaccagatccctgggaagcccgagatcgtggacagtgccagtgagctgactgcaggcgtacccaacaaagtaggaacttgcgtgtctgagggctcctaccctgccggcacattatcttggcacctcgacggcaagcctcttgtgccaaatgagaagggggtttcagtcaaagaacagacacggagacatccagagacggggctgttcacccttcagtctgaacttatggtgacacccgcaagagggggcgatcccagacccactttctcttgttcattttcgcccggattaccacgccaccgggcactgagaacggcccctatacagccaagagtgtgggaacctgttccattggaggaggtgcagctggtggtggagcctgaaggcggcgctgtagcacctggcggtactgtgaccctcacctgtgaagtgcctgcccagccctcccctcaaattcactggatgaaggatgtgtcagatctagaaaggggggccggacggactagacgggggggcgccaattgccgcttgtgcggccgaatcagggctggcaacagtagtccagggcctggagaccctggaagacccggggattcaagaccagcgcactggggtcatctggtggctaaggctgcgacaccaagaaggggcgaggagggcccaagaaaaccgggcggccgggggggcgcttgccgcacagaatccgtcggaggcacatag

SEQ ID NO: 178470 - DNA, 705 bp, synthetic construct
  misc_feature 1..705: note = Description of Artificial Sequence: Synthetic coding sequence
  source 1..705: mol_type = other DNA
atggccgccggcaccgccgtgggcgcctgggtgctggtgctgagcctgtggggcgcggtggtaggggcccaaaatatcacagcacggatcggggaacccctggtcctgaaatgtaagggtgcccccaagaaacccccccagagattagaatggaagctgaacacagggcgaaccgaggcctggaaagtgctctctccccagggaggtggaccttgggattcagtggcacgggtcttacctaacgggtctctatttctccccgccgtaggcatacaggacgagggtattttccggtgtcaggcaatgaatagaaatgggaaggagaccaagtctaattatcggtctctgagaactttcaccatcaccgcatcagactggatctttccgcctagtgaaatcccaggcaaacccgagattgtcgatagcgcatcggagttgacggccggtgtgccaaataaagttggaacttgcgtgtctgagggtagctaccccgccggaactttgtcctggcatctcgatgggaagcccttggtgccgaatgagaaaggagtgtctgttaaggaacagaccagacgccatccagagacaggcctgtttactctgcagagcgaactcatggtgactccagcccggggtggcgatcctcgaccgactttctcatgttctttttctcccggcctaccccgtcacagggctcttcgatag

SEQ ID NO: 178471 - DNA, 1215 bp, synthetic construct
  misc_feature 1..1215: note = Description of Artificial Sequence: Synthetic coding sequence
  source 1..1215: mol_type = other DNA
atggccgccggcaccgccgtgggcgcctgggtgctggtgctgagcctgtggggggccgtggtgggcgctcaaaacattaccgctagaattggcgaacctctagtcctaaaatgcaagggcgcccccaagaagccaccccagcgtttggagtggaagcttaacacgggaaggacagaagcctggaaggtactgtcaccccagggcggaggcccctgggactcggtggctcgcgtgttgccgaacggctccctgttccttccagctgtcggtatccaagacgaagggatattccggtgccaggcaatgaatcgcaacgggaaggagaccaagagtaactacagagttcgagtgtatcagatcccggggaagcctgaaatcgttgatagtgcctccgagttaacagccggcgtgcccaacaaggtcgggacgtgcgtttccgaaggttcctacccagcagggacgctctcgtggcacctcgacgggaagcctctagtgccgaatgaaaaaggggtgtccgttaaggagcagacgcggagacaccctgagacgggcctttttaccctgcagagtgagctgatggttacgcctgctagagggggagacccaagacccacattcagttgctctttctcaccaggtttacccagacacagagcgctgagaacggcacccatacagcctagagtctgggagccagtgcctctggaggaggtgcagctggtagtagagcccgaaggtggagccgtagcccccgggggcacagtcaccctaacttgcgaggtgcccgctcaaccctcgccacagattcattggatgaaagacggcgttcctctgcccctaccaccaagccctgtactcatacttcccgaaatcgggccacaggatcagggcacctactcctgtgtcgcgacacatagttcacatggtcctcaagagagtcgggctgttagcatcagtatcatagagccgggagaagaaggccccacggccggcagcgtcggtggaagcgggctggggactcttgcattagctcttgggatcctgggcgggcttggtacggccgcacttttgattggagtgattttatggcagaggcgccagaggcggggggaggagagaaaagctcccgagaatcaggaggaagaggaggaaagggccgagctcaaccaaagcgaggaacctgaggccggagaaagcagcacgggtggcccctag

SEQ ID NO: 178472 - DNA, 1029 bp, synthetic construct
  misc_feature 1..1029: note = Description of Artificial Sequence: Synthetic coding sequence
  source 1..1029: mol_type = other DNA
atggccgccggcaccgccgtgggcgcctgggtgctggtgctgagcctgtggggagcagtggtgggggcacagaatataacagcccgcataggcgagcctttggtcttaaagtgcaaaggtgcaccaaagaagccaccacagaggcttgagtggaagcttggcggtggtccctgggactccgttgccagagtccttccaaactcgtcgttgtttctccctgccgtgggcattcaagatgagggaatctttcgctgccaggccatgaatcggaatggcaaggaaaccaagtccaactatcgtgtaagggtgtaccaaatccccggaaaacctgagattgtcgactccgcatctgagctgactgccggcgtgcctaacaaggtggggacatgtgtatcagagggatcttatccggccgggaccctctcttggcacctcgatggcaagcccctcgtgccaaatgagaaaggagtctccgtgaaagagcagaccaggagacatccggagacgggcttgttcaccctccagagcgaattaatggttacacccgcccgcggcggagacccccggccaaccttctcctgttcgttctccccgggcctgccgcgacatcgagctctgcggacagctccaattcagccaagagtatgggaacctgtcccattggaggaggtacagcttgtagtcgagcctgagggaggagcagtagccccagggggaaccgtgaccctcacctgtgaggtccctgcacaaccttcgccacagattcactggatgaaggacgtcagcgacctcgagagaggcgcaggtcgcactcgccggggcggagccaattgccggctctgtggcaggatccgtgcgggcaacagcagtcctggacccggtgatcctggaagacctggggatagcaggccagcccattggggtcatctcgttgcgaaagctgcgactccgcggcgcggcgaggagggcccaagaaagccggggggacgcggtggcgcatgtcgtaccgagtcagttggcgggacatag

SEQ ID NO: 178473 - DNA, 1044 bp, synthetic construct
  misc_feature 1..1044: note = Description of Artificial Sequence: Synthetic coding sequence
  source 1..1044: mol_type = other DNA
atggccgccggcaccgccgtgggcgcctgggtgctggtgctgagcttgtggggcgccgtggtgggagcacagaacattacggcacggattggggagcctctggtgctgaaatgcaagggcgcccctaagaagccacctcagcgtttggaatggaaattgaacactggtagaacagaagcttggaaggttctgtccccccaagggggtggaccgtgggacagcgtggcgagggtgctgcccaacggatctttatttttgccggctgtgggcatccaggatgagggcatattccggtgccaggccatgaacagaaacggcaaggaaactaaatcgaattaccgagtgagggtgtaccagatccccggtaaacccgagattgtagatagcgcttccgaacttactgccggggtgccaaataaagtgggcacatgtgtctctgagggctcctacccagccgggaccctgtcatggcacctggacggtaagcccctcgttcccaacgagaaaggcgtaagtgttaaggagcagacccgccgacatcccgagacgggactcttcacccttcagagcgaactcatggtgaccccagcccggggaggagatcccagaccgaccttttcgtgctccttctcgccaggcctgcccagacatagagctctgcggactgcacctattcagccaagagtgtgggagcctgtgcctctggaagaggttcagctggttgtcgagcctgagggcggcgcagtagcacctggcggcaccgtgaccctgacatgcgaggttcccgctcagccatcgccccagattcattggatgaaggatggggtacccctgccgctacctccctcgccagtgctcattctgccggagatcggaccacaagaccagggcacatactcctgcgtcgccactcactcttcacatgggcctcaggaatcacgggccgtgtccatctccatcatagagccaggcgaggaggggcctacagcaggcgagggttttgataaagtccgggaagcggaggactctccacagcacatgtag

SEQ ID NO: 178474 - DNA, 705 bp, synthetic construct
  misc_feature 1..705: note = Description of Artificial Sequence: Synthetic coding sequence
  source 1..705: mol_type = other DNA
atggccgccggcaccgccgtgggcgcctgggtgctggtgctgagcctgtggggagcggtggtaggtgctcagaatatcacggcacgcattggagagcctctggtgttgaagtgcaagggagcaccaaagaagcctcctcaaaggctcgagtggaaactcaacaccggccgaaccgaagcatggaaagtcttgagtccccagggcggcgggccttgggattctgtggcccgcgttctgccaaatggatcactgttcttgccggccgtggggatccaggacgagggcatttttcgatgtcaggctatgaaccggaacggcaaggagactaagtccaattatcgcagcttaaggacgttcactatcaccgcttccgattggatctttccaccctcagagatccctggaaaacccgagattgtcgacagcgccagtgagctgactgcaggggtccctaacaaggtcggaacatgcgtgagcgagggctcctaccccgccgggaccctttcctggcatctggatggcaagccactcgtccccaatgagaaaggcgtcagtgtcaaggaacagacccgtaggcaccctgaaactggcctattcacattgcagtctgaactaatggtcacacctgccaggggcggagacccaaggccaacattttcctgcagtttctctccaggtttaccgcgacacagggccctgaggtag

SEQ ID NO: 178475 - DNA, 1215 bp, synthetic construct
  misc_feature 1..1215: note = Description of Artificial Sequence: Synthetic coding sequence
  source 1..1215: mol_type = other DNA
atggccgccggcaccgccgtgggcgcctgggtgctggtgctgagcctttggggcgcggtagttggagcccagaacattaccgctaggattggcgagccactggtgttgaaatgcaaaggtgccccgaagaaacccccccagcgccttgagtggaagctcaatacagggagaactgaggcctggaaggtgctgagtccccagggcgggggcccatgggactctgtggccagggttctccctaacggtagtttgttcttgcctgcagtggggatccaggacgaggggatcttcaggtgtcaggcgatgaacaggaacggaaaggaaacaaaatcgaactaccgagtgcgggtctaccagattcccggcaagccagagattgtggattcagccagcgaactgactgcgggtgtgccaaacaaggtcgggacctgtgtgagcgagggctcataccctgcggggacactgtcttggcacttagatggcaagcccctggtgcctaatgaaaagggcgtgagtgttaaggaacagacacgaagacatccggaaaccggtctgttcacgttgcagagtgaactcatggttaccccggctcgggggggtgatccgcgccccacgttctcatgttcttttagcccgggcctaccacgccatcgggctctgagaaccgcaccgattcagccccgggtatgggagccagtgcctttggaagaagtgcaacttgtagtggagcctgaaggcggtgctgttgcaccaggggggactgtgactctcacctgcgaagtgcctgcccagcctagccctcagattcattggatgaaggatggagtgcctctgccattgccgccgtcaccagtactgatccttccagagatcggtccgcaagaccagggcacgtattcctgcgtggctacccatagctcccacggcccccaggagtccagagccgtgtccatctcaataattgagcccggcgaggagggcccaacagccgggtctgtgggcgggagcgggcttggaacactggcactggccttgggcatactgggcggactgggtaccgctgccttgctcattggggtgattttatggcagcgtagacagcgtagaggagaagaacggaaagcacccgagaaccaggaagaagaggaggagcgagctgaactgaaccaatccgaagagccagaggccggagagagcagcacgggggggccatag

SEQ ID NO: 178476 - DNA, 1044 bp, synthetic construct
  misc_feature 1..1044: note = Description of Artificial Sequence: Synthetic coding sequence
  source 1..1044: mol_type = other DNA
atggccgccggcaccgccgtgggcgcctgggtgctggtgctgagcttatggggcgcagttgtcggtgcccaaaacattacagcccgcataggagagcccttggtgttaaaatgtaaaggggcccctaagaagccaccccagagactggagtggaagctgaatactggccggacggaggcctggaaagttctgtccccccaggggggagggccgtgggatagtgtagcacgagttttgcccaacagcagcctgttccttcccgccgttggaattcaggacgaaggaatcttccgttgtcaagcaatgaacaggaatggcaaagagactaagtcaaactaccgagtacgggtgtaccagatcccaggtaagcctgagatagtcgactcagcatctgagctgacggctggggtgcccaacaaggtcggcacctgcgtgtccgaggggtcttatcctgcgggtactctctcctggcatttggatgggaaaccgttagtgcccaacgagaagggtgtgagcgtgaaggagcagacaagaagacacccagagactggcctatttactcttcaatctgagctgatggttacccctgctagagggggcgacccgagacccactttttcctgctctttttctccgggtttgcccaggcaccgggcactgcgcacagccccaattcagcctcgggtgtgggagccagtgcccttagaggaagtgcagcttgttgtggagcctgaaggcggagccgttgcccctggcggtactgttaccttgacatgcgaagtgccggcacagccatcgccccagatccactggatgaaggacggagtgccactgcccttgccaccatccccagtcctgattttgcctgaaattgggccacaagatcagggcacctactcttgtgtcgcgacgcactcttctcatggacctcaggagtctagagccgtctccatttctatcattgagccaggcgaggaaggccctaccgctggggagggctttgataaggtgcgcgaagctgaggacagcccacagcacatgtag

SEQ ID NO: 178477 - DNA, 702 bp, synthetic construct
  misc_feature 1..702: note = Description of Artificial Sequence: Synthetic coding sequence
  source 1..702: mol_type = other DNA
atggccgccggcaccgccgtgggcgcctgggtgctggtgctgagcctctggggggccgtcgtgggcgcacagaacataaccgcccggataggcgagcctctggtgctcaaatgcaagggggcccctaagaagccaccgcagcgcctggagtggaaactaaatactggtaggactgaggcatggaaagtgctctccccacagggcggtggaccctgggacagtgtggctagagtgctgcccaacggttccctgttcctccccgctgtagggatccaggatgagggcatttttcgctgtcaagcaatgaaccggaatggtaaagagacaaaatctaactatcgcgtcagagtctatcaaatacccggaaagccggagatcgtcgattctgcctctgaactgacggcgggagtccctaataaagttgtagaggaatctcgccgatcacggaaaaggccgtgtgagcaggaagttggcacttgtgtgagtgaaggtagttaccccgcgggcacccttagttggcacttagatggaaagcccctcgttccaaatgaaaaaggggtctccgtcaaagaacagacgaggagacaccccgaaacaggtcttttcacgcttcagagcgagctgatggtaacgcctgccagggggggtgacccaagacctaccttttcgtgtagcttttctcccggcctcccgagacattag

SEQ ID NO: 178478 - DNA, 1044 bp, synthetic construct
  misc_feature 1..1044: note = Description of Artificial Sequence: Synthetic coding sequence
  source 1..1044: mol_type = other DNA
atggccgccggcaccgccgtgggcgcctgggtgctggtgctgagcctgtggggcgccgtggtcggcgcccaaaacattacagcccgaattggagagcccttggttctcaagtgcaagggtgccccgaagaagcctcctcagagattggagtggaagctgaacacaggtaggacagaggcatggaaggtactctcaccccaaggagggggcccatgggattctgtagcacgcgtgctgcccaatggaagcctctttttaccagctgtgggcatccaagacgagggaatcttccggtgtcaggcaatgaacagaaatgggaaggaaacaaagagtaattaccgagttcgcgtttaccagattccaggcaagcctgagatcgtggatagtgctagtgaacttactgctggagtcccaaataaggtgggaacctgtgtgtctgagggatcataccctgctgggacccttagctggcatctcgatggaaagcctctagtccctaacgaaaagggtgtatctgttaaagagcaaacccgaaggcacccagagaccggactttttacgctgcagtccgaattgatggtgacccccgcaaggggcggagatccaaggcctacattctcgtgcagcttcagccctggcctaccacgccacagggccctgcggaccgcccccattcagccccgagtatgggaaccagtgcctcttgaggaagtacagttggttgtcgaaccagaagggggcgcagtggcccctggcgggaccgttactttgacctgtgaggtccctgcccagccctctcctcagattcattggatgaaagatggcgttccactgcctcttccaccatccccggtcctgatcctaccggagattgggccacaggatcagggaacttactcatgcgtggcaactcacagctctcacggaccacaagaaagtagggcggtttccatctctataatcgagcctggagaggaaggacctactgcaggcgagggattcgacaaggtgagggaagccgaggacagcccccagcatatgtag

SEQ ID NO: 178479 - DNA, 705 bp, synthetic construct
  misc_feature 1..705: note = Description of Artificial Sequence: Synthetic coding sequence
  source 1..705: mol_type = other DNA
atggccgccggcaccgccgtgggcgcctgggtgctggtgctgagcttatggggggccgtagtcggtgctcagaacattactgcccgtattggggagccactagttctgaagtgtaaaggggcgcctaagaaacccccccagcgactggagtggaagctcaatacgggcaggaccgaggcctggaaggtgctaagtccgcagggcggtgggccctgggacagcgtcgcccgcgtactcccaaacggctcactcttcctgcccgccgtgggcattcaggacgaggggatattccgatgtcaggcaatgaacagaaacggaaaagagaccaagagcaactacagaagcctgaggacctttacaattaccgcttcggattggattttccccccaagcgagattcccggcaaaccagagattgtggattccgcctccgagttgactgctggcgtgccaaataaggttggaacatgcgtgtctgaaggcagctaccctgctggaaccctgtcatggcatttagacggaaagcctctggtacctaacgagaaaggcgtgtccgtgaaggagcaaactcggaggcaccccgaaaccggcctctttaccttacaaagcgaacttatggtcactcccgcgcgaggcggtgacccaaggccaacttttagttgctctttcagtcctgggctgccaagacaccgcgccctccgctag

SEQ ID NO: 178480 - DNA, 1215 bp, synthetic construct
  misc_feature 1..1215: note = Description of Artificial Sequence: Synthetic coding sequence
  source 1..1215: mol_type = other DNA
atggccgccggcaccgccgtgggcgcctgggtgctggtgctgagcctttggggagctgtggtgggcgctcagaacattaccgccaggatcggtgagcccttggtattgaagtgcaagggtgccccgaaaaagccgccccagcgacttgaatggaagcttaatactgggagaactgaagcatggaaggtgctctctccacaagggggaggaccatgggattcagtggctcgtgtgctgccaaatgggagcctcttcttaccagccgtgggcatccaagacgagggaatctttagatgccaggccatgaacaggaatggtaaggagacgaagtcgaactatagggttagagtgtaccaaatcccgggaaaacctgagatcgtcgacagcgcctctgagttgacagccggcgttcccaacaaggtgggcacttgtgtgtctgagggcagctacccagctggcaccttaagctggcatcttgacggcaagccgctcgtgcccaatgaaaagggggtctctgtaaaggaacagaccagacggcaccccgaaaccggattatttactctgcaatccgaactcatggtgacgccagcccgagggggtgatccaagaccaactttttcatgctctttttccccaggtctcccccgccaccgcgccctcagaaccgcgccaatccaacccagagtgtgggaaccagtgcctctcgaggaagtacagcttgtggtggagccagaaggaggagccgtggcaccgggtggcacggtgactctgacatgcgaagttccagcgcaaccttcaccgcaaatacactggatgaaagacggggtgccactgccgctgccgcctagtcccgttttgatacttccagagatcggtccacaagatcagggtacttactcatgcgtggccacccattcaagtcacggacctcaagagtcacgcgcggtctccatctcaatcatcgagcccggagaggagggacccaccgccggctctgtgggcgggagcggcctgggcaccctggcgctggccttgggaattttgggcggcctgggcacagccgcattgctgattggtgtgatactgtggcagcggcgccagagaaggggtgaggaacggaaggccccagaaaatcaggaggaagaggaggagcgggccgaactgaatcagtcagaagagcctgaggcaggagagagctccacgggcggaccctag

SEQ ID NO: 178481 - DNA, 387 bp, synthetic construct
  misc_feature 1..387: note = Description of Artificial Sequence: Synthetic coding sequence
  source 1..387: mol_type = other DNA
atggccgccggcaccgccgtgggcgcctgggtgctggtgctgagcttatggggggccgtggttggcgctcagaacattactgctaggatcggggaacccctggtgctgaaatgcaaaggcgccccaaagaagccaccccaacgtctggaatggaagcttaataccggacgaactgaagcatggaaagtcctctctccccaaggtgggggcccatgggacagcgtggcaagagtcttaccaaatggatccctgttcctccctgccgtcggcatccaggatgaaggaatattcagatgccaggccatgaaccgaaacggcaaagagactaagtcgaactatcgtgttagagtttaccagtttgaaaacctgcataactattcgctgtag

SEQ ID NO: 178482 - DNA, 462 bp, synthetic construct
  misc_feature 1..462: note = Description of Artificial Sequence: Synthetic coding sequence
  source 1..462: mol_type = other DNA
atggccgccggcaccgccgtgggcgcctgggtgctggtgctgagcctttggggcgccgtcgtgggcgcacagaacataacagctaggataggagagccgttagtgctgaagtgcaagggggcccctaagaaaccaccccagcgccttgaatggaagttaaacaccggaaggaccgaggcttggaaggtactatcccctcaaggtggcggaccttgggactccgtagccagagttctgcccaacggaagtctgttcttgcccgccgttggcattcaggacgaagggattctagggggtttaggcaccgcagcactgctgatcggtgtaattttgtggcagagacgccaaagacgtggcgaggagaggaaggctcccgagaaccaggaagaggaagaagagcgagccgagctgaaccagtccgaggagcccgaggccggggagagctccaccggcggcccttag

SEQ ID NO: 178483 - DNA, 885 bp, synthetic construct
  misc_feature 1..885: note = Description of Artificial Sequence: Synthetic coding sequence
  source 1..885: mol_type = other DNA
atgaaccggaacggcaaggagaccaagagcaactaccgggtgcgggtttaccagatcccagggaaaccggagatcgtcgattctgctagtgaacttactgctggcgtgcctaataaggtgggaacatgtgtctcagaaggttcctacccggcagggactctttcttggcacctagacgggaaacctctggtaccaaatgagaagggggtgtcagtgaaggagcagacccgccggcatcctgagactggtcttttcaccctacagtctgagctgatggtgactcccgcgcggggtggggaccctcggcccacatttagttgcagttttagcccagggctgccccgccaccgagcactgcgtaccgccccaatccagcctcgcgtctgggaacctgtgcctcttgaggaagttcaattggtagtagagcctgagggaggcgcagtggcccccggcgggacagtgactcttacatgtgaagtccccgcacagccttcgccacaaatccattggatgaaggatggcgtcccattgccacttcccccgagcccagtgctgattctgccagagatcgggcctcaggaccagggcacgtattcatgtgtcgccacccacagttcccatggacctcaagagtcacgcgcagtgtcgatttcgattataggcagcgtgggcggcagtggccttggcacacttgcccttgctttgggaatattgggcggcctgggcactgccgccctgctgattggggttattctgtggcagagaaggcagcggcgtggggaggagcgtaaggctcccgaaaatcaggaggaggaggaggagagagctgaactcaaccagagcgaggagcccgaggcaggcgagagcagcaccggaggcccctag

SEQ ID NO: 178484 - DNA, 885 bp, synthetic construct
  misc_feature 1..885: note = Description of Artificial Sequence: Synthetic coding sequence
  source 1..885: mol_type = other DNA
atgaaccggaacggcaaggagaccaagagcaactaccgggtgcgggtttaccagatcccaggcaagccggagatcgtggatagcgcgtccgaattgactgctggcgtcccaaacaaggtcggtacatgcgtgtctgaggggtcttacccagccggtacactctcttggcatctcgatggcaagccgctagtgccaaacgagaaaggtgtaagtgtgaaagaacagacccggcggcaccctgaaactgggctatttacactgcagagcgagctgatggtgacgcccgctcgcggtggagaccctagacccaccttttcatgctccttctcccctggcctgcctcgccatcgcgctctgagaactgccccaattcaaccccgagtttgggagccagtgcccctggaggaggtgcagctcgtcgtggagcctgagggtggtgctgtagccccagggggtacggtgaccctgacctgtgaagtcccagcccagccatctccccagatccactggatgaaggacggggtaccacttcctctgccaccctcccctgtcctgattcttcccgagattggacctcaggatcagggaacctattcctgcgtcgccactcactcgtctcatggaccgcaagagtctcgcgcggtgtcaattagcatcataggatctgtcggcgggagcggactgggcaccctagctctggctctgggtatcctgggcggtctgggtaccgcagcactactcataggggtgatcctatggcagaggaggcagcggcgcggagaggagcgcaaggctcctgaaaaccaggaggaagaagaggaacgtgccgaactgaaccaaagcgaggaacccgaagcaggggagagttccacaggtgggccatag

SEQ ID NO: 178485 - DNA, 366 bp, synthetic construct
  misc_feature 1..366: note = Description of Artificial Sequence: Synthetic coding sequence
  source 1..366: mol_type = other DNA
atggccgccggcaccgccgtgggcgcctgggtgctggtgctgagcttatggggagccgtcgtcggagcccagaatataaccgcacggataggagaacccctcgtgctgaagtgcaagggcgcgcccaagaagccccctcagcgcctggaatggaaactcaataccggccgcacagaggcctggaaggtgctgagcccccagggtggcggtccttgggacagcgtggcaagggtgctgcccaatggcagtcttttcctgccagcggtcggcattcaagacgaggggatctttaggtgtcaggcgatgaatcggaacgggaaggaaactaagagtaattggtggtggtcacagaaggtcgaacagtag

SEQ ID NO: 178486 - DNA, 1308 bp, synthetic construct
  misc_feature 1..1308: note = Description of Artificial Sequence: Synthetic coding sequence
  source 1..1308: mol_type = other DNA
atgggcgccggcgagcgggtgcaggcccccccccgggccgaggccactgccgggcgtggcgccgaccgcgccagaactctagaagggtctcgcatggcagccggcacggccgtaggagcatgggtgctcgttttgagcctgtggggcgcagtggtaggggcgcagaacataactgcgagaattggggagccgctcgtgttgaaatgtaaaggggctcccaagaagccccctcagcggttggagtggaaactgaatacaggaagaaccgaagcatggaaggtcctgtcccctcaggggggcgggccgtgggactctgttgcgcgcgtgcttccaaatggctccctcttccttccggccgttggaatccaggacgagggtatcttcagatgccaggccatgaacaggaatggaaaggagactaaaagtaactatcgggtcagagtgtatcaaattcccggcaaacctgagatagtggacagcgcctctgagcttacagccggcgtgccgaataaggtgggtacttgtgttagcgagggaagctatcctgcagggacgctgtcctggcatttagacggcaaacctctggtccccaacgagaaaggcgtatctgtcaaggagcagactaggcgacatcccgaaacaggcctgttcacgcttcagtccgagttgatggttacacctgctcgaggcggagatccaagacctacattttcttgttcattctctcccggactgccacggcatagggctttacgtaccgccccaatccagcccagagtgtgggaacctgtcccacttgaagaagtacagttagtagtagagcctgaaggcggtgccgtagccccggggggcactgtgactttgacctgtgaggtcccagctcagccttccccccagatccactggatgaaggatggcgtgcccttgccgctgccccccagtcccgtgctcattcttccagagatcggcccacaggaccagggtacatactcttgcgtagctactcacagctcccatgggccacaggagtcaagagccgttagcatctccatcattgagcccggggaggaagggcccaccgctggcagcgtcgggggttcaggcttgggcactcttgccctggccttgggaatactgggaggtcttggtaccgcggctctgttaattggcgtgattctgtggcagcggcggcagagacgcggagaagagaggaaagccccagaaaaccaggaggaggaagaggagcgagctgaactgaaccagtcggaggagcccgaggcaggcgagtcctcaaccggcggaccttag

SEQ ID NO: 178487 - DNA, 1092 bp, synthetic construct
  misc_feature 1..1092: note = Description of Artificial Sequence: Synthetic coding sequence
  source 1..1092: mol_type = other DNA
atggccgccggcaccgccgtgggcgcctgggtgctggtgctgagcctatggggagccgttgtgggtgctcagaatattactgccaggattggggagccattagtcctgaaatgcaagggcgcgccgaaaaaaccaccccagcgacttgagtggaagctgaacacagggcggacagaagcctggaaagtgttatctccccagggcggcggaccttgggattctgttgctcgagtgctccccaatggatctctgtttctccctgcggtggggattcaggatgagggaatcttccgctgccaggcaatgaacaggaatggcaaagagaccaagagtaactaccgggtgagagtctaccagatcccgggcaagccagagattgtggattcagcctcagagctcaccgctggggttccaaataaggtagtggaagagagccgcagatctaggaagcgcccctgcgagcaggaggtaggtacatgcgtgagcgaaggaagctaccccgccgggactctgagttggcatctcgatggaaagccattggtaccgaacgagaaaggagtttcagtgaaggagcaaactcgcagacatccagagacaggcctgtttactttgcagtccgagttgatggtcacccctgctcggggcggggacccccgaccaactttttcttgtagcttttcccccggactgccccgacatcgcgcgcttcggacagctcccatccagccccgggtatgggagcctgtccccctagaagaggtccaactggtggtcgagcctgagggaggcgcggttgcgccgggagggacagtgacactcacctgtgaagtccccgcccagccaagccctcagattcactggatgaaagatggcgttccactccctctgcccccttctcctgttcttatactgcctgagattggtccgcaagaccagggcacctatagttgcgtagcaacccattcctcccatgggccgcaggaaagcagggctgtatcaatctctatcatcgagcccggggaagaggggcccacagcaggcgagggcttcgataaagtccgagaggccgaagattcccctcagcatatgtag

SEQ ID NO: 178488 - DNA, 402 bp, synthetic construct
  misc_feature 1..402: note = Description of Artificial Sequence: Synthetic coding sequence
  source 1..402: mol_type = other DNA
atgaaggacggcgtgcccctgcccctgccccccagccccgtgctgattctccctgagatcggcccacaggaccaaggcacctatagctgtgtcgctacccactcgagccatggacctcaggaaagcagggctgtctccatatctattatcgaacccggcgaagaagggccgacagctggctctgttgggggttcaggtctcggtactctggccctcgccttaggcattcttgggggtctcggcactgctgctctactaattggtgttatcctgtggcagcggagacaacgaagaggtgaagaaagaaaagctcccgaaaaccaggaagaggaagaggagagagcggaacttaatcagtctgaggagcctgaggctggtgaatccagtaccgggggcccttag

SEQ ID NO: 178489 - DNA, 387 bp, synthetic construct
  misc_feature 1..387: note = Description of Artificial Sequence: Synthetic coding sequence
  source 1..387: mol_type = other DNA
atggccgccggcaccgccgtgggcgcctgggtgctggtgctgagcctttggggggcagttgttggagcccagaatatcacagccagaattggggagccgctggttctgaagtgtaaaggcgcgccaaagaaaccaccccaacgtctagaatggaaattaaacaccggccgcacagaggcatggaaggtgctcagtcctcaagggggcggaccttgggatagtgtggcacgcgtgctgccaaatagttccttattcttgcccgccgtgggaattcaggacgagggaatttttcggtgccaggccatgaaccgcaacggcaaggaaactaagtctaactaccgtgtcagagtgtaccagtttgaaaatctgcataactattcgctgtag

SEQ ID NO: 178490 - DNA, 462 bp, synthetic construct
  misc_feature 1..462: note = Description of Artificial Sequence: Synthetic coding sequence
  source 1..462: mol_type = other DNA
atggccgccggcaccgccgtgggcgcctgggtgctggtgctgagcctgtggggagcagtggtaggggcacagaacatcaccgcacgcatcggtgagcccttggtactcaagtgtaagggcgcgcctaaaaagccccctcagcgcctggagtggaaactgaacactggcaggacagaagcttggaaagtcctaagccctcagggagggggaccatgggatagtgttgcccgagttctgcccaatggaagtctgttcctcccagctgtcggcatccaggacgagggtatcctgggcggattgggtactgcagccctcctgatcggggtaattctgtggcagaggagacaacggagaggggaagagagaaaagctccggagaatcaggaagaggaggaagagcgagccgagttgaaccagtccgaggaacccgaggcaggtgagtccagtaccggcggtccttag

SEQ ID NO: 178491 - DNA, 1308 bp, synthetic construct
  misc_feature 1..1308: note = Description of Artificial Sequence: Synthetic coding sequence
  source 1..1308: mol_type = other DNA
atgggcgccggcgagcgggtgcaggcccccccccgggccgaggccaccgctggacgcggggccgatagggcacgaactctggaagggtcacgcatggcagccgggaccgccgttggcgcctgggtgctggtattaagcctgtggggggccgtagtgggcgcccagaatataacggccagaattggcgaacccctggtcctgaaatgcaaaggagcccccaagaaacctccgcaaagactggaatggaaattgaatacgggccgaaccgaggcgtggaaagtgctatctccccaggggggcgggccatgggactccgtagcccgcgttcttcctaacggatcattgtttctgcccgcggtggggattcaggacgagggaatctttcggtgccaggccatgaaccggaatggcaaagagacaaaatccaactacagagtgcgcgtctatcagattcctggaaaaccagaaatcgtggattccgcgtcagaacttactgctggtgtgcctaacaaagttggaacatgtgtgagcgaaggttcttatccagcgggtactttaagttggcatctggatgggaagccattagtgccaaacgaaaagggcgtgtctgtgaaggaacagacacggagacaccccgagacgggcttatttacccttcagtccgagctgatggtgacaccggccagaggaggcgatcctagacctaccttctcatgttcattctctccaggccttcctcgacatagagctttgagaactgcccccattcaaccgagagtgtgggaaccggttcccctagaggaagtgcagctggttgtggaacctgaaggaggagccgttgccccaggggggaccgtcaccctgacatgtgaggtccccgcccaaccatccccccaaatccattggatgaaagatggagtcccattaccattacccccttcccccgtcttaatcctgccagagatcggcccacaggaccagggtacatacagttgcgtggctacccactcatcccacggcccccaagagtcccgcgcagtcagtatctccataatcgagcctggcgaggaaggaccgacagcgggttcagttggggggtcgggactgggcacactcgctctagctctcggcatcctgggagggctggggacagccgccctcttaatcggagttattctctggcaaaggagacaacgaaggggcgaagagaggaaagccccagagaaccaggaggaggaagaggagcgagccgaactgaaccagtccgaagagcccgaggctggggaaagcagcactggtgggccatag

SEQ ID NO: 178492 - DNA, 366 bp, synthetic construct
  misc_feature 1..366: note = Description of Artificial Sequence: Synthetic coding sequence
  source 1..366: mol_type = other DNA
atggccgccggcaccgccgtgggcgcctgggtgctggtgctgagcttatggggggctgtggtgggggcccaaaatattaccgcgaggatcggggagcctctggtccttaagtgcaaaggggcgccaaagaaaccacctcagagattggagtggaaactcaatacaggacggacagaagcatggaaagtgctaagcccacaggggggaggcccttgggattcagttgcacgcgtattgcccaatggaagtctgtttttgccggccgtgggaatacaggatgaaggaatttttaggtgccaggctatgaacagaaatggcaaggaaactaaatctaattggtggtggagtcagaaagtagaacagtag

SEQ ID NO: 178493 - DNA, 387 bp, synthetic construct
  misc_feature 1..387: note = Description of Artificial Sequence: Synthetic coding sequence
  source 1..387: mol_type = other DNA
atggccgccggcaccgccgtgggcgcctgggtgctggtgctgagcttgtggggggccgtggtaggcgcccagaacatcaccgccaggattggggagccactcgtgctgaagtgtaaaggcgcaccgaagaagcctccccaacggctcgaatggaaattgaatacaggacggacagaggcttggaaagtgctctctccccagggcggcggtccatgggattcggtggctcgggtgctgcctaatggaagcctctttctgccagcagtgggtatccaggatgaagggattttcagatgtcaggctatgaaccgcaatgggaaggagactaaatccaactatagggtcagggtgtaccaattcgagaacctgcataactactccctgtag

SEQ ID NO: 178494 - DNA, 885 bp, synthetic construct
  misc_feature 1..885: note = Description of Artificial Sequence: Synthetic coding sequence
  source 1..885: mol_type = other DNA
atgaaccggaacggcaaggagaccaagagcaactaccgggtgcgggtgtatcaaattcctggcaagcctgagatagtggactccgcttccgagctgaccgccggagtgcccaacaaggttggcacatgtgtgagcgagggaagttatcctgcaggaaccttgagttggcacctggacggtaaaccgctagtccctaatgagaaaggagtcagtgtcaaagagcagacaagacgtcatcccgagactgggctgtttactctgcagtcagaattaatggtgacacccgcccggggcggggacccacgccctacattctcatgctccttttcccctggactgccgcggcatagggccctgagaaccgcacctattcagcctcgcgtctgggagccagtgcctcttgaggaggtccagctggtggtggagcccgaaggtggggcagtcgctcccggagggactgtcactctgacctgcgaggtgcctgctcaacctagccctcaaatccactggatgaaagatggtgtgcctctgccactcccacccagtcctgtgctaatactccccgagatcggcccgcaggatcagggaacttactcctgtgtggccacacacagctcccatggacctcaggaatcgcgcgccgtgagcattagcatcatcgggtccgtggggggttccggcttaggaacgctcgctcttgctctcgggatactaggcggactggggacagccgcacttcttatcggggtcattctctggcagagaaggcagcgacgcggcgaggagagaaaagcgcccgagaaccaggaggaagaggaagagagagctgagctgaatcaaagcgaagaaccagaggccggggagtcatcaacggggggcccgtag

SEQ ID NO: 178495 - DNA, 366 bp, synthetic construct
  misc_feature 1..366: note = Description of Artificial Sequence: Synthetic coding sequence
  source 1..366: mol_type = other DNA
atggccgccggcaccgccgtgggcgcctgggtgctggtgctgagcctatggggtgcagtagtaggcgcccagaatatcacagcccgcattggggaaccgctggtgttgaaatgcaagggggcacctaagaaacccccccagcgactggaatggaagctaaacactggacggaccgaagcttggaaggttcttagcccacaaggaggaggtccatgggactccgtggcccgggttcttcccaattcttccctcttcttgcccgcagtcggcatccaagacgagggaatctttaggtgtcaagccatgaaccgtaatggaaaagaaactaaatcaaattggtggtggagccagaaggtggaacagtag

SEQ ID NO: 178496 - DNA, 462 bp, synthetic construct
  misc_feature 1..462: note = Description of Artificial Sequence: Synthetic coding sequence
  source 1..462: mol_type = other DNA
atggccgccggcaccgccgtgggcgcctgggtgctggtgctgagcctctggggcgcagtggttggtgctcagaacataaccgcccgaatcggggagccactcgtgcttaaatgcaagggtgctcccaagaaacctccacaaaggctggaatggaaacttaacacaggaagaaccgaggcctggaaggtcctgagcccacaagggggaggtccctgggactctgtcgcaagggttttgccgaacggatcgctgtttttacccgccgtgggtatccaagatgagggtatactggggggactgggaaccgcggccttgctgataggcgtgatattgtggcagagacgtcaacgtagaggcgaggagagaaaggcccccgagaatcaagaagaagaggaggagcgggcagaactgaaccagtcagaagagcctgaagccggagaaagcagtaccggaggtccttag

SEQ ID NO: 178497 - DNA, 1308 bp, synthetic construct
  misc_feature 1..1308: note = Description of Artificial Sequence: Synthetic coding sequence
  source 1..1308: mol_type = other DNA
atgggcgccggcgagcgggtgcaggcccccccccgggccgaggccaccgcaggacgtggggctgatagggctcgaactctggaaggatcaaggatggcagccgggactgccgtgggcgcatgggttctcgtactttcactgtggggggccgtagtgggcgcccagaatatcacagcccgcataggggagcccctggttctaaaatgtaagggggcaccaaaaaagccacctcagagactcgaatggaagttgaataccggacggaccgaggcttggaaggtgctgtcgccccagggcggagggccatgggacagtgtagcccgcgtgctaccaaacgggtccctgttcctgcctgccgttgggatacaggatgagggcatcttcaggtgtcaagcaatgaataggaacggaaaagagactaaatcaaactacagggtcagagtctaccagattcctggcaaacccgagatcgtggactcggcaagcgagctcacggccggggtgcccaacaaggtgggcacgtgtgtgagtgagggaagctatccagccggaacactcagctggcacctagacggcaagcctcttgttccgaacgaaaagggagtgtcagtaaaagaacagactcgccgccaccccgaaaccgggctgtttactttgcagtcggagttgatggttacaccagcgaggggcggagatcctcgccccacatttagttgcagcttctccccaggcctccctcgccacagagccttgagaaccgctcccatccagcctagggtgtgggaaccagtcccactggaagaggtccagctggtggtggaacccgagggcggcgcagtggcacctggtggcacagtgacgcttacttgcgaagtgcccgcacagccgtctccacagattcactggatgaaggacggtgtgcctttgccactgccacccagcccagtgctaattttaccagaaatcggtccacaggatcagggtacctacagctgcgtggccacccactcatcccacggcccccaagaaagtcgcgctgtgtccattagtattattgaacctggcgaggaaggcccaacagccggttccgtgggcggatcaggcctaggcaccttagccctagccctgggaattttgggaggcttgggaacagccgcgttgctgataggcgtgatcctgtggcagagaagacagcgccgaggggaggaacgaaaggcacctgaaaaccaagaggaagaagaggagagggcagaattaaatcagtcagaggaacccgaggctggcgaatcttcaaccggcggcccttag

SEQ ID NO: 178498 - DNA, 366 bp, synthetic construct
  misc_feature 1..366: note = Description of Artificial Sequence: Synthetic coding sequence
  source 1..366: mol_type = other DNA
atggccgccggcaccgccgtgggcgcctgggtgctggtgctgagcctgtggggtgcagtggtgggcgcccagaacataacagctcgaattggcgaaccacttgtcctgaaatgcaagggtgcccccaagaaacccccccagagacttgagtggaaactaaacaccggcaggactgaagcttggaaggtgctttccccccaggggggaggaccttgggactcagtggcccgtgtactcccaaatggctcactgtttctgccagccgtcggcatacaggacgagggcatttttaggtgtcaagctatgaataggaacggcaaggaaacaaagagcaattggtggtggagtcaaaaggtggaacagtag

SEQ ID NO: 178499 - DNA, 402 bp, synthetic construct
  misc_feature 1..402: note = Description of Artificial Sequence: Synthetic coding sequence
  source 1..402: mol_type = other DNA
atgaaggacggcgtgcccctgcccctgccccccagccccgtgctgatcctgccagagatcggcccccaagaccaagggacttattcttgcgttgccacacatagttctcacggaccacaagaaagcagggctgtaagtatttccatcattgaaccaggggaagagggtccgacagcgggaagcgtgggcggcagtggactcgggactctcgccttggccctgggaattctggggggcctgggcacggccgcactactgataggagtgattctgtggcagcgaaggcagaggaggggcgaggaaaggaaggctcccgaaaatcaagaagaggaagaagagcgggctgagctgaatcagagtgaggagcccgaggcgggcgaatcctctactggaggtccatag

SEQ ID NO: 178500 - DNA, 885 bp, synthetic construct
  misc_feature 1..885: note = Description of Artificial Sequence: Synthetic coding sequence
  source 1..885: mol_type = other DNA
atgaaccggaacggcaaggagaccaagagcaactaccgggtgcgggtctatcagatcccaggcaagccagaaatcgtagatagcgcctctgagctgactgcaggcgttcccaataaagtgggcacttgcgtgagcgagggaagctatcccgcaggcactctgtcatggcatctggatggcaaaccacttgtaccaaacgaaaagggggtctctgtcaaagagcaaacacgacgacatccagagaccggcctctttaccctgcagagcgaactgatggtgacacctgctcgcggaggtgacccacgaccaaccttcagttgctctttttcgcctgggctgcccaggcatcgcgcgttaaggaccgcccctatccagcccagagtgtgggagcctgtcccactcgaggaagtgcagcttgtcgtcgaaccagaggggggcgcagttgcccctggtggcaccgttacccttacatgtgaggtccctgcacagccctctccccaaattcattggatgaaagatggagtcccattacctctgccaccatcccctgtgctgatactgccagagatcggccctcaagatcagggcacgtattcctgtgtcgcaacccattcttctcatggcccccaggagtctagggccgtgtcaatctctattatcggcagcgtagggggtagcggcttggggacgctcgctctcgctcttggtatcttagggggattgggaaccgccgcactattgattggcgtgatactatggcagaggagacagcggaggggcgaagaaagaaaggctccagagaaccaggaagaagaggaagaaagggctgaactgaaccagtccgaggaacccgaagcgggagaaagtagcaccggcgggccttag

SEQ ID NO: 178501 - DNA, 402 bp, synthetic construct
  misc_feature 1..402: note = Description of Artificial Sequence: Synthetic coding sequence
  source 1..402: mol_type = other DNA
atgaaggacggcgtgcccctgcccctgccccccagccccgtgctgattttaccagagatcggccctcaggatcagggcacatatagttgcgtcgctacccacagttcccatggcccccaggagtcacgtgccgttagcatatcaattatcgagcccggtgaggagggccccacagctggctccgttggaggttctgggcttggcaccctggctctggcgctcggcattctgggcggcctcggcacagccgccttgctcattggcgtgattctgtggcaaagaagacagcgtcgaggggaggaacgaaaagcacccgaaaaccaggaggaggaggaggagagagccgagctgaatcagagcgaggaacccgaggcaggggagtctagcacaggtgggccatag

SEQ ID NO: 178502 - DNA, 1092 bp, synthetic construct
  misc_feature 1..1092: note = Description of Artificial Sequence: Synthetic coding sequence
  source 1..1092: mol_type = other DNA
atggccgccggcaccgccgtgggcgcctgggtgctggtgctgagcctgtggggcgcagtcgttggtgctcagaacatcacggcaaggattggggagcctttggtcctcaaatgtaagggtgccccgaagaaaccgccccagagactggagtggaagctcaatacggggagaacagaagcttggaaggtcctgagccctcaaggtgggggcccctgggacagcgttgcccgggtgttgccaaacggaagtctgttccttccagcagtggggattcaagatgagggaatcttcaggtgtcaggctatgaatagaaacggaaaagagaccaagagtaattaccgggtgagagtttaccaaattcctggcaaaccagagatcgtggatagcgcctcagaacttaccgccggagtgcccaacaaagtggtggaggagtccagaaggtcccgcaagagaccttgcgaacaggaggtgggcacatgcgtgagcgaaggaagttatccagccgggaccttgagttggcacctcgatgggaagccactcgtgcctaacgagaagggtgtatctgttaaggagcagacgcgacggcacccggagaccgggctgtttactctgcagtccgagctgatggtaactccagctcggggaggtgacccgaggccaaccttttcttgcagtttttctcctggtcttccacggcaccgcgccttacgcacagctcctattcagcctcgagtttgggagcctgtacctctcgaggaggttcagctcgtggttgagccggaggggggcgccgtggcacccggtggcaccgtgaccctcacttgcgaggtgcccgcccagcctagcccgcagattcactggatgaaagacggggtacctctcccactaccaccatcacctgtattgatcctacccgagatcgggccacaggaccaaggtacatatagctgcgtggcgacccacagtagccacgggccgcaagagtcacgggctgtgtcgatctcgattatagagcccggggaggagggccctacagccggtgagggcttcgacaaggttcgggaggctgaggactcaccccaacacatgtag

SEQ ID NO: 178503 - DNA, 1308 bp, synthetic construct
  misc_feature 1..1308: note = Description of Artificial Sequence: Synthetic coding sequence
  source 1..1308: mol_type = other DNA
atgggcgccggcgagcgggtgcaggcccccccccgggccgaggccacggcgggccgaggtgcagatcgcgcacgaaccctcgaaggttcccgaatggccgcaggtaccgctgtgggagcctgggtcttggtcttatccctctggggtgcagtggtcggtgcccagaacataaccgcgcgcattggtgagcccctagtgctgaagtgtaagggcgcaccaaagaaacctcctcagagactggagtggaaactgaacactggcaggaccgaggcctggaaagtgctcagcccccagggaggcggcccgtgggattccgttgccagggtgttgccaaactccagtcttttcctccccgccgtgggtatccaagacgagggcattttccgatgtcaggctatgaatcggaatggcaaggagactaagtctaattaccgagttcgcgtgtaccagatcccaggcaaacccgagatcgtggactccgccagcgagctgaccgccggagtgcctaacaaagtaggaacatgcgtgtcagaaggcagctacccggccggcacgctgtcatggcatctggatgggaagcccttggtgcctaatgaaaaaggagtctccgttaaagagcaaacccgaagacaccccgaaaccgggctgtttacgctgcagtccgagctgatggttactccagcaagagggggagatccgaggccgacatttagctgcagcttttcacctggtttgcccagacaccgcgccctgcgaactgccccaattcaaccccgcgtgtgggagccagtccccctggaggaagtgcagctggttgtcgagcctgagggaggagccgttgccccaggcgggaccgttaccctgacatgtgaggtacccgctcagccgtcccctcagatccattggatgaaagatggagtgcctctcccactgcctccctctccagtgcttatccttcctgagatcggcccccaggatcagggtacatattcttgcgtcgccacccacagtagtcacggaccccaggaaagtcgcgccgtttctattagcattatagaacctggtgaggaaggacctacagccggaagcgtcggggggtctgggctggggacactcgcattagcactgggaatactgggcggactgggaacggccgcacttctcatcggtgtcattttgtggcaacgtcgccaacggagaggggaagagcgcaaagcacccgagaatcaagaagaagaggaagagcgagctgaactgaatcagtcagaagaacccgaggcaggtgagtcaagcaccggggggccttag

SEQ ID NO: 178504 - DNA, 387 bp, synthetic construct
  misc_feature 1..387: note = Description of Artificial Sequence: Synthetic coding sequence
  source 1..387: mol_type = other DNA
atggccgccggcaccgccgtgggcgcctgggtgctggtgctgagcctgtggggagcagtcgtaggcgcccagaatataaccgccaggatcggcgaacctctggttctcaagtgtaaaggcgctccaaagaagccgccgcaaagattggagtggaaactcaataccggtcggacagaagcttggaaagtcctctccccacagggcggaggcccatgggattctgtagctagggttctgcccaatggaagtctgtttctgccagcggtggggatacaagatgagggaatctttaggtgccaggccatgaacagaaatggcaaggagaccaagagcaattaccgcgtgcgagtctatcagttcgagaatctgcataactattccctctag

SEQ ID NO: 178505 - DNA, 462 bp, synthetic construct
  misc_feature 1..462: note = Description of Artificial Sequence: Synthetic coding sequence
  source 1..462: mol_type = other DNA
atggccgccggcaccgccgtgggcgcctgggtgctggtgctgagcctgtggggcgcagtggttggagctcaaaacatcactgccagaattggggaacctcttgtactaaaatgcaaaggcgcgcctaagaagccaccccaacgcctggagtggaaactcaatacaggccgcaccgaggcctggaaggttctcagccctcagggaggtggcccgtgggacagtgtggcaagggtcctgcccaacggatcattgtttctgcctgccgtcgggattcaagacgagggaatattgggtgggcttggaactgccgccttattgattggggtcattctatggcaacgcagacaacgtagaggagaggagcgaaaggctccggaaaatcaagaggaagaggaggagagagcggagctcaatcaatccgaagaacccgaagctggggaatcttctacgggtggaccctag

SEQ ID NO: 178506 - DNA, 1092 bp, synthetic construct
  misc_feature 1..1092: note = Description of Artificial Sequence: Synthetic coding sequence
  source 1..1092: mol_type = other DNA
atggccgccggcaccgccgtgggcgcctgggtgctggtgctgagcttatggggcgccgtggtgggcgcacagaacataactgcacggatcggggagcctcttgtgctgaagtgtaagggcgcccctaaaaaaccaccgcagcgcttggaatggaagctgaacacgggccgaacagaagcctggaaggtgctgtccccccaagggggagggccttgggatagcgttgctcgagtgttgcccaacggctccctcttcctgccggccgtgggtattcaggatgagggtatattcagatgtcaggcaatgaacagaaatgggaaagaaaccaaatcaaactaccgcgtgagggtctatcagatacccgggaaacctgagatcgtcgattctgcctccgagttgaccgcgggtgtgccaaataaggtggtcgaggagagccgcaggtcacgaaaaagaccctgcgaacaggaagtcgggacctgtgtctctgagggatcttaccccgccgggacactgagttggcatcttgatggcaagcccttggttcctaacgagaagggggtttctgtaaaggagcaaacccgtaggcaccctgagaccggcctgttcacactgcaaagcgagttaatggtaacaccagctcgggggggagacccacgtccaactttcagttgttcattttcacccgggttacctcgtcatcgcgccctcaggaccgctcccatccagcctcgcgtctgggagccagtccccctggaggaggtgcagctagtagtcgagccggaggggggcgcagtggccccaggggggaccgttactctgacatgtgaagtcccagctcaaccctcgcctcagatacattggatgaaagatggtgtcccattgcctctccctccctcccccgtgctgatactgcccgagattggcccccaagatcaggggacctattcctgtgtggctacccattcaagtcacgggccccaagagtcccgggcggtcagcatatcaattatagagcccggcgaagaggggcccactgccggcgagggatttgataaggtgcgggaggccgaagattcacctcagcacatgtag

SEQ ID NO: 178507 - DNA, 366 bp, synthetic construct
  misc_feature 1..366: note = Description of Artificial Sequence: Synthetic coding sequence
  source 1..366: mol_type = other DNA
atggccgccggcaccgccgtgggcgcctgggtgctggtgctgagcttgtggggcgctgtcgtgggggcgcaaaatataacagctcggattggtgagcccttggtgctgaagtgcaagggcgcacccaagaaacctccacagcggctagagtggaagctcaacactggccggacagaggcttggaaggtactttctccacaaggcggaggtccttgggattccgttgcaagggtgttgcctaacggtagtttatttctccctgcagtgggcatccaagacgaggggattttcaggtgccaggctatgaaccggaacgggaaggagacgaagtctaattggtggtggagccagaaagtggagcagtag

SEQ ID NO: 178508 - DNA, 402 bp, synthetic construct
  misc_feature 1..402: note = Description of Artificial Sequence: Synthetic coding sequence
  source 1..402: mol_type = other DNA
atgaaggacggcgtgcccctgcccctgccccccagccccgtgctgatcctgcctgagatagggccccaggatcagggcacttatagttgcgtcgcaacacacagctcccatggcccacaggaaagtcgggcggtgtctatttctattatagagccaggcgaggaggggccaacggctggctctgtgggggggtccggactgggcacccttgctctggctctcggcatcctcggcgggctgggaaccgctgccttgctgattggtgttatcctttggcagaggagacaaaggcggggcgaagaacggaaggctcccgagaaccaagaggaggaggaagagagggcagaactcaatcaatctgaggaacctgaggcaggggagtccagtacaggtggcccttag

SEQ ID NO: 178509 - DNA, 387 bp, synthetic construct
  misc_feature 1..387: note = Description of Artificial Sequence: Synthetic coding sequence
  source 1..387: mol_type = other DNA
atggccgccggcaccgccgtgggcgcctgggtgctggtgctgagcctgtggggagcagtggtgggcgctcagaacatcacagcacgcattggcgagccactcgtgttaaagtgcaagggggcacccaagaagccgccgcagcgtcttgagtggaagctcaacactggacgtacggaagcctggaaggtcctgagtccacagggaggtggcccatgggactctgtcgcgcgagtcctccccaacggttccctgtttctgcctgccgtaggaatacaggatgaagggatatttagatgtcaggctatgaatagaaacgggaaagagactaagagtaattatagagtgcgggtgtatcagttcgagaatttacataactactccctgtag

SEQ ID NO: 178510 - DNA, 1092 bp, synthetic construct
  misc_feature 1..1092: note = Description of Artificial Sequence: Synthetic coding sequence
  source 1..1092: mol_type = other DNA
atggccgccggcaccgccgtgggcgcctgggtgctggtgctgagcttgtggggcgccgtggtgggtgctcagaatatcaccgccagaataggggagcctttagtgctgaaatgcaaaggagcaccaaaaaagccaccacagcgcctggagtggaaacttaacactgggcgcacggaggcttggaaggtcctgtctccccagggggggggaccttgggactccgtggctagggtactgcccaatggcagcttatttctccccgctgtgggcattcaagacgaaggaatatttaggtgtcaagctatgaaccgcaatggtaaggaaacaaagtcaaattaccgtgtacgcgtctatcagattcctggcaagcctgagattgttgactccgcctcggaactaacagccggcgtgccgaataaagttgtcgaggagtcaaggagaagcaggaaacgcccctgtgagcaggaggtcggtacctgcgtttccgaaggaagctacccagccggaacactatcttggcatctcgacgggaagcctctggtgcccaatgaaaaaggagtcagcgtcaaggaacaaaccagacggcatcccgagacgggcctattcactctgcagtccgaacttatggtgactccggcgcgcggcggcgatccacggcctactttttcttgttcttttagccccggtctcccacgtcatcgagctctgcggacagctccaattcaaccgagagtctgggaaccagttcccctggaggaagttcagctcgtcgtggaaccagaaggcggcgctgtggcacctggcggcactgtgacgttgacctgcgaggtgcccgctcagccaagccctcagatccactggatgaaagatggcgtacctttgcctctcccaccttcccctgtgctcattctgccagagatcggcccccaagaccagggaacatattcttgcgtggctacgcatagttctcatggcccccaggagagcagagctgtctccatctccataattgagccgggcgaggagggccccacggctggagagggcttcgacaaggtgcgcgaggctgaggatagtccccagcacatgtag

SEQ ID NO: 178511 - DNA, 1308 bp, synthetic construct
  misc_feature 1..1308: note = Description of Artificial Sequence: Synthetic coding sequence
  source 1..1308: mol_type = other DNA
atgggcgccggcgagcgggtgcaggcccccccccgggccgaggccaccgctgggagaggtgcagatcgggcccggacactggaaggctctcgcatggcagccgggaccgcggtgggggcttgggtcctggtgctcagtctctggggcgcagtggtgggagcacagaacattactgctcgtattggagagcccttagtcttaaagtgcaagggcgcgcccaagaagccgccccagaggctggagtggaagcttaatacgggacgcacagaggcttggaaagtgctcagcccacaggggggcgggccatgggactctgtggcccgggttctcccaaacggaagtttattcttgccggccgttggaatacaagacgagggcatttttcggtgtcaggcaatgaacagaaacgggaaggagacaaagtccaattacagggtacgcgtgtaccagattcccggcaagccagaaatcgtagattcagcctcagaactcacagcgggagtccccaataaggttgggacttgcgttagtgagggatcctaccctgccggcacgttgtcctggcatctagacgggaaaccgcttgtgcccaacgagaagggagtgtcagtcaaggagcagactcgccggcaccccgaaacaggtctgtttacactgcaaagcgaactgatggtgacaccagcccgcggcggtgacccccgacccacattcagttgttccttttctccaggccttccacgtcaccgcgccctgagaacagcccccatccagcccagggtttgggaacctgtgccactcgaagaggtgcagctggtcgtggaacctgagggaggtgccgtggcccccggcggaacagtcacactcacctgtgaagtccccgcacagccctctccccagatccattggatgaaggacggagtccccctgccactccccccctctccagttttaattcttcccgaaattggtccacaggaccaagggacatacagttgtgtggccactcattcaagtcatggacctcaagagagccgggcggtaagcattagcatcatagagccgggcgaagaggggcctaccgctggatctgttggagggagtggcctgggtacccttgctctggccctgggtatcctgggcggattaggcaccgccgcgctgttgattggggtgatcctgtggcagaggagacagagaaggggggaggagcggaaggccccagaaaaccaggaagaagaggaggagcgcgctgagctgaaccagtcggaagagcctgaagctggagagagcagcacagggggcccctag

SEQ ID NO: 178512 - DNA, 462 bp, synthetic construct
  misc_feature 1..462: note = Description of Artificial Sequence: Synthetic coding sequence
  source 1..462: mol_type = other DNA
atggccgccggcaccgccgtgggcgcctgggtgctggtgctgagcctgtggggtgcagtggtcggcgcccagaatatcaccgcacgcatcggagagccactcgtcttgaaatgcaagggcgcaccaaaaaaacccccccagagactggagtggaaactcaacacaggacggacggaagcatggaaggtgttgtcaccacagggaggcggtccctgggatagcgttgctcgcgtgctgcctaacagttcactgttcttacctgcagtggggatccaggatgagggcattctcggtggactcggaaccgccgcgctcttgattggcgtgattctgtggcagagacgtcagcgacggggcgaggagcggaaggcgcctgaaaaccaagaagaggaagaggaaagggcagaattaaaccagagtgaggagccagaagcaggtgagtcgtccaccggaggaccttag

SEQ ID NO: 178513 - DNA, 402 bp, synthetic construct
  misc_feature 1..402: note = Description of Artificial Sequence: Synthetic coding sequence
  source 1..402: mol_type = other DNA
atgaaggacggcgtgcccctgcccctgccccccagccccgtgctgatccttcctgagataggacctcaggatcagggtacatacagttgcgtagcaacccacagctcacatggtcctcaggagtcccgagccgtgtctatatccatcatagaacctggggaggaagggcctaccgccggttccgtagggggcagcggccttggaacgctggccttagccctcggtattctgggcgggctcgggaccgcagcccttctgatcggagtaattctgtggcagcgacgacagagaaggggggaagagcggaaggcacccgaaaatcaagaagaggaagaggagagagctgagctgaaccaaagtgaggaacccgaagctggcgaaagtagtaccgggggcccttag

SEQ ID NO: 178514 - DNA, 885 bp, synthetic construct
  misc_feature 1..885: note = Description of Artificial Sequence: Synthetic coding sequence
  source 1..885: mol_type = other DNA
atgaaccggaacggcaaggagaccaagagcaactaccgggtgcgggtgtatcaaattccaggaaagcccgagatcgtagactcagcgtccgagctgactgcaggagtgccgaacaaggtggggacgtgcgtcagcgaaggcagctaccctgcaggcactctttcgtggcatctggatggcaagccccttgtgcccaatgagaagggcgtgtccgtgaaggagcaaactcggagacaccctgaaaccggtctgtttacattacagagcgaactaatggtaacacctgcacgggggggcgacccaaggcctaccttctcatgcagcttctcaccagggctacccaggcaccgggctcttaggactgctccaatccaacctcgcgtctgggagccagtgccactcgaagaagtgcagctcgtggtcgagcctgagggcggcgccgtcgcacccggagggactgtgacactcacatgtgaggtccccgcgcagccatctcctcagattcactggatgaaagatggcgttccattacccctgcccccgagtccggtgctaattttgcctgaaatcggcccccaggaccaggggacatacagttgtgtggccacccacagttcgcacggacctcaggagagccgagccgtgagcatcagcattattgggagcgtcggaggatccggtcttggcactctcgccctggcgcttgggattctgggaggcctgggcactgccgctctgctgataggcgtcatcctctggcagagaagacagcgccggggcgaggaaagaaaagcaccagagaaccaggaggaggaggaagagcgggcagagctgaatcagagtgaagagcccgaggctggggagagcagcaccgggggcccatag

SEQ ID NO: 178515 - DNA, 1092 bp, synthetic construct
  misc_feature 1..1092: note = Description of Artificial Sequence: Synthetic coding sequence
  source 1..1092: mol_type = other DNA
atggccgccggcaccgccgtgggcgcctgggtgctggtgctgagcctctggggggccgtagtaggagcgcagaacattaccgccagaataggagagccgttagtgctgaagtgcaagggagcacccaagaagccacctcagaggctagagtggaagctgaacactggccgcacagaggcgtggaaagttttatcaccccaggggggaggcccctgggacagtgtcgcgagggtgctgcctaatagcagcctgtttctgccagccgtgggcattcaggatgaggggattttccgatgccaggcaatgaaccgcaacgggaaagagacaaaaagcaattatcgagtgagagtttaccagattccggggaagcctgagattgtcgactcagcttctgaattgacagccggagttcctaacaaagtggtggaagaatcaagacggagtcggaaacggccttgtgaacaggaagtcgggacctgtgtgtcagaaggatcttacccagccggcactttgagctggcatttagatggcaaacctctggtgccgaacgaaaaaggggtttctgttaaagaacagacacgaagacacccggagacaggtctgtttaccctgcagagtgaactgatggtaacacctgctagggggggagatcccaggccaacgttctcatgttccttttcgccaggtttaccacgacaccgagcgttaagaacggcacctattcagccgcgggtctgggaaccagtccccctggaagaggtccaactcgtggtggagcccgaaggtggtgcagtagcacccggcgggacggtgaccctgacatgtgaagtgccagcccaaccgtctcctcagatccattggatgaaggacggcgttcccctgcctttgccacccagccccgtactcattctgcctgaaatagggccccaggaccagggcacctattcgtgtgtggcgacacactctagccacggcccacaggaatccagagcagtgagcatttccattattgagcccggtgaagaaggacctacggcaggtgaggggtttgataaggtgagagaagccgaggactcccctcagcacatgtag

SEQ ID NO: 178516 - DNA, 462 bp, synthetic construct
  misc_feature 1..462: note = Description of Artificial Sequence: Synthetic coding sequence
  source 1..462: mol_type = other DNA
atggccgccggcaccgccgtgggcgcctgggtgctggtgctgagcctgtggggagcggtggtgggcgcccagaacatcaccgcaagaatcggagagccactggtgcttaagtgcaaaggggcacctaagaagcccccccagcgtctggaatggaagctgaacaccggaagaactgaagcctggaaagtcttatccccccagggcggcggcccctgggattcagtcgcaagagtcttacctaacggatccttgtttctgccggcagtgggtattcaggacgaaggtattctggggggcctgggaaccgcggcccttttgatcggcgttatcttgtggcagagaagacagcggaggggggaggagcgcaaagctcctgagaaccaagaggaagaagaggaacgcgccgagctgaatcagtccgaagaacccgaagcaggggagtcttccacaggcggaccctag

SEQ ID NO: 178517 - DNA, 387 bp, synthetic construct
  misc_feature 1..387: note = Description of Artificial Sequence: Synthetic coding sequence
  source 1..387: mol_type = other DNA
atggccgccggcaccgccgtgggcgcctgggtgctggtgctgagcctgtggggagccgttgtgggagcccagaatataaccgctcgcattggcgagcccctcgtgctgaaatgtaaaggtgcaccaaagaagcctccacaacggctggaatggaagctcaatacgggacgaactgaagcttggaaggtactgagtcctcaagggggagggccatgggatagcgttgcacgcgtccttcccaacgggagcctgtttctgcccgccgtaggaatccaggatgaagggatttttagatgccaggccatgaaccggaacggtaaggagaccaaaagtaactatcgagtgcgtgtgtaccagtttgagaatctccataattactccctgtag

SEQ ID NO: 178518 - DNA, 2460 bp, synthetic construct
  misc_feature 1..2460: note = Description of Artificial Sequence: Synthetic coding sequence
  source 1..2460: mol_type = other DNA
atgcccctgaccagcgccttccgggccgtggacaacgaccccggcataatagtgtggcgcatcgagaagatggaacttgctcttgtgcctgtgtcagcacacgggaacttctacgaaggcgactgctacgttatcttatccacccgacgggtagcctccctgctgagccaggacatccacttttggatcggcaaggattcttcccaggacgaacaatcctgcgccgctatctatacgacacagctcgatgactatcttgggggaagtcctgtgcagcatagggaggttcagtaccatgagagtgatacttttcgtggttatttcaagcaaggcatcatctataagcaggggggggtggcttctggaatgaaacatgtggagacaaatacctatgacgtcaagaggttgctacacgtcaagggaaagaggaatatcagggctaccgaagtggaaatgagttgggattccttcaatcgcggcgatgtcttcctgctggacctcggtaaggttattatccagtggaacggtcctgaatctaacagcggagagcgtctcaaggcaatgctattggcgaaagacattcgggacagagagagaggtgggagagctaaaatcggagtcatagagggagacaaagaggctgctagtccagagctcatgaaggttctgcaggatacactaggccgaagatctattattaagcctaccgtgcctgatgagataatagatcagaagcagaagtcaaccattatgctgtaccatatttccgacagcgcaggccaattggcggtcaccgaggtcgcaacgaggcccctggtacaggacctcctgaatcacgacgactgctacattctcgatcagtccggtactaagatatacgtgtggaaggggaagggcgctaccaaagccgaaaaacaagcagccatgtcaaaggccctggggttcatcaaaatgaaatcctatcctagctctacaaatgtggaaaccgtaaacgatggagctgaatccgccatgttcaaacagctgtttcagaaatggtccgtcaaagatcagaccatgggactgggaaaaacgttttcgataggtaaaatcgccaaggtttttcaagataaatttgatgtaactcttctgcatacaaagcctgaggtcgccgcccaggaaagaatggtcgacgatgggaatggaaaggtcgaggtgtggcgaattgagaaccttgagcttgtgcccgtggagtatcagtggtacggttttttctacggcggcgattgctacctggtcttgtacacttacgaggtgaatgggaaaccacatcacatcctgtatatctggcaggggcggcatgctagccaggacgagcttgctgccagcgcatatcaggctgtagaagtggataggcagtttgacggggctgccgttcaggtgcgggttcgcatgggaacagagcctagacacttcatggcgattttcaagggcaagctcgtcattttcgagggcggaacaagccggaagggtaacgccgaaccagacccgccagtccgtttgtttcagattcacggtaacgacaagagcaacacaaaagccgttgaggtgccagcctttgcctcttccctgaactctaatgatgtctttttgctcagaacccaggctgaacattacctgtggtatggcaagggaagttccggcgatgaacgagcgatggctaaagaactggcctccctgttatgcgacgggtcagagaacactgtggccgaaggccaggagcccgccgagttttgggacctccttggaggtaagactccgtacgcaaacgataagaggctgcaacaggagatactggacgtgcagtctcgtttgttcgagtgttcaaacaaaacaggccagtttgtcgtcactgagatcactgactttactcaggatgaccttaatcccaccgatgtgatgctgctggatacttgggaccaggtcttcctgtggatcggagccgaggctaacgccacagagaaggagagcgcattggccacggcccagcaatatttacatactcatccctccggacgagacccagatacccctatcttgattattaagcagggcttcgagcctcctatttttacggggtggttcctcgcctgggaccctaacatttggtccgcagggaaaacctatgagcaattgaaagaggaactgggtgacgccgctgcaatcatgcgaataacagcagacatgaaaaatgcaactttgagcctgaactcaaacgacagcgaacctaaatactaccctatcgccgtgctgctgaagaaccagaaccaggagctgccggaagatgttaatcccgcaaagaaggagaactacctgagcgagcaagatttcgtgtccgtgttcggaatcacgcgaggacagttcgctgccctgcccggttggaagcaactgcaaatgaagaaggaaaaaggtttattctag

SEQ ID NO: 178519 - DNA, 2439 bp, synthetic construct
  misc_feature 1..2439: note = Description of Artificial Sequence: Synthetic coding sequence
  source 1..2439: mol_type = other DNA
atgagcagcaccggccaccccggcagctacaagatctggggcgagaaaatggagctggcattggtcccggtatctgcacatggaaacttctatgaaggcgattgctatgtcattctgagtacaaggcgggtggcatccctcctaagccaggatattcacttttggatcggcaaagattcgagtcaggatgaacagagttgtgcagccatatatacaactcagctggatgattatcttggaggatcccccgtgcagcaccgggaggtgcagtaccatgagagcgacacttttagagggtattttaaacagggaattatttacaagcagggcggtgtagcttccggcatgaaacacgtggaaaccaacacgtatgacgtaaagcgcctgctgcatgtgaaagggaaaagaaacatcagagccacagaggtcgaaatgtcctgggacagcttcaacagaggggatgtattcctcctcgatctgggtaaggtgattatccagtggaacggcccggagtccaacagtggagagcgcctcaaagctatgttgctggccaaagacatcagggatcgggagagaggagggagagccaaaattggagtaattgagggggacaaggaggctgcgtctcctgagctgatgaaggtgctacaggacacgctggggcgtaggagcatcatcaaaccgaccgttcctgacgagataatcgatcaaaaacaaaaatctaccatcatgctgtatcacatttcagactccgccggtcagttggccgtcactgaagtggctacgcgccctctggtgcaggacctgctcaatcatgacgattgttacatcctggaccaaagcggtacaaaaatctatgtatggaaaggcaagggagctaccaaggccgagaaacaggccgcgatgtcaaaggcccttggattcatcaagatgaagtcctaccccagctcgacaaatgtcgagactgtgaacgacggcgctgagtctgccatgttcaagcagctgtttcagaagtggagcgttaaagaccaaaccatgggcttgggtaaaacattttcaattggcaagatagccaaagtatttcaagacaaatttgatgtgaccttgctgcacaccaagcccgaggttgcagcacaagagcgcatggtggatgacggcaacgggaaagtggaagtgtggcgaatcgagaatctcgaacttgtaccggtcgagtaccagtggtatggatttttctatggaggagattgttacttggtcctgtacacctacgaagttaatgggaaacctcaccatattttatatatttggcagggaaggcacgcgagccaggacgagctcgccgccagtgcttaccaagctgtcgaggtggaccgccagtttgacggcgccgcagtgcaggttcgtgtgaggatggggacagagccgagacactttatggctatttttaagggaaagctagtcatctttgagggtgggactagtagaaagggcaatgccgagccagatccccccgttagactgttccaaatccatggcaacgacaagtctaacactaaggccgtcgaagttcccgcgtttgccagctccctcaacagcaacgacgtgttcctgcttaggactcaagcagagcactacctttggtatgggaagggttccagcggagatgagagggccatggctaaggaactggctagtctactatgcgacggcagcgaaaacaccgtggccgaggggcaggagcccgcggaattctgggacttacttggcgggaagacaccctatgccaacgacaagcgtttacagcaggagattctggatgtgcagtcccggctctttgaatgctcaaataagacggggcagtttgtggtgacagagattaccgattttacgcaggatgacctcaatccaacagacgttatgctgttggacacctgggaccaggttttcctgtggattggggcggaagctaatgccaccgaaaaggagagtgctctggctacagcacaacagtacctgcacacacatccatccggaagagaccccgacacaccaatcctcattatcaagcagggcttcgagcccccaattttcacagggtggttcctagcctgggatcccaacatctggagcgccgggaaaacctacgagcaacttaaagaggagctgggggatgctgccgcaatcatgaggataaccgcagacatgaaaaacgcaactctctcccttaattctaatgactcagagcctaaatattatcctatcgctgtgctgcttaaaaaccagaatcaggagctcccagaggacgtaaaccctgccaaaaaggagaattacctcagtgagcaggatttcgtgtctgtgttcgggattactaggggtcaatttgccgccctgcccggctggaagcagctgcaaatgaaaaaagagaaggggctcttctag

SEQ ID NO: 178520 - DNA, 474 bp, synthetic construct
  misc_feature 1..474: note = Description of Artificial Sequence: Synthetic coding sequence
  source 1..474: mol_type = other DNA
atgcccctgaccagcgccttccgggccgtggacaacgaccccggcattatcgtgtggcgcattgagaagatggagctcgccctggttccagtttctgcccatggtaacttctatgaaggcgattgttacgtgattctttcaaccaggagggtagcaagtctgttgagtcaggatatccacttttggatagggaaggactcttcacaggacgaacaatcctgtgcagccatctacaccacccaattagatgattatctggggggcagtccagttcagcacagagaggttcagtaccatgaatccgatacttttagagggtacttcaagcaggggatcatctataaacaagggggcgtcgctagcggtatgaaacacgtcgaaacaaatacatacgacgtcaagcggctccttcacgtcaaagggaagcgcaatattcgagctactgaggtggagatgtcctgggatagtttctag

SEQ ID NO: 178521 - DNA, 2859 bp, synthetic construct
  misc_feature 1..2859: note = Description of Artificial Sequence: Synthetic coding sequence
  source 1..2859: mol_type = other DNA
atgaagttcaagcggcggcaccaggccttccccagcttcttcaagatgaaggtgagcctgcccagcgaccccagctgcgtcgaggagatcctgagggagtctcagcacctgaccccaggtttcacgttacaaaagtggaatgaccctacaacccgcgctagtacgaaaagcgtctcattcaagagcatgctggaggacgacctcaaactgtccagcgacgaagacgacttggagcccgttaaaaccctaactacacaatgcactgctacggagctgtatcaggcagtggagaaggccaaaccgagaaacaatcccgtgaacccgccccttgccaccccccaaccccctcctgctgtccaggcctctgggggttcaggctccagtagtgaatcagagtccagttccgagagcgactctgacactgagagctctacaactgactccgagtccaacgaagcaccaagggtggccaccccagagcctgagccacccagcacaaacaagtggcaactggacaaatggctgaacaaggtcacttcccagaataagtccttcatttgcgggcagaacgaaacgcccatggaaacaattagccttccaccccctataattcaacccatggaagtgcagatgaaggtcaaaacaaatgctagtcaggttcccgcagagcctaaggagcggccacttttatccctgattagagagaaagccaggcctagacccacccagaagatccccgagactaaagccttgaaacataagctttccactacttccgaaactgtcagccagcgtactattggcaaaaagcaaccaaagaaagtcgaaaagaacacttcaacagatgagtttacttggcctaaaccaaatatcaccagctcaaccccaaaagagaaggagtcggttgaattgcatgatccgcccagggggcgcaacaaggccaccgcccataagccagctcctaggaaagaaccaaggcccaatatcccgctcgcccctgagaaaaagaaataccggggcccgggcaaaatcgtcccaaaatccagagaattcatcgaaactgactctagcacaagcgacagcaacaccgaccaggaggagaccctgcagatcaaggtcctcccgccttgcatcatttctgggggaaatacagcaaaatcaaaggaaatctgcggagcttcactgaccctaagtacactgatgagcagctctggatcaaacaacaacctgagtattagcaatgaagagcccaccttctctcccatacctgtcatgcaaacagagatcttatctccacttagggatcatgaaaacttgaagaacctgtgggtcaaaattgacctggacctactgagccgggtgcctggacatagtagtctgcacgccgccccagccaagcccgaccataaggaaaccgccaccaagcctaaaaggcagacggccgtgaccgctgtggaaaagcctgcccctaaaggcaagcgcaagcataaaccaatcgaggtagcggaaaagatccccgaaaaaaaacaaaggctggaagaggctaccaccatatgtctcctgcccccctgcatttcccccgctccgcctcataagccacctaatacaagggagaataactcctctagacgcgctaatcggagaaaggaagagaagctttttccaccacccttgtctcctcttcccgaagatccgccccggaggcgcaatgtttctgggaacaacggccctttcggtcaggacaagaatattgccatgacaggacaaatcactagtacaaaacccaagagaactgaaggcaaattctgtgccacgttcaagggaatttcggtgaacgaaggggatacaccgaagaaggccagtagcgctactatcacagtcactaataccgcaattgccacagctacggtgactgccacagcaatcgtcactacaactgttaccgccactgctacagctacagctactacaacgacaacgaccacaacgataagcactataactagtaccatcacgacagggctgatggactcttctcatctggagatgacaagctgggccgctctccctttgttgtcaagtagctccaccaatgtccgacgacctaagctaacgttcgatgactctgtgcataacgcggattactacatgcaggaggctaaaaagctgaagcacaaggctgacgccctgttcgagaagtttggaaaagccgtgaattatgcggacgcagcgttgtccttcacagaatgcggtaacgcgatggagagggaccccctagaggcgaagtccccgtatacaatgtattccgaaactgtagagctcctgagatatgccatgcgattaaaaaacttcgcaagtccactggccagcgatggcgacaagaaattggcagtcctttgttatcggtgcttaagcctcctttacctcagaatgtttaaactgaagaaagatcacgccatgaaatactcgcggtctcttatggaatatttcaaacagaatgcatccaaggtcgctcagataccaagcccctgggtgtccaacggaaagaacaccccgtcccccgtttccctgaacaacgtgagcccaatcaacgccatgggaaactgtaacaacggaccagttactatccctcagcgcattcaccatatggccgcatctcatgttaatatcacctcaaacgttctgcgcggctacgagcattgggatatggccgataagctcacccgcgaaaacaaggaatttttcggagatttagataccttgatgggaccactcacacagcactcatccatgacaaacctcgtgcgttacgtccgccaggggctatgctggctgcgtatcgatgctcatcttctctag

SEQ ID NO: 178522 - DNA, 3837 bp, synthetic construct
  misc_feature 1..3837: note = Description of Artificial Sequence: Synthetic coding sequence
  source 1..3837: mol_type = other DNA
atggacctgttcgacttcttccgggactgggacctggagcagcagtgccattatgagcaagatcgctccgcccttaaaaagcgagagtgggaaaggcgcaatcaggaagttcagcaggaagacgatttgttctcgagcggatttgacctcttcggggaaccgtataagaccaataaaggggacgccctcgccaatcgggtccagaataccctgggaaactacgatgaaatgaaaaacctgctaaccaatcacagcaatcagaatcacctggttggcatcccaaagaactcggtacctcaaaacccgaacaataagaatgagcctagcttttttccagaacagaaaaataggatcattccaccccatcaagataatactcacccatcggcccctatgccaccacctagtgtcgtgattctgaatagtacgcttatccactccaaccggaagtcaaagccagaatggtccagagatagccacaacccaagcaccgtgctggcttcccaagcttcaggacagccgaacaagatgcagaccctcacgcaggaccaaagtcaggccaaattggaggattttttcgtgtatccagccgagcaaccacagatcggggaggtcgaggagagcaacccgtcagctaaagaggacagtaatcccaactccagcggggaagacgcattcaaagagatttttcagtccaatagtccagaggaaagtgagtttgccgtgcaggccccagggagtcccttggtggcaagttccctgttagccccatcttctggcctgtccgtgcagaattttccccccggtctgtactgtaaaacctcaatggggcaacagaagcccactgcctatgttaggcctatggatggtcaagaccaggcccctgatatctctcccacactcaagcccagtatcgaatttgagaacagctttggcaaccttagctttggcaccctgttagacggaaagccttcagctgcatcaagcaagacaaagctgcctaaattcaccattcttcaaacttccgaggtgagccttccctctgacccgtcctgtgtcgaggagatcctgcgcgaaagccagcatttgacacccggcttcacactgcagaaatggaacgaccccacaacaagagccagcacaaaatccgtatcgttcaaatctatgcttgaagacgaccttaagctgagcagcgatgaagatgatctcgaacccgttaagacactcaccacacagtgcacggctactgaactttatcaagcggttgaaaaagccaagcccaggaacaatcccgtgaaccccccactggccacccctcaaccccctcccgccgttcaggcttccggtggcagcggctcctcatcagagtctgaatccagtagcgagtccgatagtgacacagagagctcaacaactgactccgagtcaaatgaggcccctagagtggcgacccccgagcctgagccccctagtaccaacaaatggcaactcgataagtggctcaacaaggtgacctcccagaataagtcatttatatgtggacagaatgaaactcctatggaaacgatctctctgcctcctcctatcatccagcctatggaggtgcagatgaaggtcaagactaatgcctcacaggtgccggctgagccaaaggaacgacctctgctatctcttatccgcgagaaggcccgacccagacctactcagaagattcctgagaccaaggccctcaagcacaaattaagtaccacctcagagacagtgtcacaacggacgatcggtaaaaaacaacccaagaaagttgagaagaatacttcgactgatgagtttacttggcccaaaccgaacattacctcttctaccccgaaggagaaggagtccgttgaactgcatgatccgccgaggggtaggaataaggctacagcccataaacccgcccccaggaaggaacctcgcccgaatattcctctggctcccgaaaagaaaaaatacagaggccctggcaagattgttcccaagtcccgtgagtttatcgagaccgactcttcaacttctgatagcaacactgatcaggaggaaacactgcaaatcaaggtgctacctccatgcattatcagcggaggcaacacagccaagtctaaagaaatttgtggcgcatccctgactctttcaaccctcatgtcctcaagcgggagcaacaacaatctgtccataagtaatgaggagcccacattcagcccaattccggttatgcagactgagatcttatcacccctgcgcgaccacgagaaccttaagaacctgtgggtgaaaatcgatcttgacctgctgagccgtgttcccggccacagctcactgcatgcagcccccgccaaacctgaccacaaggagacagctaccaaaccgaagcgccaaacagcggtcaccgccgtggagaaaccggcccctaagggaaaaagaaaacacaagcccatcgaggtcgcagagaaaatacctgaaaagaagcagcgtttagaagaggccactaccatctgccttctgccaccttgtatctcaccagcgccaccgcacaagcctccaaacaccagagagaacaacagctctcgccgggccaacaggagaaaggaggaaaagctctttcctccacccctatcccccctccccgaggatcctcccaggaggcggaatgtgtcaggaaacaatggccctttcgggcaagacaagaacatagctatgacagggcagattacctcaactaagccaaagcgcaccgagggcaaattctgtgcaacattcaaagggatctctgtcaacgaaggagataccccgaaaaaggctagcagtgccacaattacggttactaatacagccatcgccacagccaccgtgacagcgaccgccatcgtaacaaccacagttacagctacggccacagccacggctactactaccaccacaacgactacaattagcactatcacatctacaattacaacaggcttgatggattccagccaccttgaaatgacgagctgggccgccctccccttgttatccagcagctcaactaatgttcggcgcccaaagcttacatttgacgactctgtgcacaatgccgattactatatgcaagaggctaaaaagctaaagcataaggccgatgccttgttcgagaagttcgggaaggcagttaactacgcagatgctgcactgagctttaccgaatgtggtaacgccatggaacgggaccccctcgaggccaaaagtccctacacaatgtactccgaaaccgtagaactgttgagatacgcaatgcggctcaagaattttgcatccccgctcgcaagcgacggtgataagaagctggcagtgttgtgttaccgatgcttgagtttgctgtacctccggatgttcaaattgaagaaagaccatgccatgaaatatagcagaagtctcatggaatattttaaacagaacgcttccaaagttgcccaaatcccttccccctgggtcagtaacggcaagaacacacccagccccgtgagcttaaataacgtgtcccctataaacgcgatggggaattgcaacaacggtccagtgacaatccctcagcgcatccatcacatggccgcgagccacgtcaatatcacttcaaatgtgctgcggggctacgaacattgggacatggcagataagctcacaagggaaaacaaggaattctttggagaccttgatacccttatgggaccgctgactcagcattcttctatgacaaatttagtcagatatgtacgccaaggactttgttggctccgaatcgatgcccacttattatag

SEQ ID NO: 178523 - DNA, 3831 bp, synthetic construct
  misc_feature 1..3831: note = Description of Artificial Sequence: Synthetic coding sequence
  source 1..3831: mol_type = other DNA
atggacctgttcgacttcttccgggactgggacctggagcagcagtgtcattacgagcaggaccgcagtgccctcaaaaaacgggagtgggaacgccgaaaccaggaggtgcaacaagaagacgatctcttctcctctgggtttgatctgtttggggagccttataagaccaacaaaggagacgcccttgcgaacagggtgcaaaataccctgggaaattatgatgagatgaaaaacttgttgaccaaccattcaaaccaaaaccatctggtcggtattcctaaaaatagcgttcctcagaatcctaacaataagaatgagccttctttcttcccagaacagaaaaatcgtattatcccgcctcaccaggataacacccacccgtctgcccccatgcccccgccatctgtggtcattctgaactccactttaatccatagtaaccgaaagtccaaacccgagtggagccgggatagtcacaacccaagcacagtgctggcctcccaggcgtccggccaacctaataagatgcaaacactgactcaagatcagtcccaggccaagcttgaagatttctttgtttatccagctgaacagccacagatcggagaagtagaagaaagcaatcctagcgccaaagaagatagcaatcccaacagcagcggagaggacgcattcaaggagatatttcagtccaattcaccagaagaatcagagtttgccgtccaggcaccgggatctcccttggttgcctccagccttcttgcaccttcatctggactcagtgtgcagaatttcccgccaggattatattgtaagacctccatgggtcagcagaaacccaccgcctatgtgaggcccatggacggccaggatcaggcacctgatataagtcccacactgaagcccagcattgaatttgagaattcttttggaaacctctcatttggcactctcttagacggaaaaccaagcgcggcctcttcaaagaccaaactgccgaaattcacaatcttgcagacttcagaggtgtcactcccttcagacccatcttgcgtcgaggaaatcctccgcgaatctcagcacctgactcccgggtttaccctccaaaaatggaacgaccctaccacgagagcttccacaaagtcagtctctttcaaaagcatgctcgaggacgatttgaagctgagctctgatgaagatgatttggaaccagtcaagacactcacaacccagtgcaccgcaacggagttataccaagccgttgaaaaggctaagccgaggaacaaccccgtgaacccccctcttgcgactccacagccacctcctgccgtacaggcatcgggcggcagcggctcctcttctgagagcgagtcatccagcgagtctgactctgacaccgaatccagcacaacagactcagaatcaaatgaggctccccgagtcgcaacaccagaaccagaaccgcctagtacaaacaaatggcagctggataaatggctcaataaagttacatcccagaataagagctttatatgtggacagaacgagaccccgatggaaaccatctcactgccacctcctattatccagccaatggaggttcaaatgaaggtgaagaccaacgcctcgcaggtcccggccgagcctaaggagcgaccacttctgtcactcattagggaaaaagccagaccaagaccgacccagaaaatcccggagaccaaagctctgaagcacaagctgtctactactagtgaaactgtatctcaacgcaccatcggaaaaaaacagccaaagaaagtcgagaagaatacctcaacggatgagttcacgtggcccaagcctaatataacttcttccactcccaaagaaaaggagtccgtggagctgcatgatcccccacgaggccggaataaagccacagcacacaagccagcgccccgcaaagagccccggcctaatattcccctggccccagagaagaagaaatacagaggcccgggtaaaattgtccctaaaagtagggagttcattgagaccgactcttccacctcagacagtaacacggaccaggaggagacacttcagataaaagtgctcccaccttgcataatctcaggaggaaacactgctaagagtaaggagatctgtggagcgtcgctgactctctcgactctcatgtcatcaagtggtagtaacaacaacctgtcaatttctaacgaggaacctacatttagcccaattcctgttatgcagaccgaaattttatctcccctccgcgaccacgagaatctcaagaatctgtgggtaaaaatcgacctggacttgctgagccgggtaccaggacacagcagcctgcacgctgcaccagccaagcccgatcacaaagagacagccactaagcctaaacggcaaacagcagttaccgccgtcgagaaaccggcccctaaaggcaagcgaaagcacaaacccatagaggtcgctgagaaaattcccgagaagaaacaacgcctggaggaggcaacaactatttgtctcctgccaccctgcatcagcccggccccccctcataagccgcccaatactcgagaaaataactccagcaggcgagcaaacagacggaaggaggaaaagttatttcccccaccactgtcccctctaccagaagacccccccaggagacggaatgtgagtggaaacaacggcccgttcgggcaggacaaaaatattgccatgaccggccaaattacctccactaagcccaaacgaactgagggtaagttttgtgcaacatttaagggtatctctgagggagacacaccaaagaaggctagttcggctaccataactgtgacaaacacagctattgccaccgccaccgtgacagctacagctatcgttacaaccacagttacagctacagcaaccgccaccgcaaccaccacgactacaactacaaccatctccactattactagtacgataacaaccggactcatggattcgagccacctcgagatgacctcctgggcagccctccctctcctgtcaagctccagtacaaacgttcggagaccaaaactgacttttgatgactcagtccataacgctgactattacatgcaggaggccaagaagttgaaacacaaagccgatgcgctctttgaaaagtttggaaaggccgtaaactacgcagatgccgccttgagtttcaccgagtgtgggaacgctatggagagggatccgctggaagctaagtcgccatataccatgtactcagagactgttgaactgctacgctacgccatgagactgaaaaacttcgcttcacctctcgcatccgacggtgataaaaagctcgctgtgttgtgctacaggtgtctgagtttactatatttacggatgtttaagctgaagaaggaccacgccatgaagtattctcgctccttgatggaatatttcaagcagaacgcaagtaaggtagcccaaattcctagcccctgggtgagcaacgggaagaacaccccatcccctgtgagtctgaacaatgtctcccctatcaatgcaatgggtaattgtaacaatggtcctgtcactattccccaacgcattcatcacatggcggcaagccatgtaaacattacaagcaatgtcctccgcggctacgagcattgggatatggcagacaaactgactagagagaataaagaattcttcggcgacctggatactttaatgggacctctgacccagcacagctccatgacaaaccttgtgagatatgtgcgacagggcttgtgttggctacgaattgatgcacacttgttgtag

SEQ ID NO: 178524 - DNA, 1284 bp, synthetic construct
  misc_feature 1..1284: note = Description of Artificial Sequence: Synthetic coding sequence
  source 1..1284: mol_type = other DNA
atggacctgttcgacttcttccgggactgggacctggagcagcagtgtcactacgagcaggacagatctgccctgaagaaacgcgagtgggagaggcgcaaccaagaggtccagcaggaggatgacttattctccagcggcttcgatttgtttggcgaaccgtacaaaaccaacaagggcgatgcactggcaaaccgcgtacagaataccctgggtaactacgacgagatgaagaatctcctgactaatcatagcaaccagaatcatttggtcggaatccccaagaactccgtgcctcaaaaccccaataacaaaaatgagccatctttctttccagaacagaaaaatcgtatcattccaccccaccaggataacacccacccaagcgctcccatgcctccaccaagtgtggttattttaaattctacattaatccactctaaccggaagagcaaaccagaatggagtagggattcacacaacccctcaacagtgttagcatcccaagcatccggacaacctaataaaatgcaaacattaactcaggatcaatctcaggccaaacttgaagatttcttcgtctaccctgctgagcagcctcaaatcggggaggtagaggagagtaacccctccgcaaaggaagatagtaatcccaacagcagcggtgaagacgcattcaaagaaatattccagagtaactccccagaggagtccgagtttgcagttcaggcccccgggtcaccccttgtagcatcaagcttgttggctccatcgagtggcctgtcagtgcaaaatttccctcctggcttgtattgtaagacaagcatgggccagcagaagcctaccgcttacgttcgacctatggatggccaagaccaggctcctgacataagtccaactctcaagcctagcatcgaattcgagaacagctttggtaacctaagcttcggtactctcctggatggcaagccatcggctgcttcctctaagacaaaactgcctaaattcaccatcctgcaaacgagcgaggtgagcctaccctccgacccttcttgcgtggaggagattctgcgtgagtcacaacatttgactcccgggttcaccctacagaagtggaacgatccaaccaccagagccagcacaaagatgctggaagacgacctgaagctgtcctcagacgaggatgatttggagcccgtgaagactctcacaacacagtgtacagcaaccgagctgtatcaagcggtcgagaaggccaagcccaggaacaacccagtcaaatag

SEQ ID NO: 178525 - DNA, 3936 bp, synthetic construct
  misc_feature 1..3936: note = Description of Artificial Sequence: Synthetic coding sequence
  source 1..3936: mol_type = other DNA
atggacctgttcgacttcttccgggactgggacctggagcagcagtgtcattacgagcaggaccggagcgcacttaagaaaagggaatgggaacgtcgcaatcaggaagtgcagcaggaggatgacctgttttccagcggctttgatttgttcggagagccttacaaagtcgccgaatataccaacaaaggggacgctctcgccaatagagtgcagaataccctgggtaattatgacgagatgaagaatctcctgactaaccattccaaccaaaatcatctcgtggggatccccaagaacagcgtcccccagaatccaaataataagaacgaacctagcttttttccggagcagaaaaataggatcattcccccacatcaggacaatacacacccttctgcaccaatgcccccccctagtgtggtgatcttaaacagtacactcattcatagcaatagaaagtcgaagcccgagtggtcacgcgattctcacaacccttcaacagtgttggcaagccaagcaagtggccagcccaacaaaatgcagactttaacacaggaccagagccaggctaaactagaagactttttcgtctaccccgcggagcagccacagattggcgaggttgaagaatctaacccttcggccaaggaggactccaatccgaatagctccggggaggatgccttcaaggaaatcttccaaagtaacagccccgaggagtccgaatttgcagtgcaggcccctggctcgccactggtggcatcgagtcttttggcgcctagcagtggactgtccgttcagaactttccacctgggctctactgcaagacgagtatgggacagcaaaaacctacagcttatgtgcgtccgatggacgggcaggatcaggccccggatatcagcccaacactcaagccgtctatagagtttgagaactcctttggtaatttatccttcggcaccttattggacggtaagcccagtgctgcttcttccaagacgaagctgcccaaatttacaattctgcaaacgtcggaagtgagcctgccaagcgatccctcctgtgtagaggagattctccgtgaaatgacccattcctggcccaccccgctgacctcaatgcatacagcaggccattctgagcaatcaactttctcaattcctggacaagaaagccagcatcttacaccaggattcacacttcaaaagtggaacgatccgacaacacgggcgtctacaaaaagtgtgtcatttaaaagcatgcttgaggacgaccttaagctgagcagtgacgaggatgacctggagcctgtcaaaactcttactactcagtgcactgctaccgaactatatcaggccgtggaaaaggccaaacctcgcaataacccggtgaatccacctttagcaactcctcaaccaccccctgcggtgcaggcatcaggaggatcaggctcgtcctccgagagtgagagtagctccgaaagcgattctgacaccgagagctctaccacagattctgagtcgaacgaggccccaagagtcgccacaccagaacccgaacccccaagtaccaacaagtggcagttagataaatggcttaacaaggtcacttcccaaaacaagagttttatctgtgggcagaatgagactccaatggagaccatcagtctaccgcccccaatcatccaacccatggaagttcaaatgaaggtcaagaccaatgcgagccaagtgcccgcagagcccaaggagcgaccgctgctgtcgctcattagggagaaagccagaccacgacccacacagaagatcccggagactaaagctctaaagcacaaactgtctacgacaagtgagaccgtgagccagcggacgatcggaaagaaacagcctaaaaaagtcgagaaaaacaccagcacagacgaattcacctggccaaaaccaaacattaccagcagtaccccaaaggagaaggaaagtgtggagctccacgatcccccccggggccgcaacaaagcgaccgctcacaaaccggctccacgcaaagagccgcggcccaacatacctctggcccctgaaaagaaaaagtacaggggaccaggcaaaatcgttcctaaatcccgcgaattcattgagacggacagcagtacttcagacagcaatactgatcaagaagaaacgctgcagattaaagtattaccgccctgtattatcagtgggggcaacacagccaagtccaaggaaatctgtggcgcgtcgttgaccctgtcgaccctgatgtctagttctggttctaacaataacctgagtatctccaacgaagagcccacattcagccccatccccgtcatgcagacggagattctatcccctttgcgcgaccacgagaacctgaagaatctgtgggttaagattgatttggacctgctttcgagagtaccagggcattcttcgctgcacgccgctcctgccaagccggaccataaggagacagcgacgaagcccaaacgacagacggcagtgaccgccgtggaaaagccggcccccaagggtaagcggaagcataagccaatagaagtggccgagaaaattcccgagaagaagcagaggctggaagaagcaaccaccatctgcctgctccccccgtgcatttcaccagcaccgccacacaaacctcccaatacaagagagaataactcatctaggcgtgcgaaccggcggaaagaggaaaagctgttcccaccccctctttctccactgcccgaagacccgcctagacgaagaaacgtgagcggtaataacgggccattcggccaagacaaaaacattgcaatgaccggccaaatcacctccacgaagccaaaaaggactgagggtaaattctgtgccacctttaaaggtatctcagtcaacgaaggcgatacacccaaaaaggcctcttccgccacgattactgtaacaaacaccgccatcgcaaccgcaactgtaactgcgactgctatcgtaacgaccacagtgactgccacagcaacagcaaccgctaccactaccaccacaactacaactatttcaacgattacctcaacaattacaacgggcctgatggattcctctcacctggaaatgacctcctgggcagccctcccccttctgtcaagtagcagcacaaacgtccggcgccccaagttaacattcgacgacagcgtccataatgcggactactacatgcaggaagcaaaaaagctcaagcacaaagctgacgccctgttcgagaagttcggaaaggccgtcaactatgctgacgcggccctgtccttcacagagtgcggcaacgctatggaaagggatccattagaggccaagtccccatacactatgtacagcgagaccgtggaactattgcgatacgccatgcgtttgaaaaacttcgccagcccactcgccagtgatggcgataagaaactggctgtattgtgttaccgttgtttatcacttttgtacctgcgtatgttcaaactgaagaaagaccatgccatgaagtattctcgttccctaatggaatacttcaaacagaacgcttccaaggtggctcagatcccctccccctgggttagcaatggcaaaaatacccccagtccagtgtccttgaataatgtgtcccctattaacgcgatgggcaactgtaataacggtcctgtgactattccccagaggatccaccatatggctgcaagccatgtcaatatcacatctaatgtgctgagaggttatgagcactgggacatggcagacaaacttacaagagagaacaaagaattcttcggagaccttgataccctgatggggccactgacccagcacagttccatgacaaatcttgtaaggtacgtgcgacaaggactctgctggctgcgcatcgatgctcacttactgtag

SEQ ID NO: 178526 - DNA, 1410 bp, synthetic construct
  misc_feature 1..1410: note = Description of Artificial Sequence: Synthetic coding sequence
  source 1..1410: mol_type = other DNA
atgagcgccctgaccccccccaccgacatgcccacccccaccaccgataagataactcaggccgctatggaaactatttatctgtgtaagtttcgagtgagtatggatggcgagtggttgtgtctacgggagctggacgatataagtctcacgccggatcctgaacctactcacgaggacccaaactacctgatggccaatgagagaatgaacctcatgaatatggctaagttatcaatcaagggcttgatcgagagtgcgctgaacttggggagaactctcgactctgactatgcccccctgcagcaattcttcgtggtgatggagcactgcttgaagcacggactgaaggcaaaaaagacattcttaggacagaataaaagtttctggggaccactcgagctggttgaaaagctcgttcctgaagctgcggaaataactgcctctgttaaagacctgcccgggttaaaaacccccgttggacgggggagagcctggttgcggttggctctaatgcagaaaaaactctctgagtatatgaaggctctcattaataagaaggaactcctgagcgagttttatgagccaaatgctttgatgatggaggaagaaggggcaataatcgcaggcctgctggtgggccttaatgtcatcgacgctaatttttgcatgaagggggaggatttagatagccaggtcggggtgattgatttctctatgtacctgaaggatggaaattctagtaaggggacagaaggagacgggcagattactgcaattctcgatcagaagaattacgtggaagagcttaatcgtcatttaaacgccaccgttaataacttacaggccaaagttgacgcgttggaaaagtccaatacaaaactgaccgaggaactggctgtggctaataacagaattatcaccctccaggaggaaatggaaagagtaaaagaggaatccagctatattctggagtcaaacagaaaaggaccaaagcaggatagaacggccgaaggtcaggcgctgtctgaggccagaaaacatttaaaggaggagacacagctgagactcgatgttgagaaagaactggaaatgcagatctcaatgaggcaggagatggagcttgctatgaagatgctggaaaaagatgtgtgcgagaagcaggacgcgctggtatcccttcgccagcagctcgacgaccttcgggctttgaagcacgagctcgcattcaaattgcagtcaagtgacttgggcgttaaacagaaaagtgagcttaactctcggctcgaggaaaagaccaatcagatggctgccactataaaacagttggagcagtcggaaaaggatctggttaagcaggctaagaccctgaatagtgccgcgaataagcttattcccaagcaccactag

SEQ ID NO: 178527 - DNA, 2394 bp, synthetic construct
  misc_feature 1..2394: note = Description of Artificial Sequence: Synthetic coding sequence
  source 1..2394: mol_type = other DNA
atggcccaccggtgcctgcggctgtggggccggggcggctgctggcctcgcggcctacaacagttactggttcccggaggagtcggacccggcgagcagccttgcctgcgcaccctgtacaggttcgtgacaactcaggcgagagccagtagaaattccttgcttacagatattattgcagcctatcagagattttgctctcgcccacccaaagggtttgaaaagtactttccaaatgggaaaaacggaaaaaaggccagcgaacctaaggaagtgatgggagagaaaaaggagtcgaagccagcagccaccacgcgatcctctggtggggggggtggaggtggtggaaagcgcggcggaaagaaagatgatagccattggtggtccaggtttcagaaaggcgacataccctgggacgataaagacttcaggatgttctttctttggacggccctcttctggggcggcgtcatgttttatctcctgttaaagaggtctggtagggaaatcacgtggaaggactttgtgaataattacttgagtaaaggcgtggtggatcgcctggaggtggtcaacaagcggtttgtcagagtgacattcacccccgggaagacaccagtggatggacagtatgtttggttcaatatcggaagcgttgatacctttgagagaaacctggaaaccctgcagcaggagctgggcattgagggcgagaatcgggtccccgtggtctacattgcggaatctgatggatcttttctgctctcgatgctcccaaccgttctcataatcgccttcctgctgtataccattcgccgcggcccggcaggtataggccgaaccggccgagggatggggggactgttttcggtcggtgaaaccactgcaaaggtgctaaaagacgagattgatgtgaagttcaaagatgtcgctggatgtgaggaagctaaacttgagatcatggagttcgtcaactttctgaagaaccctaagcaataccaagacctgggcgcaaaaataccaaaaggcgcaatccttactggtccacccggtacaggaaagactttgttggccaaagccaccgccggtgaggctaatgtaccattcataaccgttagtggttctgaatttctcgagatgtttgtcggtgtgggaccagcacgcgtacgggacctgttcgcactcgcccgcaagaatgcaccatgcatactttttattgacgaaatcgatgccgtgggaaggaagaggggacgggggaacttcggcggacagagcgaacaggaaaatacactaaatcaactcctggtggagatggacggcttcaataccactactaatgtagtaatccttgccgggacaaaccgacccgatattctcgaccccgccctactgcgtcctggaagattcgatcgccagatctttattgggcccccagatatcaaggggcgcgccagtatcttcaaagtacatctgcggccgctgaagttggattctaccctagagaaggataaattggctcggaagttggcatcactcacccccgggttttccggcgccgatgtagcaaatgtgtgcaatgaggccgcccttatcgccgccaggcacctctctgattcaataaaccagaaacatttcgaacaggccatagagagagtaataggaggactggaaaagaaaacccaggtattgcaacctgaggagaaaaagactgtggcatatcacgaagcgggtcacgccgttgccggctggtatcttgaacatgccgacccactgctaaaggtatccatcatcccccggggaaagggcctcggctatgctcaataccttcctaaagagcagtatctctatactaaagaacagttgctggaccggatgtgcatgacactcggaggtagggtatcagaggagatttttttcggacggattaccaccggagcgcaagacgatctgcggaaggtcacccagagcgcttatgctcagatagttcagtttggaatgaacgagaaagtgggccaaatatctttcgacttgcctaggcagggggatatggtgctggaaaagccatactctgaggccaccgcccgcttgatagacgatgaagtgagaatacttatcaatgatgcttacaagcgcaccgtggccttgctaacagaaaaaaaagcggatgtggaaaaggtagcactcttgctcctcgagaaagaagtcctagacaagaatgatatggtcgagctcttgggcccccgacccttcgccgaaaagtcaacctatgaggaatttgttgagggtaccgggtctcttgacgaggataccagcctgccagaagggctgaaggactggaacaaagaaagggagaaggaaaaggaagagccccccggcgaaaaagtcgcaaattag

SEQ ID NO: 178528 - DNA, 2439 bp, synthetic construct
  misc_feature 1..2439: note = Description of Artificial Sequence: Synthetic coding sequence
  source 1..2439: mol_type = other DNA
ggcgccggcggccggcggcggcgggtggagagcctgggcagcagcgtgtcacgccggagagcttccttgcctgggggtttaagccctagtcgggccaggtttccacgaccaccagtcgtggcttgtcccagacttcgcgagcagccatgcctcagaactctgtatagatttgtcacaacccaggctcgtgcatcaaggaacagccttctgactgatatcatcgccgcttatcagaggttttgctcgaggccacctaagggttttgagaagtactttccgaatggaaagaatggaaagaaagctagcgaacctaaagaggttatgggtgagaaaaaggagtctaagcctgctgcgaccacccgttcatccggcggggggggcgggggaggcgggaagagaggtggcaagaaagacgacagtcactggtggtctcgcttccagaagggagacattccttgggatgataaagactttaggatgttctttctgtggacagccctgttctggggcggcgtgatgttctacctacttctgaagcgaagcggcagagagatcacctggaaagatttcgtcaataattatttatctaagggcgtagtggaccgactggaagttgttaataagcgattcgtgcgggtaacattcacacctgggaaaacacccgtggatggccagtatgtctggttcaatattgggtctgtggacacgtttgaaagaaacctggagactctccagcaagagctggggattgagggtgagaatagggtgcctgtggtgtatatagctgaatcagatggcagtttcctgctatccatgcttcctactgtcctgatcattgctttcctgctgtataccattagacgtggccccgcagggattggcagaacaggcagggggatgggtgggcttttcagtgtaggggaaacaactgccaaggtacttaaggacgagatcgacgtaaagttcaaagatgtggccggatgcgaagaagccaagttagagatcatggagtttgtcaattttctgaaaaatcccaaacagtatcaggacctgggcgcaaagatacccaaaggagctatcctgacaggaccacccggtactggaaaaactctactggctaaggctacagccggggaggctaacgtcccatttatcacggttagtgggagcgagttcctggaaatgtttgtcggggtgggaccagctagggtgcgcgacctgttcgctctagccaggaagaatgctccctgcattctgttcatcgacgagattgatgccgtgggtagaaaaagggggagaggcaactttgggggacagtctgagcaagagaatacccttaatcaacttcttgtggagatggacgggtttaatacaacaactaacgtcgttatcttagctggcaccaatcggcccgatatcctcgatccagcgttactgaggcctggaagatttgaccggcagatttttatcgggcctccagatatcaagggcagggctagcatttttaaggtgcatctgagacccctgaagctagactctactctggagaaagacaagctcgcacgaaaactggcatccctgactcccggcttctccggagccgacgtggcaaacgtgtgcaatgaagctgccctgatcgcagctagacacttatccgactctatcaatcagaaacattttgagcaggccatagagcgggtgattgggggcttggagaagaaaactcaggtcctccagcccgaagagaagaagactgtggcctaccacgaagccgggcatgctgtggcaggctggtatctcgagcatgcagacccccttctgaaagttagtatcataccaagagggaagggcctcggttatgcccagtatctaccaaaagagcagtacctgtatacaaaagaacagctccttgaccgtatgtgcatgacattagggggccgggtatcagaggaaattttctttggacggatcacaaccggcgctcaggatgatctgagaaaggtgacacagagtgcttacgctcagatcgttcagttcgggatgaacgaaaaagtcggccagatatccttcgatcttcccaggcagggcgacatggttcttgagaaaccgtacagcgaagctacggccaggctaatcgacgacgaggtgcgaatactcattaatgacgcatacaagagaacagtggctctgctgaccgagaaaaaggccgacgtggaaaaagtggcgcttctcctgttggagaaggaggttctcgacaagaacgacatggtggagctgctgggccctcgtccattcgctgagaagtcaacctatgaggaattcgttgaaggtaccggctcactggacgaagatactagtctgcctgaaggattaaaggactggaacaaagagagggagaaggagaaagaggagccgcctggagagaaagtcgccaattag

SEQ ID NO: 178529 - DNA, 7251 bp, synthetic construct
  misc_feature 1..7251: note = Description of Artificial Sequence: Synthetic coding sequence
  source 1..7251: mol_type = other DNA
atgaccaccctgctgtgggtgttcgtgaccctgcgggtgatcaccgcagctgttaccgtcgaaacatcagatcatgacaactccctgtcagtcagcatcccccagcctagcccgctgagagtgttgctgggcaccagtctgaccatcccatgctactttatcgacccaatgcacccagtgacaacggccccatccacagccccgcttgctcctcgtattaagtggtccagggtgtctaaggaaaaggaagtggtgttactggtggccacagaagggcgagtcagggtgaatagcgcataccaggataaagtgtcccttccgaattacccagcaattccgtccgacgccaccttggaggtgcaatcattgcgcagtaacgattctggcgtgtaccgttgtgaggtcatgcacggaatcgaagatagcgaggccactctggaagttgtagtgaaaggtatcgtgttccattatcgcgcaattagcactagatacactcttgatttcgatcgggcccagcgagcctgcctccagaattctgcaatcatcgcgaccccagagcagctgcaggccgcttacgaggacggttttcatcagtgcgatgcaggttggctggctgaccagaccgtgaggtatccaattcatacaccccgcgaaggatgttacggcgataaagatgagttccctggcgtgcgaacctatggtatcagggacaccaacgagacttatgatgtatattgtttcgctgaggagatggagggcgaagtattctatgctactagccctgagaaattcaccttccaggaagcagctaacgagtgccgacgtttgggcgcaaggctcgctacaacaggccagctttacctggcttggcaggccggtatggacatgtgtagtgccgggtggctagccgaccggagtgttagataccctattagcaaagcacgcccaaattgcggaggcaacctgttgggagtgaggactgtgtatgttcacgccaaccagaccgggtatccagacccatcaagccgatacgatgccatttgctacaccggtgaggatttcgtggatatcccagagaatttctttggagtgggcggggaggaagacattactgtccagacggtgacctggccagatatggaattaccccttccacgcaacattactgaaggggaagccagagggagcgtgattctgaccgtgaaacccatatttgaagtttctccaagcccattggaacctgaggaaccgtttacgtttgctcccgagattggcgccacggcttttgcggaggtagagaacgaaaccggcgaggccacccggccttggggattccccaccccgggcctgggcccggccacagctttcactagcgaggatctggtggttcaggtcactgcagttcctgggcagccccatcttcccggtggcgtcgtgttccactaccgaccaggcccgactaggtacagcctgacattcgaggaagctcaacaggcgtgccttcggaccggggctgtgatcgcaagtcctgaacagttgcaggccgcttacgaagccggatacgagcagtgcgatgctgggtggctgcgcgaccaaacagtgcgttatcccatcgtatccccacgaaccccgtgcgtgggtgacaaggactcatctcccggagtgcgcacatacggagtacgcccgtccactgagacctacgatgtctactgttttgtagaccggctggaaggcgaagtgttctttgcgaccagactggagcaattcaccttccaggaggcactcgaattctgcgagagccacaacgctacgctggctaccacaggccaactctacgccgcttggagcagaggcctggacaagtgctatgccggctggctcgccgatggcagtctgaggtatcccatcgtgacgccccggccagcctgtgggggagacaagcccggtgttcggaccgtgtacctgtatcccaatcagacgggcctgcccgatcctttaagccgtcaccacgccttctgtttccggggcataagcgctgtccctagccccggagaggaggagggtggcactcctacttccccttctggagtagaggaatggatcgttacccaggttgtgccgggcgtggccgcggtccccgtagaagaagagacaactgcagtgccctccggcgagacaactgccatactggagtttacaaccgaacccgagaaccagactgagtgggaacctgcctacacacccgtgggcacatccccgctgccagggatcctcccaacatggcctccaacaggagccgctaccgaggaatcgactgagggcccctccgcaaccgaggttcctagcgcaagcgaggaaccttctccgagcgaggttccctttccctctgaggaacctagcccctcagaagagcccttcccatcagtgagaccttttccatccgtagaattgtttccaagcgaggaaccatttcccagtaaggaacccagcccgtcggaggagccaagtgctagtgaggagccttatactccgagtccgcctgtcccctcttggacagaactgcctagtagcggagaggagtccggggcgccggatgtgagtggtgacttcacgggaagtggcgacgtttctgggcaccttgactttagcggccagctgtcaggcgatcgcgcctctggtttgccgagcggggatctcgactctagcgggttgacctctaccgtcggctctggcttacccgttgaaagtgggttgccgtccggtgacgaagaaaggatcgagtggccctctactccgacagtcggcgagctgcccagcggcgcagagattctagaaggctccgcaagtggcgtcggggatcttagcggcttgccatcaggcgaagtcttggagacctcagcctccggagtaggcgatctgtctggtctgccgagtggagaagttcttgagacgacagctcccggcgtcgaggacattagcggtcttccgtctggcgaagtgttagaaaccactgctccaggagtggaagacatatcgggactgccttctggggaggttctggagaccaccgctcccggcgtggaggacattagcggccttccttccggagaagtgttggaaacaaccgccccaggcgtggaggacatttccggcctgccttcaggtgaagttctcgaaacgacagcaccaggcgtggaggacatctctggtcttccgagcggtgaggttctcgaaaccgccgctccgggtgtagaagacatcagcggattgccaagtggggaagtgttggaaaccgcagcacccggcgtggaggacatcagcggcctgcccagcggggaggtgcttgaaacagccgccccgggggtggaggacatcagcggcctgccttccggggaggtgttagagaccgccgcgcctggcgtggaggatattagcggactccctagtggggaggtgctagaaaccgccgcccctggagttgaagatatatctggtttacctagcggggaggtcctggagactgccgcccccggcgtcgaggacatttcaggactgccctccggggaggtcttagagactgccgctcccggggttgaagatatcagtggattgccaagcggcgaagtactggaaactgcagctcctggcgtggaggatatctcaggactgcccagtggggaggtgctcgagaccgccgcacctggcgtcgaagatatctcgggactgccttcaggcgaagtgctcgagactgctgcacctggtgtggaagatatctctggccttccttccggtgaggtgcttgagactgccgcccccggcgtcgaagacattagcgggctgccctccggggaggtgctggagactacagcaccgggggtggaggagatctcaggcttgcccagcggcgaggtgcttgaaactactgcacctggtgtggatgaaatttctgggttacctagtggcgaggtcttggagactactgcaccaggtgtcgaagaaatcagtggcctgccttcgggggaagtactggaaacttctacttctgctgtcggcgacctcagtggattaccttccggcggtgaggtcctggaaattagcgtctcaggcgttgaggacatcagcggccttccaagtggggaagtagttgagacatctgcttccggcattgaagacgtgtccgaacttcccagtggcgaagggctggagacctccgctagtggtgtcgaggatctcagtcggttaccctcaggcgaggaggtgttggaaatttcagctagtggctttggcgatcttagtgggttgccgtcaggcggagaaggtctcgagacctcagcctccgaggtcggaacggacttgagcggactgccatctggacgggaaggcttagagaccagcgcgagtggggcagaggacctgtccggccttccaagcggcaaggaggatttggtcggtagtgctagtggtgacctggatctggggaaacttcccagcggaacattaggatcaggccaagctcccgagacgtccggactcccaagcgggttcagtggcgaatattcaggagttgacttgggctccggacctccttccggactgccagatttctcgggccttccatcagggttcccgactgtgtctctcgtggattcaacactggttgaggtggtcacagcaagcaccgcttctgaactcgagggaaggggtacgatcggtatctccggagcaggggagatatcaggactgccttccagtgaactggatatctcaggaagagcctccgggctgcccagcggcactgagctgtctggacaggctagcggcagtccagatgtatctggagaaataccaggcttgttcggggtgtcggggcagccatcaggattcccagatacttccggcgagacctccggcgtgactgaactgagcggtctgagtagcgggcagcccgggattagcggcgaagccagtggagtgctgtacgggacttcccagccgttcggtatcaccgacctgtctggagagacctctggtgtacctgatttgagcggtcagccgtctggtctgcccggcttttccggtgctacgtccggggtgcccgacctggtgagcggcaccaccagcgggtctggtgagagctccggcatcacctttgtcgataccagcttggttgaggtcgctccaacaactttcaaagaggaagaggggctgggaagtgtcgagctgtccggtctgccaagtggtgaagctgatctgtcgggaaagtcaggcatggtggacgtgtccggccagttctcggggacagtcgattcctcagggttcacatcgcagacccctgagttctccggcctgccaagcggcattgctgaggtgagcggcgaatcttcccgagccgagatcgggtcttctttaccctcaggagcttattacgggtctggaacaccaagctcgtttccgactgtgtccttggtggaccgcacccttgtcgagtccgtgactcaggccccaaccgcccaggaggcaggcgaagggccctctggaatccttgagctcagcggggcgcacagcggagcccctgacatgtccggtgagcatagcggattcctggacttgagcggcctgcagagcgggcttatcgagccttctggagaaccaccaggaaccccttacttctctggagattttgcctctactactaacgtgagcggcgaatccagcgtcgctatgggaacatccggggaggcatccggcctccccgaggtgaccttgattacctccgaattcgtcgagggcgtgaccgagccaaccatttctcaggaactagggcaacggccgcctgtgacccacactccgcaacttttcgaaagtagtggcaaggtgtcaacagccggcgatatatctggcgcaactcctgtgctccctggtagtggcgtcgaggtctcgtccgtgccagagtcttcttcagagacttccgcttacccggaggctggcttcggagccagtgccgccccagaagcttctcgcgaagactctgggtctcccgatctctctgaaaccactagtgctttccacgaggccaacttggagcgcagcagcggcctcggggtgtccgggtcaactctgactttccaagagggggaggcctccgccgcaccagaggtgtctggcgagagcaccacaacctctgatgtcggtaccgaggcccctggattacccagcgcaacccccactgcgtcaggggacagaacagaaatttccggggatctgagcggccacacttcccagcttggagtggtgatatctacctcaattccggagagtgagtggacccagcagacccagagacctgccgagacccacctggaaatcgagagcagttccctcctctactctggcgaggaaacacacacagtggaaaccgccacgagccctacggatgccagcatccctgcctctcctgagtggaagcgtgagagcgagtctaccgctgccgcccccgcccggtcatgcgccgaggagccctgtggcgctggcacatgtaaggagaccgaagggcacgtgatctgcttatgcccccctggatacacaggagaacattgcaacatcgaccaggaggtgtgtgaggaggggtggaataaataccagggccattgctatagacacttccctgatcgcgagacgtgggtggacgctgaaagacgatgtagagagcagcagtctcatctctcaagcatcgtgactcccgaggagcaggagttcgttaacaataacgctcaagattatcagtggatcggcttgaacgataggacgatcgagggagacttccgttggagtgacggccaccccatgcagtttgaaaattggcgaccaaatcagcccgataactttttcgccgccggagaggattgcgtggtcatgatctggcatgagaagggggaatggaatgatgtgccttgtaattaccacctgccattcacttgcaaaaaagggaccgtggcctgcggtgagcctcccgtggtggaacatgcccgaacattcggacagaagaaggaccggtacgaaattaattccctggtgagataccagtgtaccgagggtttcgtgcagcgccacatgcctaccattagatgtcagcccagtgggcattgggaagaacctcagatcacttgtaccgatccaaccacatacaagagacgcctccaaaagagatcctcacgccacccgagacgtagccgcccatcgacagcccattag

SEQ ID NO: 178530 - DNA, 7296 bp, synthetic construct
  misc_feature 1..7296: note = Description of Artificial Sequence: Synthetic coding sequence
  source 1..7296: mol_type = other DNA
atgaccaccctgctgtgggtgttcgtgaccctgcgggtgatcaccgctgccgtgaccgttgaaacaagcgatcacgataattctctctccgttagcatcccccagccatctccactgagggtcctgttgggcacatctttgacgatcccttgctacttcattgatccaatgcatccagtcaccacagcaccgagtaccgctccattagctcccagaatcaaatggtctcgggtcagtaaagaaaaagaagtcgtgttgctggttgcaactgagggtcgcgtgcgcgtcaattccgcataccaggataaagtgtcattgcctaactacccagccattccctcagacgctacccttgaggtccagagcctgcgctccaacgacagtggtgtgtatcgttgcgaagttatgcacggcatcgaagatagtgaggcaacgttggaggttgtagtgaaagggatcgtgttccattatcgggcgatttccacccggtatacattagatttcgatagggcacagcgggcttgtttgcagaatagcgctatcatcgctactcccgagcaattacaagcagcctacgaggatggtttccaccagtgcgacgctggatggctcgctgatcaaacagtccgataccccattcacacaccgagagagggctgttatggagataaggatgaattcccaggcgtgagaacctacggaatacgagacacaaacgagacctacgacgtatactgctttgccgaagagatggagggcgaggtcttttacgcaacaagcccagaaaagttcacctttcaggaggctgctaatgagtgtcgaagactgggagcccggctcgccaccacaggccagctgtacctcgcatggcaagcgggtatggatatgtgtagtgccgggtggctggcagaccgcagtgttagatatcccatatctaaggcaaggcctaattgtggcggaaacttattgggcgtgcgcacagtgtacgtccatgccaaccagacagggtacccggatccttcctcaagatacgatgccatatgctacacaggggaagattttgtagatatccccgagaatttcttcggcgttggaggcgaggaagacatcaccgtgcagaccgttacttggccagatatggagctgccactcccaagaaatatcaccgagggcgaggcccggggatcggttatcctgacagtgaaaccaattttcgaagtgagcccatcccctctggaacctgaagagcccttcactttcgcccccgaaatcggtgcgaccgcgtttgcggaagtcgaaaatgagaccggagaggccacaaggccctggggctttcccacccctggacttggcccagctacagcattcaccagtgaggatcttgtcgtgcaggtgacagccgtgccaggacagcctcacctgccaggtggcgttgtgttccattaccgccccggtccaacccggtatagcttgacctttgaggaagcccaacaggcttgcctgcgcacaggggctgtgatagccagcccagagcagcttcaggctgcctacgaagccggatatgagcagtgtgatgccggttggctacgggatcagaccgttcgctaccccattgtctcaccccgtacaccttgcgtgggagataaggacagtagcccaggtgtgcgtacctacggtgtccggccaagcaccgagacctacgatgtgtattgctttgtggatcgtctggaaggagaggtcttctttgcgactaggctcgagcagtttacattccaggaagccctagaattttgtgaatcccataacgctacgctcgccaccacaggccagctctatgccgcctggtcaaggggcctcgacaagtgctacgcagggtggcttgccgacggatccctgcgctaccctatcgtaacccctcgacctgcctgcggaggggacaaacctggagttaggacggtgtatctctatcccaatcagaccggcctgcctgatcccctgagtcgacaccacgcattttgttttagaggtatatccgcggtgccctccccaggagaggaggaaggtggaacacctacaagcccttctggagtggaggagtggatcgtcacccaggttgtgccaggcgtggcagccgttccagtcgaggaagagaccaccgcagttccctccggggagactacagccatactggaattcacaacagagccggaaaaccaaaccgaatgggaaccggcctacacacctgttggaacatcacccctgcctggtatcttgcctacctggccacctacgggtgcggcgaccgaggaaagtacagagggtcccagtgcaacagaggtgccatcagccagcgaggagcctagcccgagcgaggtgcccttcccgagtgaagagccatccccttccgaggagccattcccctctgtgcgtccgttcccaagtgttgagctgttcccatctgaggaaccgtttccgtcaaaagagccttcacctagtgaggagccctcagcctctgaggaaccctatacaccttctccccccgtgccatcttggaccgaactgccttcaagcggcgaagaatccggagcacccgatgtgagcggggacttcaccgggtccggagacgtctccggacacctcgacttcagtggtcagctcagcggcgatcgagcctcaggactgccatctggagacctggacagttctggccttacaagcacagtgggtagcggcttgccagtcgaatccggactccctagcggtgacgaagagagaatagagtggcccagtactccgaccgtaggagagctcccctccggcgctgagattctagagggatctgcaagtggggtcggcgaccttagcggtcttccttctggtgaggtgctagaaacatccgcctctggcgtgggcgacctcagcggtcttccttccggcgaggtactcgagacaacagcgccgggcgtcgaagacatcagcgggctcccatccggggaagtactggagacaacagcccctggtgtggaggatatttccggcttaccatcaggtgaggtgttagagaccaccgcccctggcgtggaagatatatccggtttgccaagcggagaggttcttgagacaacagctcccggtgttgaagatatcagcggactgcccagcggggaagtcctggagaccaccgcgccgggcgtggaggatatttcgggtcttccttccggtgaggttcttgagactacggccccgggcgtcgaagatatttctgggctgccatcgggcgaggtattggagacggcagcgcctggcgtcgaagatatctccggactgccaagcggcgaggtgctcgagaccgctgccccgggcgtcgaggacatttctggcctgccctctggggaggtccttgaaacagctgcaccaggagttgaggacatctcgggcctgccgagcggggaggtcttagagacagcggcgcctggagtagaagacatttccggcctaccaagtggcgaagtcctggagactgcagctcccggcgtggaggatataagtggtttacccagcggcgaagtgcttgaaacagcggcccctggggtggaggacatctctggactgccttcaggcgaggtgctggagaccgctgcgcccggtgttgaggatatcagcggactgccctccggagaagtgctcgagaccgctgcgccaggggtcgaggatatttccggacttccatccggagaagttctggaaaccgcagccccaggcgttgaagacatcagcggtctgcccagtggtgaggtgcttgaaacagcagcacctggagtggaggacatttcaggcttaccaagcggagaggtgctggaaaccgcagcccctggggtcgaagacatttctggtttaccatccggtgaagtccttgaaacggcagccccaggggtggaagacataagcgggctgccaagcggcgaggtgctggagacagctgctcctggcgtggaagacataagcggattgcccagcggcgaggtgctggaaactgcagccccgggcgtagaggatataagtggactgccaagcggggaagttctggaaacagccgcccccggagtcgaagatatatccggactcccatctggggaggttttggaaaccgcggcaccgggagttgaggatatttccggactgccgtcaggggaagtcctggagaccaccgctccgggcgtggaggagattagtggcctcccgagcggcgaggtgctggagactactgcccctggtgtcgacgaaattagcggtctcccatctggcgaggttttggagacgaccgccccgggtgttgaagagataagcgggctcccgtctggagaggtgctggaaaccagcacctctgcggtcggtgacttgagcggactgccctctggaggagaggtgttggaaatctctgttagcggagtcgaggacatatccggtctcccatccggggaagtggtcgaaacaagcgctagcggcattgaggacgtcagcgagcttcctagcggagagggcctggagacatccgcctcgggcgtggaggacctgagccggctgccaagcggagaagaggttcttgagatcagcgcgagcggctttggggacctatctgggctgccatcaggtggtgagggactggagacatctgccagtgaagtcggaacggatctgtccgggctgcctagcggaagagagggcttggaaacgtcggcctccggggccgaggacctctccggccttccatccggaaaggaggacctagtggggagtgcctccggggacttagatcttggcaagttgccctcaggcacactgggctcagggcaagcacccgagacatccggcctcccatcggggttctccggcgagtacagtggagtggacttaggttcaggtccgcccagcggcctgcccgacttttcaggacttccttctggatttccgacagtctctctcgtggatagtaccctggtggaagtggtcacagcgtctacagcgtccgagctggagggaagagggacgatcggaattagcggtgccggcgaaatttccggacttccatcaagcgagctggatattagtggcagagcatcgggactcccatctggcacagagctctctggacaggcctcaggctctcccgacgttagcggtgagatccccgggctgtttggggtctccgggcagccctctgggttccctgacacatccggtgagacctctggcgttaccgaactgtctggactgtcaagcggccagcccggtatcagcggagaagcctcaggtgttctttacggcaccagccagccattcggaattactgatctttcaggcgagacatctggggtgccagacctctcagggcagcctagcgggcttccaggcttctcaggcgctacgtccggagttccagatcttgtgtctgggacgacaagtgggtcgggcgagtcctctgggataactttcgttgacacctctctggtggaagtagccccaacaacatttaaggaagaggagggtctgggaagtgtggaactttcaggtctgcccagcggtgaggcagacctctcaggcaagtcgggcatggtggatgtgagcggacagtttagcggcacggtcgactctagcgggttcacttctcagactccagagttctctggtttgccgagtggcatagccgaggtcagtggagagtcatcccgggcagagatagggtcatcccttccatctggcgcctattacgggagtggcacaccttccagtttccctacagtcagcctcgtcgacagaacccttgttgagagcgtcactcaggcaccaaccgctcaagaggccggagagggcccctccggaattctggaattgagcggcgctcactcaggcgcccctgatatgtccggcgaacactcgggtttcctggacctgtctggtttgcagtccggattgatcgagccgtctggggaaccaccgggtacaccctacttcagtggtgacttcgcctcgacaactaatgtgtctggagagtcttctgtcgcaatgggaacttcaggcgaggcctcaggtctgcctgaggtgacactcatcacttctgagtttgtggagggggtgaccgagccaactatcagtcaagaactaggccagaggcccccagtgacacacactccacagctgtttgagtccagcggcaaagtctcaaccgcaggtgacatcagcggagcaactccagtccttccgggtagcggggtggaagttagctcagtcccagaaagctcatccgagacctctgcgtaccctgaagcagggtttggcgcctctgctgcacctgaggcctcccgcgaggacagcgggtcccccgatctgtccgaaacgacatcggcttttcatgaagcgaacctcgagagaagctccggtttgggtgtgagtgggagcacactgacgttccaggaaggggaggcctccgccgctcccgaagtgtctggtgaatcgactacgacttctgacgtgggcactgaggccccgggcttaccctctgcaacccccactgcctccggcgatcgtaccgagatctcaggagatctgagcggtcacaccagccaacttggagtcgttattagcacatcaatccctgaaagcgagtggacgcagcagacccagagacctgctgaaactcaccttgagatcgaatcctcatccttgttatattccggcgaggagacccatactgttgagactgctacaagcccaacagacgcatcaataccggccagcccagagtggaagcgcgagtccgagtccactgccgccgatcaggaagtatgcgaggaaggttggaataaataccagggccactgctatcgccactttccagaccgtgagacgtgggtggacgcagagcgacgctgtcgggagcagcaatcccatctctcctctattgtcacccccgaggagcaggagttcgtcaataataacgcccaagactaccagtggataggactcaatgaccggaccattgaaggagactttagatggagcgacggccaccctatgcagttcgagaactggcggcccaatcaacctgataattttttcgctgctggtgaggattgcgtggtgatgatttggcatgaaaagggcgagtggaacgacgtgccatgtaactatcatcttccttttacttgtaagaagggcacagccaccacttacaagagacgcctgcagaaacggtcttctcgccaccctaggagatcccgaccctctacggcccactag

SEQ ID NO: 178531 - DNA, 7593 bp, synthetic construct
  misc_feature 1..7593: note = Description of Artificial Sequence: Synthetic coding sequence
  source 1..7593: mol_type = other DNA
atgaccaccctgctgtgggtgttcgtgaccctgcgggtgatcaccgccgcagtcaccgtggaaacctctgaccacgataatagcctgtctgtcagcatcccacaaccttcacctctgcgagtgctgctgggtacctctctgaccatcccttgctacttcatcgatcctatgcatccggtcactacagccccttcgaccgcacccctggcgccacgaatcaagtggtcacgcgtaagtaaggagaaggaggtagtactattggttgccactgagggccgggtaagggtgaacagtgcctatcaggataaagtaagcctgcctaattatcccgccattccatccgatgccacccttgaagtgcaatccttacgctccaacgactctggggtctataggtgcgaggtaatgcacgggatcgaggatagcgaggctacactggaggtggtggtaaaaggtattgtgtttcactatcgggcaattagtacaaggtacacattggatttcgacagggcccagcgagcatgcctgcagaacagcgcgatcatcgcaactccggaacagctgcaggctgcatatgaggacgggtttcatcagtgcgatgcaggatggctagccgaccagaccgttaggtaccctatccatacccccagagaaggctgctatggggacaaggatgagttccctggggtgcggacttatgggatccgtgatacgaatgagacctacgacgtgtactgctttgcggaagagatggagggggaagtcttctatgcaacctcgccagagaagttcacattccaggaagccgctaatgagtgcagacggctgggagctcggctagccaccaccggtcagctgtatctggcttggcaagctgggatggacatgtgtagtgcagggtggctggccgatcgcagcgtgagataccccatcagcaaagccaggcccaactgcggcggtaatttgctgggtgttcgcactgtatacgtgcatgcgaaccagactgggtatcccgaccctagctcccggtacgacgcaatctgctataccggggaggactttgtggatatcccagaaaatttcttcggggtgggtggcgaggaggatatcacggtgcagacggtgacctggcccgacatggaactacccctgcctcggaatatcaccgagggcgaggctcgcgggagtgtgattctaacagtgaagcctattttcgaggtatccccctcccccctggaaccagaggaaccattcacgtttgctcccgaaataggggcaaccgccttcgcggaagtggaaaacgagacaggggaagcaactagaccatggggtttccctaccccaggactaggacccgctactgcgttcacctctgaggacctcgtcgtgcaggtcactgcagtgccggggcagccacatcttcccggcggcgtagtatttcactataggccgggacctactcggtactcacttacattcgaggaggctcagcaggcttgcctgcgtaccggcgccgttatcgcctctcccgaacagctacaggccgcatacgaggcaggctatgagcaatgtgacgccggctggctgcgagatcagacagtgaggtaccccatagtatctcccagaaccccatgtgttggggataaagattcaagtcccggggtaaggacctacggagttcggcccagcaccgaaacgtatgacgtatattgcttcgtcgataggctcgagggagaagtatttttcgctacaaggctggaacagtttacatttcaggaagccctggagttctgtgagtcgcacaatgcaactcttgcgaccaccgggcagttgtatgcggcctggtcaaggggtctggataagtgctatgcagggtggttagctgacggaagccttcgctaccctatcgtgacccctcgtcctgcttgcgggggcgacaaaccgggggtgcgtaccgtgtacctgtatccaaaccagactggattaccagacccccttagcagacaccatgccttctgttttagagggatctcggccgttcccagccctggcgaagaggagggcgggacaccaacatccccttctggcgttgaagaatggatcgttacacaggtcgtgcccggcgttgccgcagtgccagtcgaggaagaaaccaccgctgtcccctcaggagagacaacagccattctcgaattcaccacagagcccgaaaatcagacggaatgggaaccagcctacacaccagtgggaacaagccctttgcccggaatcctgccaacatggccccccactggagcagcgactgaggagagtacagaaggcccttccgccactgaagtaccaagtgcctctgaagaaccctccccctcagaagtgccttttcccagtgaggagcccagtccctcagaggaaccatttcctagtgtccggcccttccccagcgtcgaactgttccccagcgaagaaccttttccatcaaaggagcccagccccagtgaggagccaagcgcttcagaagagccatacaccccatcaccgcctgtgcctagctggacagaactgccatcgagcggtgaggaatctggggccccggacgtctctggggattttaccggcagcggagacgtgagcgggcacttagacttttcaggtcagctctccggcgacagagcatcaggcctgcccagcggcgatcttgattctagcggccttaccagcacagtgggctccggattacctgtcgagtctgggctgccctctggggacgaggaacgcattgaatggccctctacccctaccgttggggaactcccatctggagctgagattttggagggctccgcctcaggggtcggtgatctgtcgggcctccctagcggtgaagtgctcgagacatctgcgtctggcgttggtgacctctcgggccttccttccggcgaagtcctggagaccacagcccccggggtcgaagacattagtggcctgccgtcaggcgaagtgctcgagacaacggcacctggggtggaagatatctccggcttgccctccggagaagtgctcgaaaccaccgcccccggtgtggaagatatttccggcttgccaagtggagaggtgctcgagaccacagcccccggagtggaagatattagcggcctgccttctggtgaggtgctggagacgaccgccccaggagttgaggacatcagtggtttgccatcaggcgaagtcctggagaccacagccccaggggtggaggatatttcaggactgccctctggcgaggtcctcgaaacagccgctcctggcgtcgaggatataagcggcctgccgtccggagaggtgcttgaaactgcagctcctggcgtggaagatatcagtggactcccgtcgggcgaggtactggagacggctgctcccggcgtggaagacatctcagggttaccatccggggaggtcttggagacagccgcccccggggtggaagatatttccggactaccatccggggaagtgctcgagacagcggctcctggtgtggaagacatcagcggacttccttccggggaagtactggagacagctgccccaggagttgaggatattagcgggctccccagcggggaggtattggagacggctgcccccggagttgaagacatctccggcttacccagcggagaggttctggagactgctgcccccggagtggaggacatcagcggtctgccatccggcgaagtgttggagaccgctgccccaggagtggaggacatcagtggactcccctctggggaggtactggagactgcagcccccggcgtcgaggatatttccggtctgccctccggcgaggtcttggagaccgcagctcccggagtcgaagatatctccggactcccgagtggagaagtcctggagacagcagccccaggagtggaggatatatctgggcttccatccggcgaagttctagagacagccgcccccggcgtggaagacatttcaggtctcccatcgggggaggtgctcgagactgctgcccctggggtcgaggacatatcaggactgccatctggcgaggtcctggagacagccgctcctggagttgaggatatctctggtctgccctccggcgaggtgctggagactgctgcacccggcgtagaggatatttccggccttcccagcggggaagttctagaaacaaccgcgcccggagtagaggagattagcggcttgccttcaggagaagtcctagagaccacggcccctggcgtggatgagatttctggacttccctctggcgaagtgctggagaccaccgcccctggcgtggaagagatctctgggttgccatccggcgaggtactggagacttctactagcgctgtaggagatctttccggactgcccagtggcggagaggtcctggagattagcgtgtctggtgttgaagacatctctggcctgccaagtggcgaggtcgtggaaacatccgcatctggaatagaagacgtttcagaactgccctctggggagggtctggagacctccgcatctggagttgaagatttgtctagacttccatctggtgaagaggtgttggagatctccgcgtcggggtttggcgacctcagtggcctgcctagcggtggcgaaggcctcgagaccagcgcctcagaagtggggacagacctgagtggattgcctagtggacgggaaggtcttgaaacgagcgcttccggcgctgaggacctgtctggtctcccttcggggaaagaggatctggtgggcagcgcctccggggaccttgacttgggcaaattaccatccggcacacttgggtccggccaagcccctgaaacctcaggacttccatctgggttctccggtgagtacagcggagtcgacctcggcagtggacccccgagcggactccctgatttctcagggttgccttcaggattccctactgtgagcctggttgattctacattggttgaggttgtgacagcctccacggcatcagagctggaaggccgaggcacgattgggatatcaggggccggcgagatatctggcctccccagttctgaactagatatcagcggtcgcgcttcgggactccctagtggcactgaactatccggacaggcctctgggtcaccagacgtgagcggggaaattcctggtctgttcggggtctctggacagccttcaggcttccctgatactagcggagagacctccggagtgacagagctgtccggcttatcctccggccagccagggatcagcggagaagcgtccggtgtactgtatggtacatcacagcccttcgggattaccgacttgagcggggagacatcaggagtgcccgatctttctggtcaaccttctggactgcctgggttctccggcgccaccagtggcgttcctgatttggtgagcgggaccactagtgggtctggagaatcctcaggcatcacatttgtagacacctccctagtggaagtcgcccccactacattcaaagaagaagagggactcgggagtgtcgaactttccggacttccatccggcgaagcagatctcagcgggaaatctggcatggtcgacgtgtcgggccagtttagcggcacggtcgactccagtgggtttacgtcacagacccctgagtttagcgggctcccctctggcatcgccgaggtgagcggcgagagctcacgcgccgagatcggttcctccctgccctcaggggcttactacgggagcgggactccatcttcttttccaaccgtgagtctcgtggaccgcacattagtcgaatctgtcacacaggctcccactgcacaagaggcgggtgaaggcccatccgggatcctcgagttaagcggcgcacactcgggagccccggacatgtccggggaacatagcgggttcttggatttgtcgggcctgcagagcggcctcattgagccgagcggagagccacccgggaccccttacttcagcggcgacttcgcatcaaccacaaacgtgtcaggggagtcgagcgtggccatgggcaccagtggcgaagcttctggcttgccggaggtaactctcataacgagcgagttcgtggagggggtgactgaacccaccatctctcaggaactgggccagagacctcctgtgacgcatactccccagctcttcgaaagcagcggcaaggtctcaacggcaggagacatttcaggggcaaccccagtcttaccaggaagtggcgtggaggtgtcttcagttccggaaagttctagtgaaaccagcgcctatcctgaagcaggatttggcgctagtgctgcacccgaggcctctagagaggactccggtagccctgatttgtctgagaccacaagtgcttttcacgaggccaatcttgaacggtcttctggtctgggtgttagcggctcaacattgaccttccaagaaggcgaggcatctgccgcccctgaggtgtctggagaaagtaccacaacaagcgatgtggggactgaggcccccggcctgccctctgcgacgccaactgcctccggcgaccggacagaaatctcaggcgacttaagcggtcacacatcgcaactcggggtcgtcattagcacaagtatccctgaatccgagtggactcaacagacacaaaggcccgcggagacccaccttgaaattgagagttccagtctgctgtatagtggagaagagacacacactgtcgaaaccgcgacctcacctactgacgcttccattcccgcgagcccggaatggaagagggaaagcgaaagcacagccgcggcgcctgctcggtcttgcgcggaggagccatgcggtgccggcacgtgtaaagaaaccgaggggcacgttatctgcttgtgtccccccggatacactggcgagcactgtaacatcgatcaggaggtatgtgaggaaggatggaataagtatcaaggccactgctatagacacttcccggacagggaaacctgggtggatgctgaacggaggtgtagagagcagcagtctcatctttcatcaatagtaacaccagaggagcaggaatttgtgaacaataacgctcaagattaccagtggattggtctgaacgatcgaacaatcgagggtgatttccgttggagcgacggacacccaatgcagtttgaaaactggcgccccaaccagcccgataatttctttgccgcaggggaagattgcgtggtgatgatatggcacgagaagggagagtggaatgacgtcccatgcaactatcatctgccttttacctgtaaaaagggcaccgttgcttgcggggagcctccagtggtggaacacgccaggaccttcggacagaaaaaggatagatacgagattaactctctcgtgcgctaccagtgcaccgaggggtttgtccagagacatatgccgaccataagatgtcaaccctcaggtcattgggaggaaccgcaaattacctgcacagaccccacaacctacaaaagaagactccaaaagcgtagttcaaggcatccgcgaagaagtagaccatctaccgctcactag

SEQ ID NO: 178532 - DNA, 7479 bp, synthetic construct
  misc_feature 1..7479: note = Description of Artificial Sequence: Synthetic coding sequence
  source 1..7479: mol_type = other DNA
atgaccaccctgctgtgggtgttcgtgaccctgcgggtgatcaccgccgccgttactgtcgaaacctctgaccatgacaactcccttagtgtttcaattccccaacccagcccactgagggttctgctcggaacctctctcactattccttgctacttcatcgaccccatgcaccctgttacaacagccccctcgacagcgcccctcgctcctcgtatcaagtggagccgggtttcaaaagaaaaggaagtcgtgcttctggtggctacagagggtcgagttagagtcaacagcgcctatcaggacaaggttagcctacctaactacccggcgatccccagtgacgctacactggaggtccaaagcttgagatctaacgacagtggagtgtaccgatgcgaggtaatgcacggcattgaggatagcgaggcaacgctcgaggtcgtcgtgaagggtatcgtttttcattacagggccatttctactcgttacacactggatttcgacagagctcagcgggcttgtctacagaactccgcgattatcgctacacctgagcagctccaggccgcttacgaggacggatttcaccagtgtgatgccgggtggttagcagaccagactgtgcgctacccgatacatacccccagagaagggtgctatggtgataaggacgagtttcctggcgtgcgtacatacggcataagagataccaacgaaacatatgacgtatactgttttgcagaggaaatggagggtgaggtcttttatgctacttcacctgaaaaatttaccttccaagaagcggccaatgagtgcaggcggttgggtgccaggctcgcgactacagggcagctgtatctggcctggcaggctggtatggatatgtgcagcgcaggctggctggctgatcgaagcgtccgttatcccatttcgaaagctaggccaaattgcggcgggaaccttctcggtgtacggactgtgtacgtgcatgccaatcaaaccggatacccagacccatcctcccgttacgacgctatctgctataccggggaagacttcgtggatatccctgagaacttcttcggagtgggaggtgaagaagacatcaccgtccagacagtcacatggcccgacatggaactgccgctgccacggaatatcaccgaaggcgaggccaggggctctgtcatactgaccgtcaagcccatttttgaagtgtctccatcccccctggagcctgaggagccatttacattcgctcccgaaatcggcgcaactgcttttgcagaggtcgagaacgagactggggaggcaactcgaccatggggcttccctacacctggtttagggccagctaccgccttcaccagcgaagacctagtcgtgcaagtgaccgccgtgcctgggcagccccaccttccgggcggcgtagtgtttcactacagacctggcccgacacgctacagcctgaccttcgaagaagcgcagcaggcctgccttcgcaccggtgctgtgatagcaagtcctgagcagctgcaggccgcttatgaggccggctacgagcaatgcgatgcaggttggctgcgagatcagactgttcggtaccccatagtttcaccgagaactccctgcgtaggcgacaaagactctagccctggagtgcggacctacggagtcaggcctagcaccgagacatacgacgtgtattgttttgtggacagactggagggggaggtgttttttgccacacgacttgagcagtttacatttcaggaggcacttgagttttgcgagtcccataacgcaactcttgccaccactgggcagctgtatgctgcgtggtcccgtggattggacaaatgctatgctgggtggctggctgacggctcgcttcggtacccaattgtcacccctcgtcccgcgtgtggcggggacaagcccggggtgcggaccgtgtacctctacccaaatcagactgggctccctgatcccctgtcaagacaccatgctttctgctttcggggtatctccgctgttccaagcccgggcgaagaggagggtgggacccctacatccccctctggcgtcgaggagtggatcgttactcaggtcgtccccggggttgctgccgtgcctgtggaagaagaaacaacagcagtgccgagcggcgagactactgctatcttggagtttaccaccgaaccagagaatcagactgaatgggagcctgcttatactcctgtcgggactagcccactcccaggaatcctgcccacctggccgccgactggggctgctactgaagagtccaccgagggcccgtcagcaactgaagtgcccagtgcttccgaagagccctcaccatcggaggtgccgttcccaagcgaagagccctcaccatcggaagaacctttcccaagtgtccgaccatttcctagtgtggaattgtttccctccgaggaaccttttccctcaaaggagccttctccttctgaagagccatcagcctctgaagaaccctacactccctcaccccctgtcccaagctggacagaactgccctctagtggagaagaaagcggggctcccgatgtctcgggtgattttactggctctggggacgtttccggacatctcgatttctccggtcaattgagcggagacagggcttctggtctcccctctggtgaccttgattcaagcgggctgaccagcacagtcggatctgggctgcccgtggaatcaggacttccttctggcgacgaggaacggatcgaatggccatccacaccaaccgtcggcgaactcccgagcggagcggaaatcctcgagggaagcgcctcaggtgtgggcgatctctccggcctgcctagcggggaagtgctggagactagcgccagcggagttggtgatttgagtgggctgccctcaggagaagtcttagaaacgactgcgcctggcgtcgaagacatttcaggacttccctccggggaggttctcgagaccaccgcgcccggagtcgaagacatttcaggattgccatctggcgaggtgctggaaaccaccgctcccggggttgaggatatatccggcctcccgtccggagaagtactggaaaccaccgcacccggagtcgaagacatcagcggcttacctagcggggaagtccttgaaactactgcgcccggagttgaggatattagtggcttgccttctggcgaggttctggagaccaccgctcccggtgtggaagacatcagcggattgccttccggcgaggtgctggagacagccgccccgggggtggaagatattagtggtctcccttccggggaagtgctcgagaccgccgcgcccggcgtagaggacatctctggcttgcctagcggggaggtcctcgagaccgctgcccccggagtagaagacataagcggactgccttcaggggaggtactagagaccgcagcacctggagtggaggatatttctggtctgcctagcggggaggttctggaaaccgcagccccaggcgttgaggacatctctggcctgccaagtggtgaggtgttagagacagctgctcccggagtggaagacatctccggattgcctagcggagaagtgttggagaccgcagcgccaggtgtggaagacataagcggtctgccttctggagaagtcctggagaccgccgcaccaggcgtagaagatatatctggccttccatccggcgaggtgctcgagaccgccgcacctggagtcgaggacataagcggtctcccctccggcgaagtgctggaaacggctgctcctggcgtcgaggatatctcgggactaccaagcggcgaggtgctagagaccgccgcccccggagtggaggatatcagcgggttgccttcaggcgaagtcctagagaccgccgcacctggcgtggaggacataagtggcctgcccagtggggaagttctggagacagccgcaccgggagtcgaagatatctccgggctgcccagcggcgaagtactggagaccgctgcaccaggcgtggaggatatcagcggactgccttcaggcgaggtgctggaaaccgccgcgcccggagtagaggacatcagcggattgccatccggtgaggtcctcgagactgcagcaccaggagtggaagatataagtggactccctagcggggaggtactggaaaccacagccccaggtgtggaagagattagtggtctgccttctggtgaagtgctcgaaaccaccgctcctggagtggacgagatcagcgggcttcctagtggtgaagttcttgagactaccgcgcccggtgtggaagaaatatcaggcctgccctctggcgaggttctagaaactagcaccagcgcagtgggggatttgtcaggcctgccttccgggggcgaggtgctggagataagcgtgagtggggtggaagacatctcgggccttccctctggcgaagtggtggaaactagcgcaagtggtatagaggacgtgtcagagctgccaagcggggaaggcctggaaaccagtgcctccggcgttgaggatctaagtcgcctcccgtccggggaagaagtacttgaaatttccgcatccggttttggagatctatccggtcttccctctggtggcgagggcctggaaacctcggctagcgaggtaggtaccgacctttctggactccctagcggccgtgaaggactggaaacatctgcctcgggggctgaggatctgagtggattgccatctggaaaagaggacctggtaggcagcgccagcggggacctcgatcttgggaagctcccaagtggaacgctgggctctggtcaggctcctgagacctcaggcctcccttcaggattttctggagagtactccggagtggaccttgggagcgggccaccctcagggctgccggactttagcggcctcccgtccgggtttcctaccgtaagcttagtcgactccactctcgtggaggtggtgactgcatctacagcttctgagcttgagggcaggggcacgattggcatatctggggcaggggagattagcggcttaccgtcatctgagctagatatttctggccgcgcaagtggccttccctctggcacagagttatcaggacaggcaagcggatcccctgatgtgagtggagaaataccgggcctctttggtgttagcggtcagccctcggggttcccagacacttcaggagaaacctccggcgtgactgaactctctggactttcatctggtcagcccgggatctccggtgaagcttccggcgtgctgtacggtacctctcagccatttggtattacagatctcagcggcgagaccagcggcgttcctgacttgagcggtcagccctccggcttgccagggtttagtggggccaccagtggcgttccagatcttgtgtcaggaacgacctcaggctcgggcgagtcttctgggatcacatttgttgacacttccttagtagaggtagcgcctactactttcaaggaggaggagggccttgggagcgtggaactcagtggtctcccttccggagaggccgacctgagcggtaagagcgggatggtggacgtgagcgggcagttctccgggacggtggacagttctggctttacatctcaaactcccgaattttctgggctgccaagcggcattgcggaggtctcaggcgaatcctcgagagccgagatcggcagctcactgccttccggagcatactatggttctggcacaccaagttcctttcctactgtcagtctggtggatagaactctagtcgagagcgttacccaggcaccgacagcgcaggaagcaggggagggtccatctggaattctcgagttaagcggggctcattccggggccccagacatgtctggcgaacatagcggctttctggatctgtctggtctccaaagtggcctcattgaaccctcgggcgagccgcctggcaccccttatttctccggcgactttgcctctacgaccaacgtgagcggagagtcatctgtcgctatgggaaccagcggggaggcttcaggcctgcctgaggtgacacttattacttccgagttcgtggagggcgtcacagagccaactattagccaggagctgggccagaggccccctgtgacgcacactccccagctctttgagagctctgggaaggtgagcacagcgggcgacattagcggtgccaccccagtacttccaggatcaggggttgaggttagcagtgtgcctgaaagtagctccgaaactagcgcctacccagaggctgggttcggcgccagcgcggcccctgaggcctccagagaggatagcgggagccccgacctgagcgagacaacctctgcattccatgaagcgaaccttgaacggtccagtggcctgggggtgtcaggatccacacttactttccaggaaggtgaggcttctgctgcacccgaggtcagcggtgagagcactactactagtgacgttgggactgaagctccaggattaccaagcgcaacacctaccgctagtggtgaccggaccgagatttcaggggacctgtcaggccatacgagtcagctgggggtcgttatctcgacatccatccccgaaagtgaatggacgcaacagactcagagacccgccgagacacacctggagatagaatccagtagcctgctgtattccggtgaagaaacccacactgtggagaccgccactagccccacagacgcttcgattcctgcttcgccagaatggaagcgagagtccgagtcgaccgcagccgaccaggaggtctgcgaagagggttggaacaagtaccaggggcactgctataggcatttccccgatagggaaacttgggtagacgcagagaggagatgccgggaacaacagtcccacctgagctcaatcgtcacacccgaagagcaggagtttgttaataataatgcccaagactaccagtggattgggttaaacgatagaacaatagagggggattttcgatggtcagatggccaccccatgcagtttgaaaactggcgccccaatcaaccggataatttttttgctgcaggcgaagactgtgttgtcatgatctggcatgagaagggcgaatggaatgacgtgccttgcaattaccacttgccttttacttgcaagaaaggaaccgtagcttgcggtgaacctcctgtcgtagaacacgctagaaccttcggtcaaaaaaaggatcgatatgagattaactctctcgtaaggtaccaatgtaccgaagggtttgttcagaggcacatgccaactataagatgccaaccatccggccactgggaggagccacagatcacatgcacggacccgacaacttacaagcggagactgcagaagcgaagcagtcggcatcctcgcagaagccgcccctccaccgcccattag

SEQ ID NO: 178533 - DNA, 7593 bp, synthetic construct
  misc_feature 1..7593: note = Description of Artificial Sequence: Synthetic coding sequence
  source 1..7593: mol_type = other DNA
atgaccaccctgctgtgggtgttcgtgaccctgcgggtgatcaccgctgccgtgaccgtggaaactagtgaccacgataacagtctctcagtgagcatccctcagccatctccactgcgcgttcttcttggtacctcactgaccatcccgtgctactttatcgatccaatgcacccggtcacaacagccccatcaaccgccccgttggccccccgcataaagtggagccgagttagcaaagagaaagaagtagtattgctggtggcaaccgaagggcgggtgagggtcaatagtgcctaccaggataaggtgtctttacctaattaccccgcaattccatccgatgccacattagaagtgcagtctctgcgcagcaacgacagcggcgtctataggtgcgaagtaatgcacggtatcgaagattccgaagcaacgctggaagtcgtggttaagggcatcgtatttcactaccgggctatctcaactcggtacacactggattttgaccgagcccaaagggcatgtctgcagaacagcgcaatcattgccacgccagaacaactgcaagccgcctacgaggacgggtttcaccaatgtgacgcagggtggctggccgatcagacggtcagatacccaatacacaccccgcgggaaggctgttacggagataaggacgagtttcccggagtgcgcacatacgggattagagacactaacgagacatacgacgtttactgtttcgcggaggagatggaaggcgaagtgttttatgccacatctccagagaagttcacctttcaagaggccgctaatgagtgtaggcgactcggcgcgaggctggcgactaccggccagctttacctggcatggcaggctggtatggatatgtgtagtgcgggttggctggcagacagatctgtgcgctatcctatttccaaagcacgaccaaattgcggaggaaatctgttgggcgtaaggactgtctatgtgcacgccaatcaaacaggctatccagatccctcttcgagatatgacgcaatttgttacacaggagaggacttcgtggatatcccagagaacttctttggggtgggaggagaggaggacatcaccgtccagacggtcacgtggccagatatggagcttcccctgccgagaaatattaccgaaggagaagctaggggttccgttattctcacagtgaagcccatttttgaggtcagtccaagccctctggagccagaggagccttttaccttcgcccccgagattggggcaacggcatttgccgaagttgagaatgagaccggagaagctaccagaccctggggatttcccacgcccggcttggggccggctactgcattcacttcggaggatctcgtggttcaggtaaccgcggtgcctggccaaccgcacctgcccggcggtgtggtctttcattaccgcccgggtcctacgcgttactcccttacatttgaggaggcacaacaggcttgcctcaggaccggggccgtgattgcgagcccagagcaactccaggcagcctatgaggctggctatgaacagtgtgacgctggatggctgagggaccagaccgtacgctacccaatcgtgtcgcccagaactccttgtgtcggcgataaagactcctccccaggggtccgcacttatggggtgcgccccagtactgaaacttatgatgtgtattgcttcgtggacaggctcgagggagaagtgttcttcgcgaccaggttggaacagttcacatttcaggaagccctcgagttctgcgagtctcataatgctactctggcgacaaccgggcagctctacgcagcctggtctcgaggcctcgataaatgctacgcaggctggctggcggacggctctttgcggtatccaatagtcacgcccagacctgcatgtggaggagacaagcccggcgttagaaccgtttatctgtaccccaaccaaacagggctaccagatccgcttagccggcatcacgccttctgttttcgggggatatcagccgttccctctccaggggaggaagaggggggcacacccacatcacctagtggagttgaagaatggatagtaacccaggtggtgcccggggtagcggccgtgcctgtggaggaagagactaccgccgtgccaagcggagagactacggccatcttagaattcacaaccgaaccggaaaaccagaccgaatgggagcccgcatacactccagtaggtacaagccctctgccagggatccttccaacttggccacccactggggccgctaccgaagagagtacagaagggccatctgccaccgaggtgccctccgcgtctgaagaaccatcaccttctgaggttccatttccctccgaggagccttcacccagcgaggagccttttccctccgtgagaccttttcccagcgtggaactctttcccagcgaagaaccatttccgagcaaggagccttccccatcggaagagccatccgcctcggaagaaccttacaccccttcgccacctgtcccttcctggaccgagctgccttcgtcaggcgaggagagtggggctccggacgtgagtggggactttactggcagcggggacgttagcggccacttggacttttctggccagctgagcggcgatagagctagcgggctgccctccggggacttggatagcagtggcctgacatccaccgtaggctctggcctacccgttgagtcaggactgcccagcggggacgaggagcggatcgagtggccctctacaccgaccgttggcgaactcccctccggggcagaaatcctggagggaagtgcgagtggcgttggagacttgtctggtctgcctagtggtgaggtcctcgagacttccgcttccggggtgggagatctgtctggattgccaagcggcgaggtcctcgagacaactgccccaggggtggaagacatatcaggactgccctcgggggaggtcctggaaacaaccgcccccggcgtagaagacataagcggactgccttcaggagaagtgttagagacgaccgcccccggagtcgaggacataagcggattacctagtggcgaggttctggagacgacagctcccggcgtcgaagatatatctgggcttccgtcaggtgaagtgcttgaaacaactgcacccggcgtggaggacatctctgggcttccttcaggggaggttctggagactacagctcctggtgtggaagacatatctggactccctagcggggaagtgttggagactgctgctccgggggttgaggatataagtgggctgccttctggggaggtgctagagacagccgccccaggcgtcgaggacattagcggcctgccctcaggtgaggtgctggagacagcagcaccaggagtagaggatatctccggcctccctagcggggaggttcttgaaaccgcagcacccggggtcgaagatatctccgggctgccttccggcgaggtgctggagactgcagctccgggtgttgaggatatatccgggctgccttcgggcgaagtgcttgaaactgctgctcccggcgtcgaggacatatccgggctgccctctggcgaggtcttggagactgctgcaccaggggtcgaggacattagtggcctgccgtctggcgaagtcttggaaacagcggcgccgggagttgaagatattagcggattgccatcaggcgaggtcttagagacagccgcccccggagtcgaggatatctctggactgccatctggagaggttctcgagacagcagcacccggcgttgaagatatatctgggctaccgtcgggcgaagttctggagaccgcggcccctggggttgaagatatatcaggcttacccagtggtgaagtccttgagaccgccgctccaggggtagaggacattagtggactgccaagcggcgaggtgcttgaaaccgccgcacccggtgtggaagacatttctgggttacctagtggggaggtgctggagactgccgcccctggcgttgaagatatttccgggctgccctcaggagaggtgctggaaaccgcggcaccgggcgtagaagatatttctggtctgccctccggagaggtactggagacagcagcccctggagtggaagatatcagcggactgcctagcggcgaggttctcgaaaccacagcacccggggttgaagaaatttcgggtctgcctagtggcgaggtgctcgagactaccgctccaggggtagacgagatctcagggctgcctagcggagaagtccttgaaacaactgcacccggcgtcgaagagattagcggtctaccgtctggcgaagtgctggagacatccacatctgccgttggtgatctgagcggcctgcccagcggcggcgaggttctcgagattagtgtgagcggcgtggaagacatttccggcctaccttccggcgaagtggttgaaactagtgcaagcggtatcgaagatgttagcgaactgccttctggggaagggctggagacttccgcctctggcgttgaggacttaagtaggctgccgtctggagaagaagttctggaaatatctgctagcggattcggggacctgtccggccttccaagtggaggcgagggtctcgaaacatccgcctccgaggtgggtacagatctcagcggactgccatccggccgtgagggcttggaaacatccgcatctggggccgaagacctctcaggtttgccaagtggcaaggaagacctcgtcgggtccgcctcaggtgaccttgacctgggtaagctgccatccgggacgctgggcagcggtcaggctcccgagacttcaggcttgccatccgggtttagcggcgagtatagcggcgtggacctgggatctggccccccgagcggccttcccgatttttctggactgcctagcggatttcctaccgtaagtctcgtcgactctacacttgttgaggtggtcacagcctcaacggccagcgagctcgaaggccgcggcaccatcgggatatcaggcgcaggggaaatatcaggcttacccagttccgagctggatatatccggaagggcctcgggactgcccagcggcacagagcttagcggccaggcctcaggctcccctgatgtgagcggcgaaatccctggactgttcggggtctctggtcaaccttccgggtttcctgacacatctggagagaccagcggcgtaactgaactctccggactgtcaagtggacagccaggaatttctggcgaggcctcaggcgtgttgtacgggacttctcagcccttcggaatcactgatctgagcggcgaaacaagcggcgtgcccgacctaagtggccaaccgagtggcctaccagggttctccggggctacttctggcgtgcccgatctggtgagcggtactacctctggtagtggcgaaagctctgggattactttcgtggataccagccttgtagaggtggctcctaccacattcaaggaggaagaagggcttggatctgtggagctcagcggactcccatcaggcgaggccgacctgtccggcaaatcaggcatggtggacgtttcaggtcaattcagtgggacagtcgattcttcagggtttacaagtcagacgcctgagttttcgggtttacctagtggcatcgccgaggtgtctggcgagagctctcgagccgagattggttcaagcctgcccagtggagcgtattacggaagcggcaccccttcatcatttccaaccgtgagcctcgtggaccgcaccttggtagagtctgtcacacaggcgcccactgcacaggaggccggggagggcccaagcggaatcctcgaactcagcggggcgcattcgggggcgccggatatgagcggggagcactctgggtttctcgatctgtcaggactgcaatccggcttgattgagccttccggggagcctcccggcaccccttacttctcaggagacttcgcttctactacaaatgtgagtggggagagctcggtcgcaatgggtacatcgggcgaggcgtctggcctgccagaggttactctgatcacaagtgagtttgtagaaggcgtgaccgagcctactatatcccaggaactaggccagagaccccctgtgacacatacacctcagctgttcgagtcctccggaaaggtttccacggctggcgacatctctggcgcaacccctgtgcttccggggagtggtgtggaagtatcaagcgtcccggaaagcagctctgagaccagcgcgtatcccgaagccggctttggggcctctgccgcccctgaagctagtcgtgaggattctggcagccctgatctgtctgagacaacttctgcctttcatgaggctaatcttgagaggagtagcgggctgggtgtgagcgggagcacactgactttccaggagggagaggcctcagctgctccagaagtaagcggcgaatccacgactacctcggatgttggaactgaggcccccgggctgccttcagccacgcctactgcaagtggggaccgaactgaaattagcggggatctgagcggacatacttctcagctcggtgtggtgatttcaacctcaatacccgagagtgaatggacccagcagacgcagaggccagccgagactcatctggagatcgaaagctcctcattgctgtactctggggaggagacacataccgtggagacagccacatctccaactgatgcctccatccctgcgagtcctgaatggaagcgggagtccgagtcaacagcagccgctcctgcaaggtcatgcgccgaagagccttgtggggctggcacatgcaaagagactgagggccatgtcatctgcctgtgcccacccggttataccggcgaacattgtaacatcgaccaggaggtatgcgaagagggttggaacaagtatcagggacactgctatcggcattttccggacagagagacatgggtcgacgccgagcggcgctgtagggaacaacagagtcatctttcttcgattgtgactccagaggagcaggagttcgtaaacaataatgcacaggattatcagtggatcggactgaacgaccggacaattgaaggggatttcaggtggagcgatggccatcccatgcagtttgaaaactggagacctaaccagcccgataacttctttgccgcaggcgaagattgcgtggtgatgatttggcacgagaaaggagaatggaacgatgtcccctgcaactatcatctgcccttcacatgtaagaaaggtacggtcgcatgcggtgagccccctgttgtcgaacatgctaggactttcggtcagaagaaggatcggtacgaaatcaactctctggtgcgctatcagtgtaccgaggggtttgtgcagagacacatgccaaccattcggtgccaaccctcggggcactgggaggaaccccagatcacctgtactgatccaacaacctacaagaggcggctgcagaagcgctcaagcagacaccccaggaggtctaggccatctactgctcactag

SEQ ID NO: 178534 - DNA, 399 bp, synthetic construct
  misc_feature 1..399: note = Description of Artificial Sequence: Synthetic coding sequence
  source 1..399: mol_type = other DNA
atgctgaccgccgccgtgctgagctgcgccctgctgctggccctgcccgccactcgaggggcccagatgggactagcccctatggagggaattcggaggcctgatcaggcgctacttcccgaactgccgggtctgggactgagagcgccacttaagaagactacggctgagcaagctgaagaggatctcctgcaggaagcccaggctctcgcagaagttttggatctccaggaccgggaacctcgatctagccgacgctgcgtgcgactgcacgagtcctgcctgggccaacaggtgccttgttgtgacccctgtgcaacatgttactgccgctttttcaatgctttttgctattgtagaaaactgggcaccgcgatgaacccatgtagcaggacctag

SEQ ID NO: 178535 - DNA, 399 bp, synthetic construct
  misc_feature 1..399: note = Description of Artificial Sequence: Synthetic coding sequence
  source 1..399: mol_type = other DNA
atggacgtgacccggctgctgctggccaccctgctggtgttcctgtgcttcttcactgccaacagtcatctgccacccgaggagaagcttcgcgacgatagaagcttgagaagtaattcatccgtaaaccttcttgacgtcccaagcgtgtcaatcgtggctttgaataaaaaatctaaacaaatcggcagaaaggcagctgaaaagaaacgaagcagtaagaaggaagccagcatgaagaaagtagtgcgccccaggacacccctatctgcaccatgtgtcgccaccagaaatagctgcaagcctccggcccccgcgtgttgcgacccgtgcgctagctgtcagtgtcggtttttccgatctgcttgttcgtgtagagtgctgagcctcaattgttag

SEQ ID NO: 178536 - DNA, 936 bp, synthetic construct
  misc_feature 1..936: note = Description of Artificial Sequence: Synthetic coding sequence
  source 1..936: mol_type = other DNA
atggccctggaggtggtgttcctggcccggggccccagcggcctgctgctgtacaacggacagaagaccgatgggaaaggagactttgtgagtctggcattgagggatcgtagactggagtttcgatacgacctgggtaaaggggctgccgtcatacgatctagggagcccgttacgctgggagcatggacacgggtgtcgctggaaagaaacggtcgaaaaggcgcactgagggtgggggacgggcctcgggtactcggagagagtccaaagtccagaaaggtcccccacactgtcctgaaccttaaggagcccctctatgtgggaggggcccctgacttttctaagctggcacgggcagctgcggtgtctagtgggttcgacggagcaattcagctcgtgtcgttagggggtaggcagctcctcactcccgagcacgtcctacggcaggtagacgtcacctctttcgctggccacccatgcacccgcgcgtccgggcacccgtgcctcaacggcgcttcatgtgtgccacgcgaggccgcttatgtatgtctctgccccggagggttctccggtccccattgcgaaaagggcctcgtcgagaagagcgcaggcgacgtagacaccctggcctttgatggcagaactttcgtagaatatctcaatgctgttacagagagtgagttggctaatgaaatccctgtgcctgaaaccctggattctggggctctgcactcagagaaagctctacagtcaaatcattttgaactctcactacgaaccgaggctactcaggggttggtgctctggagcgggaaagccacagagagggctgactatgtggccttggccatagtggatggtcatctccaactgagctacaacctggggtctcagccagtcgtcctccgaagcacggttcccgtgaatacttag

SEQ ID NO: 178537 - DNA, 6138 bp, synthetic construct
  misc_feature 1..6138: note = Description of Artificial Sequence: Synthetic coding sequence
  source 1..6138: mol_type = other DNA
atggccggccggagccaccccggccccctgcggcccctgctgcccctgttggttgtcgctgcttgtgtccttcctggtgctgggggcacctgccccgagcgcgccctggaacgccgcgaagaagaggccaatgtcgttctgacagggaccgtggaggaaattctgaacgtggatcctgtacagcacacctactcttgcaaggttcgagtctggcggtacctaaagggtaaggatctcgtggctcgggagagcctcctagacggcggaaacaaagtggtgatctctggctttggagatccactgatttgtgataaccaggtctctacgggggacactcgtattttctttgtcaacccagctccaccatacctgtggcccgctcataaaaacgagctcatgttgaatagctctctcatgaggattaccctgcgaaatctggaagaggtagagttctgtgtggaagacaagcctggcactcatttcaccccagtgccgcccacccccccagatgcctgccggggaatgctgtgcggcttcggtgctgtatgcgaaccgaacgccgagggtccaggacgcgcttcctgcgtctgcaagaaatctccatgtccttctgttgttgcacccgtgtgtggttcagacgcatccacatattcaaacgagtgcgagctgcagcgtgcacagtgttcccagcaaagacggattagacttcttagccgcgggccatgtggttccagagacccatgtagcaatgtgacctgcagcttcgggagtacctgtgctcggtcggctgatggactcacagcctcctgtctctgtccggctacatgccgcggtgccccagagggaaccgtttgtgggagcgacggcgcagattatcccggggagtgccagcttctgagaagagcatgtgctagacaggagaatgtgttcaaaaagtttgacggaccgtgcgacccctgccaaggcgctcttccggaccccagcaggagctgccgcgtcaatccccgaacacggcggcctgaaatgctgctcaggcccgagtcatgccctgcgagacaggcgccagtgtgtggtgacgacggtgttacttatgaaaatgattgtgtgatggggcgaagcggcgcagctcggggcctcctcctccagaaggtccgctccggccagtgccagggacgcgaccagtgtccggaaccttgtcggttcaacgcagtatgccttagccgccgtgggcgccctcgatgttcatgcgaccgagtgacatgtgatggggcttatcggcccgtgtgcgctcaagatggacgcacatatgattccgattgttggcgccagcaagctgagtgccggcaacaaagagcaatcccatccaagcaccagggaccctgcgaccaagcccctagcccctgcctgggcgtacaatgcgctttcggagcaacatgtgcagtcaagaatggccaggctgcctgcgaatgcctccaggcttgcagcagtctgtatgaccctgtgtgcggttccgacggagtgacctacggaagcgcttgtgaacttgaagccacagcctgtactctggggagagagatccaggtggcaaggaaagggccatgtgaccgttgcgggcagtgtcggtttggagcactttgcgaagccgaaacaggaagatgtgtgtgccctagcgagtgcgtcgcactagcccagccagtctgtggctcggatggccacacataccccagcgaatgtatgctgcatgtacatgcctgcacacaccaaatcagcctccacgtggcgagtgctggaccctgtgagacatgtggagatgccgtctgcgcatttggtgcggtatgctccgccggtcagtgtgtatgtcctagatgtgagcatccccccccaggtccagtgtgtggaagcgatggcgtcacctacggtagcgcttgcgagttaagggaggcagcatgtctgcagcagacacagatcgaggaggcccgggctggcccatgtgagcaggcggagtgcggcagtggcgggagcggatcgggcgaagacggcgactgtgaacaagagttatgccggcagagaggcggaatctgggatgaggatagcgaggacgggccttgtgtgtgcgacttctcttgccaatccgtgcctgggtctccagtttgcggctctgatggagtgacttactcaacagaatgcgaattgaagaaagccaggtgcgaaagccagcggggcttgtacgtggctgcgcagggggcctgcagaggccctacatttgcacctctgccacccgttgccccgctacattgtgcccagacaccgtacgggtgctgtcaggataatatcacggcagctaggggtgtcggactggccggctgcccctcagcttgccaatgcaaccctcatggtagctatggcggcacctgtgacccagccacaggccagtgctcatgtaggcccggggtagggggccttagatgcgaccggtgcgagccaggcttttggaactttcgcggtatcgtgacggacggacgatccgggtgcacaccgtgcagttgtgatcctcagggggcagtcagagacgactgcgagcaaatgactgggctgtgctcttgcaagcccggggtggccggcccaaaatgtggacagtgcccggatggccgcgcactagggcccgcaggctgtgaggccgatgcaagcgctcccgcaacctgtgccgagatgagatgtgagtttggtgctcggtgcgtggaggagagcggcagtgctcactgcgtgtgcccaatgctgacttgcccagaggcaaatgcaaccaaggtctgtggaagcgacggagttacttacgggaatgaatgccaattaaaaaccattgcatgccgacagggactgcagatcagcattcagtccttgggaccctgccaggaggccgtggcaccctccacacatcccactagcgcttctgtgaccgtcacaacgcccggcctgctgttgagtcaggcactccccgcaccaccgggcgcgttgcctttggccccttctagcacagcccattctcagactactccacctccctcgtccaggccaaggacaaccgctagtgtgccacgtacgactgtctggccagtgctgacagtccctcctactgccccatcccctgctccaagtctagtcgcctctgcatttggagagtcaggcagcacagatgggagctcggatgaagaactctccggagatcaagaggcaagtggaggaggaagtggagggctggagccgctggaaggatccagtgttgctactcccgggcccccggtcgaacgggcatcttgttataattccgctttaggttgctgtagcgatggtaagacaccatccctggatgccgagggcagtaactgtcccgcgacaaaggtgtttcaaggggtcttagagctggagggggtagagggacaggagctcttctacacccccgaaatggcagatcctaaatccgagcttttcggagaaaccgcgcgctcaatagaaagcaccctggacgatctgttccgcaacagtgatgttaaaaaggacttccgttctgttcggttacgcgatctcggccctggcaaatctgttcgtgcaattgtggatgtgcatttcgacccaactacggcattcagagcccctgatgtagctcgagccctgctgcgccagatacaggtttctcggcgcagatcgctgggtgtccggagacctctgcaggagcatgtccggttcatggattttgactggttccctgcttttatcacgggagctacaagcggcgctattgctgcaggagcgaccgcgcgagccactaccgcctcacgtttacccagttctgcagtcacaccccgtgcccctcacccttctcatacctctcagcctgtggccaagaccaccgccgctcctacaactcgaaggccccccactacggcacctagccgggtgccgggcaggaggccaccagcaccccagcagccgcccaaaccatgcgacagtcagccatgctttcatggcggcacctgtcaggactgggctctgggagggggcttcacatgctcctgtcctgctgggcgaggcggagcagtgtgcgaaaaagtgcttggtgccccagttccggcctttgaaggccgctcttttctcgcttttcccactctgcgtgcttatcacacgttgcgcctcgcacttgaattccgggccctcgagcctcagggcctgctgttatacaatggcaacgccagaggtaaggattttctggctctcgcactcctggatggtagggttcagttgagatttgatacagggtccggccctgccgtgctcactagcgcggttccggtcgaacctggccaatggcatcgactcgagctgtcacggcactggaggcggggcaccctgtctgtggacggtgagacccccgtactaggcgagtctccttctgggacagacggcctcaaccttgacactgacctgtttgttgggggggtgcccgaagaccaagctgcagtggcgttggaacgcacgttcgtgggcgccggactccggggctgcatcagactgctcgatgtgaataatcagcgcctggagttaggcatcggtccgggcgctgcgacccggggctctggcgttggagagtgtggggaccatccttgcctgcctaacccatgtcacggaggggcgccatgccagaatctcgaagccggccgctttcactgccagtgcccaccagggcgcgtgggcccaacatgcgctgacgagaaatcaccatgccaacccaacccgtgtcatggtgcggctccctgcagggttctaccggagggcggggctcagtgtgaatgtccactcggccgtgagggaaccttctgtcagaccgcctccggccaagacggcagcggaccattcttggccgactttaacggctttagccaccttgagctcagggggttacacactttcgctcgcgacctgggagaaaaaatggcattggaagtcgtgttcctggctagaggaccgagtggcctgctgctgtacaatggacagaaaacagatggtaagggggacttcgtctctctggctcttagggacagacggttggagtttcgttatgacctgggaaagggagccgccgttatccggtctcgcgagcctgtgacactgggcgcctggacacgggttagtcttgaaagaaacggcaggaagggcgccctgcgggtgggtgatggaccgcgcgttctaggggagagtcctgtcccccacaccgttctcaatctgaaggagccactgtacgtcgggggcgctccagacttcagcaaactggcccgcgctgccgccgtcagttccggcttcgatggagccatccaactggtgtcactaggtgggcggcagctgttaacccctgaacatgtccttcgtcaggtggatgtaacatcttttgccggccatccttgtactcgggcctcaggccacccttgcctgaacggcgccagctgcgtgccacgggaagctgcatacgtgtgtctgtgccccggtgggttctccgggccacactgcgagaaggggcttgttgagaaatctgccggcgacgtggataccctggcattcgacggtcggacttttgtggagtacttgaacgcggtaactgagagcgagaaagctttacaatcaaaccatttcgaactgtctctgcggacagaggccacacaggggttggttctttggtccgggaaggcgaccgagagggctgattacgttgcacttgctatagttgatggtcatttgcagttgtcgtacaatctgggctctcaacctgtggtgctgcgcagtacagtacccgtgaataccaacaggtggctgcgcgtggtcgcccatcgggagcagcgggaaggcagtctgcaagtgggtaacgaagcacccgtcactggctcaagccccctgggtgccactcagctggacacagacggggcgttgtggttagggggtcttcccgagctgcctgtcggcccggctctgcctaaagcctacgggacaggcttcgtaggttgcttaagggacgtggtggtcggacgtcacccgctccacctgttggaagacgccgtgaccaagcccgaattgaggccatgtcctaccccttag

SEQ ID NO: 178538 - DNA, 816 bp, synthetic construct
  misc_feature 1..816: note = Description of Artificial Sequence: Synthetic coding sequence
  source 1..816: mol_type = other DNA
tgacggtacgacctgggcaagggcgccgccgtgatccggagccgggagcctgtcacacttggagcttggacacgcgtcagcctggagcgaaatggccggaaaggtgcactgcgcgtgggagatggccctcgcgtgttaggagagtctccaaagagccgtaaggtccctcacactgtactcaacctgaaggagccactgtacgtgggaggcgccccagattttagcaagctggcgagagcagccgccgtatcctctgggtttgacggagcaattcagctcgtcagcctaggcggcagacagttactgactcccgaacatgtcctgcgccaagttgacgtcaccagttttgccgggcatccctgtaccagggcttctggtcacccctgcctaaacggcgcaagttgcgtgccacgcgaggccgcatatgtgtgcctttgccctggcggattcagcgggccacattgcgagaagggtttggtggaaaagtcagccggagacgtggacacactggcctttgatgggcgtacattcgtcgagtacctcaatgcagtgaccgagagcgagctggcaaatgaaattcccgtgcccgaaactctcgacagtggagctctgcacagcgagaaggctctgcagagtaaccacttcgagctaagcctgaggaccgaggccacccaaggcttggtgctgtggtcagggaaggccaccgagagagcagattatgtggccctggccatcgtcgatggacatctccagctctcttacaacctcggtagccaacctgtggtcctgcggagcacggtacccgttaatacttag

SEQ ID NO: 178539 - DNA, 462 bp, synthetic construct
  misc_feature 1..462: note = Description of Artificial Sequence: Synthetic coding sequence
  source 1..462: mol_type = other DNA
atggccctggtgttcgtgtacggcaccctgaagcggggccagcccaaccacagggtgttgagggatggcgcgcacggctcagcagccttcagggcccgggggcggaccctggaaccataccctctagtgattgccggtgagcataacattccttggctgctgcacttgcctggctccggccgcctggtggagggcgaggtgtatgccgtggacgaacgaatgctacgattcttggacgacttcgagtcctgtcccgccctgtaccaaaggaccgtgctgcgcgtgcagctcctggaggatcgtgccccaggggctgaagaaccacccgctcctactgctgtacagtgttttgtctactctagagcaaccttcccaccagagtgggcacagctcccacatcacgattcttacgactccgaaggcccccacggattacgatacaatccacgcgagaaccggtag

SEQ ID NO: 178540 - DNA, 462 bp, synthetic construct
  misc_feature 1..462: note = Description of Artificial Sequence: Synthetic coding sequence
  source 1..462: mol_type = other DNA
atggccctggtgttcgtgtacggcaccctgaagcggggccagcccaatcaccgggtcttgcgcgacggcgcccacgggtccgccgcttttcgggcccgtggaagaaccctcgagccgtaccccctggtgatcgcaggggaacacaacatcccctggttactccacctaccaggtagtgggcgcctggtcgagggtgaggtgtacgcagttgatgagaggatgttgagatttttggatgacttcgaaagctgccctgccctctatcaacggacagtactccgggtgcagttactcgaagacagggcacctggagccgaggagcctccggcgcctacagctgttcagtgtttcgtctattcccgggcaacgtttcctcctgagtgggctcagctgccccatcatgattcttacgattcagaaggcccgcacggcctccggtataaccctcgcgagaacaggtag

SEQ ID NO: 178541 - DNA, 879 bp, synthetic construct
  misc_feature 1..879: note = Description of Artificial Sequence: Synthetic coding sequence
  source 1..879: mol_type = other DNA
atgaaccccttctggagcatgagcaccagcagcgtgcggaagcggagtgagggagaagagaagaccctgactggagatgtgaaaacgtctccccccagaaccgctcctaagaagcagctcccctccattcccaagaatgccctccctattacaaagccaactagccctgcccctgctgcacagagtaccaatggcacacacgcatcatatggtccgttttacctggagtacagcttattggcagagttcacgctcgtagtgaagcaaaaactgccaggcgtgtacgtgcagcctagctaccgttcagcactcatgtggttcggggttatctttatccggcatggtctgtatcaggatggagtcttcaagttcacagtgtacattcccgataattatcctgacggagactgccctcggctggtgtttgatatcccggtctttcacccacttgtggacccaacctccggggaactcgatgtgaagagggcttttgcaaaatggcgcagaaaccacaatcatatatggcaggtcttgatgtacgcgcgtcgagtattttataagattgatacagccagccctctgaaccccgaggctgccgtactctacgagaaagacattcagctgttcaagagcaaggtagttgattcagttaaagtttgcactgctaggctgtttgaccaaccaaagatcgaagacccatatgccattagcttttccccatggaatccgagcgttcacgatgaggctcgagagaaaatgctgacgcagaaaaagccagaagagcaacacaataaatctgtacacgtggctggcctgtcctgggtgaagcccggatccgtccagccctttagtaaggaagaaaagacggtcgccacttag

SEQ ID NO: 178542 - DNA, 879 bp, synthetic construct
  misc_feature 1..879: note = Description of Artificial Sequence: Synthetic coding sequence
  source 1..879: mol_type = other DNA
atgaaccccttctggagcatgagcaccagcagcgtgcggaagcggtctgaaggggaagaaaaaactctgacaggagatgtgaagacttcccctccgcggactgcccctaaaaagcagctgcctagtattccgaagaacgccttgcccattacaaaaccaactagtcccgctcctgctgcacagagtacaaatggaacccacgcttcctacgggcccttctatttggagtactctctccttgctgaatttacgctggtggtgaagcagaagttgccgggcgtgtatgtccagccttcttaccgtagtgcccttatgtggttcggcgtcattttcatccggcacgggctgtatcaggacggagtgttcaagtttaccgtgtacatcccagataattaccccgatggggattgcccacgtttggtgttcgatattcccgtattccaccctctcgtcgaccctacatccggggagctcgacgtcaagagggctttcgcaaagtggcggcgaaaccacaatcacatctggcaggtgctgatgtacgcacgacgcgtcttctataaaattgatactgccagcccactcaatcctgaagccgccgttttgtatgagaaagatatccaattgtttaagtccaaagtggtcgatagtgtgaaggtgtgtaccgcccgtctttttgaccagcctaagattgaggatccgtatgcgatttcctttagcccgtggaatcctagcgtccacgatgaagccagagaaaagatgttaacccagaagaagcccgaagaacagcataataagtcggtacacgtggcggggcttagctgggtgaagccaggatctgtgcaaccgtttagcaaggaagagaagactgttgctacgtag

SEQ ID NO: 178543 - DNA, 1179 bp, synthetic construct
  misc_feature 1..1179: note = Description of Artificial Sequence: Synthetic coding sequence
  source 1..1179: mol_type = other DNA
atggccagccacaagctgctggtgaccccccccaaggccctgctgaagccactcagcattccgaatcagctcctcttgggtccaggcccgtcgaatctcccaccaaggataatggcagcaggcgggcttcagatgatcggctctatgtcaaaggatatgtatcagatcatggacgagattaaggaaggtattcagtacgtgtttcagacccgaaatcctctgacactcgtgatttccggtagcggtcactgtgctctggaagctgcccttgtcaacgtcctagagcccggggactcctttctcgtcggggcaaatgggatttggggtcagagagcggtggacattggagagaggatcggggctcgcgtacatccaatgaccaaggaccccggtggccattacacccttcaggaggttgaagaaggtctggcccagcataagcctgtgctcttgttcctcacccatggcgagagcagcaccggcgtactgcaaccgctggatggctttggcgaactgtgtcatagatacaagtgcctgctcctggtcgatagcgtcgcatcccttggaggcacacccttgtacatggatcgccaaggcatcgacatattgtacagcggctctcagaaagctcttaacgcaccccccggcacttccttgataagctttagcgacaaggcaaagaaaaaaatgtacagcagaaaaaccaaaccctttagcttctacttggacattaaatggctggccaacttctggggctgcgatgaccagccaagaatgtaccaccataccatccccgtgataagcctatactccctgcgagaaagcctcgctctgatcgctgagcagggactggaaaacagctggaggcagcatcgtgaagccgccgcatacctgcatggccgactccaggctttaggcctgcagcttttcgtaaaggaccctgcactgagactgccaactgtgactactgtggccgttcccgccgggtatgattggcgggacattgtttcgtatgtcatagaccacttcgacattgagattatgggtgggctgggaccttctactgggaaagtactgcgcatagggttacttggctgtaatgcgactagggaaaatgtcgatcgagttacggaagcactccgtgccgcgctccagcactgtcccaagaaaaaactgtag

SEQ ID NO: 178544 - DNA, 3078 bp, synthetic construct
  misc_feature 1..3078: note = Description of Artificial Sequence: Synthetic coding sequence
  source 1..3078: mol_type = other DNA
atggagcccttcaccaacgaccggctgcagctgccccggaacatgatcgagaactcgatgttcgaggaggaaccagacgtcgtggatctggccaaagagccatgtttgcatcctctagaaccagacgaagtcgagtacgagccacgaggaagcaggttgttagtgcgtgggctcggtgaacacgagatggaagaagacgaggaggattatgagagttctgctaagctactgggtatgtcattcatgaacaggtcgtccgggctcaggaattccgcaacaggatatcggcagtctcccgacggagcctgttcagtccccagcgcacgcaccatggtcgtgtgcgctttcgtcattgtggtagcagtgtccgtgattatggtcatctacctcctccccaggtgcacattcacaaaagaaggctgtcacaaaaagaatcaatccatcggcctgatccaaccattcgccacaaacggtaagctgtttccgtgggcccagatcaggctcccaactgcagtggtcccgctgcgttacgagttgagccttcatcccaacctgactagtatgactttccgcggctcagttacaatctctgtgcaggccctccaggttacctggaatattattctacacagtacagggcacaacatttctagggtgacttttatgtctgcagtgagcagtcaggagaagcaggccgaaatcttagagtacgcctaccatgggcagatagccattgtcgcccctgaagccctgctggccggccacaactataccctcaagattgaatactcggcaaacatatcaagctcctactatggcttctacggcttctcttacacggacgagtcaaatgagaagaaatacttcgctgctacccaatttgagccactggctgcccgcagcgcatttccctgtttcgatgagcccgcgttcaaggcgactttcattatcaagataattagggacgagcaatatactgcccttagtaatatgccgaaaaagtcttccgtagtgctggatgatgggctcgtgcaagatgaattttcagaatctgtgaagatgtcaacttacctggtggcatttatcgtgggagagatgaagaacttgtcacaagatgtgaacggcacactggtgtcaatctatgcagtgcctgaaaagattgggcaggtgcattacgctctggaaaccaccgttaagctgctggagtttttccagaactattttgaaattcaataccctttgaagaagcttgatctcgttgcaatccccgactttgaagccggggctatggagaattggggactgctcactttccgagaagaaaccctcctctacgactccaacacgagctccatggcggaccgaaagctggtcaccaagataatcgcccacgaactggcccaccaatggtttggcaacctggtgaccatgaagtggtggaatgacctgtggctgaatgaaggattcgcgactttcatggagtattttagtctggagaagatctttaaggaactgagcagctacgaggactttttagacgccaggtttaagaccatgaagaaagactctctgaattctagtcatccaattagttcctccgtgcagtcttccgaacagatagaggagatgtttgattcactgtcctacttcaagggaagcagcctgcttctcatgttaaagacgtatctctcggaggatgttttccagcacgcagtggtactctacttgcataatcattcatacgcaagcatccagtccgatgacctatgggattcttttaatgaggtgaccaaccaaactcttgatgtaaagcgcatgatgaagacttggaccctgcagaaaggctttccactcgtgaccgttcagaagaagggcaaggagcttttcattcagcaggagcggtttttccttaacatgaaacccgaaatccagccctctgatacttcatacctgtggcacatcccgctttcttacgtcacagagggacggaattattcaaaataccaaagcgtgagcctgcttgacaaaaaaagcggagtgataaacctgacagaagaggttttatgggttaaagtgaatatcaatatgaacggttattatattgtgcactacgcagatgatgactgggaagcgctcattcaccaactgaagattaatccctacgtgttgtcagacaaggacagggctaaccttatcaacaatatatttgagctggccgggttaggcaaagtgcccctgaaacgcgcatttgaccttataaactacctgggaaatgagaatcatacagctcccattactgaggccttgttccaaacggatctgatctataacctcctcgaaaaattaggctacatggaccttgccagtcggttggtaacacgggtattcaagctcttacagaaccagatccagcagcaaacatggactgacgagggaactccttccatgagggagctgcgtagcgcactcctggagtttgcctgcactcacaaccttgggaactgtagcaccacagctatgaagctgtttgacgattggatggctagtaacggtacccaatcgttgcctacagacgtaatgaccacagtttttaaagtcggtgccaaaactgataaaggctggagtttccttctgggaaagtacatttcgattggatccgaagccgaaaagaacaagattcttgaggcactcgcttcttcagaagatgtgaggaagttatactggctcatgaagtcatccctgaacggagataattttcggacccagaaactctctttcatcattcggaccgttgggagacactttcctggccatctattggcctgggatttcgtgaaagagaactggaacaaactggtccagaaattccctctggggagttatactatacagaacatcgttgcaggtagtacctatttgttttctactaagacacatctgtctgaagtgcaggcgtttttcgagaaccaaagtgaagctacattcaggcttcgctgcgttcaggaggccctcgaggtgatacaattgaatattcagtggatggagaaaaatctaaaatctctcacctggtggctctag

SEQ ID NO: 178545 - DNA, 2907 bp, synthetic construct
  misc_feature 1..2907: note = Description of Artificial Sequence: Synthetic coding sequence
  source 1..2907: mol_type = other DNA
atggacagcaccctgaccgccagcgagatccggcagcggttcatcgatttctttaaacggaacgagcacacatacgttcatagcagcgcaaccatacccctggacgacccaacgctattgttcgccaatgctggcatgaaccagttcaaaccaattttcctgaataccatagacccaagtcatccaatggccaaactgtcccgtgcagcaaatactcaaaagtgcattcgcgccggcgggaaacacaacgacctcgacgatgtgggcaaagatgtctatcatcacacattttttgaaatgctgggaagttggtcctttggggactattttaaggaactcgcatgtaaaatggctctggaactcctcacacaagagttcgggataccaattgagaggctttatgtgacttactttggaggagatgaagccgccggtcttgaggccgacctcgagtgtaagcagatctggcagaacctgggcctcgatgacactaaaattctgccgggcaacatgaaggacaacttttgggagatgggcgacactggaccctgtggcccatgctctgagattcactacgaccgaattggggggagggacgccgctcatctggtgaaccaggatgatcccaacgtgctggagatttggaatctggtgtttattcaatataatcgtgaagctgatggcattcttaagcctctgcctaaaaaatccatcgacacaggaatgggcctcgagcgcctggtgtcagtactgcaaaataagatgtccaactacgacactgacctttttgtgccatattttgaggctattcagaaaggcactggcgctcgaccttacacaggtaaggtgggggccgaagacgctgacggaatcgatatggcctaccgcgtcctggcggaccacgcccggactataactgtggcccttgccgacggtggaagacccgataatacagggaggggatacgtgctgcgcagaatattgcgtcgagccgtgcggtacgcccatgaaaaactgaatgcctcccgcggattcttcgcaacactagtcgacgtggttgtgcagagcttgggggacgccttcccagagctgaagaaggatcccgacatggttaaagacatcattaacgaggaggaggtgcagttccttaaaaccttgtcacggggtcggcgcatactcgatagaaagattcagtctttaggggactctaaaaccattcctggtgacaccgcctggctgctttacgacacctacggattccccgttgacttgactggcctgatcgctgaagaaaaaggtctagtcgtcgatatggatgggttcgaagaggagcgtaagctcgcccaactgaaaagccaaggaaaaggggccgggggagaggacctcatcatgctcgacatttacgctatcgaggaactaagagcaagaggcctggaggtgactgatgactcaccaaaatacaactatcaccttgactcaagcgggtcctatgtattcgagaatacagtggccaccgtgatggctttgagacgggagaagatgttcgtggaggaggtgtcgaccggccaggagtgcggggtcgttctcgataagacctgtttttacgctgagcagggcggccaaatctacgatgaagggtaccttgtgaaagtcgatgacagcagcgaggacaagactgaatttaccgtcaaaaacgctcaggtccgtggaggttacgttttgcacatcggcacaatttacggcgacctgaaagtcggagaccaggtgtggctgtttatcgatgagcccagacgaaggcctattatgtctaatcacaccgctacccatattctgaacttcgctctacgctccgtgctgggagaggccgatcaaaagggctccttagtggctccggaccggctgcgctttgatttcacagctaaaggagcgatgagcactcagcagatcaaaaaggccgaagaaatcgcaaatgagatgatagaagcagccaaggccgtgtacacacaggattgtccattggcggccgctaaggcaattcagggactcagggccgtgttcgatgagacctaccccgatcccgtgagggttgtatctattggagtgcctgtatctgagttacttgacgacccaagcgggccagcagggagcctcaccagtgtcgagttctgtgggggtacacacctgcggaactcttcacatgccggcgcattcgtcatagtaaccgaggaagcgatagctaaggggattcgacggatcgtcgcggtgaccggagcagaggcccagaaggctttgcgcaaggcagaatctttgaaaaagtgtctgagtgtgatggaagctaaagtgaaagcccagactgcccccaataaagacgtccagcgcgaaattgccgacctgggagaggcgctagccaccgccgttatcccacagtggcaaaaagatgagctgcgggaaacactgaagtcgctcaaaaaggtgatggacgatctcgatagggcaagtaaagcagatgttcagaagcgggtgctcgagaaaacgaagcagttcatcgactctaacccaaatcagcccctcgttatcctcgagatggaaagcggggcttcagcaaaggcactgaacgaggcccttaaactgttcaagatgcatagtcctcagaccagtgccatgttgttcaccgtagacaatgaggccggtaaaattacctgcctgtgtcaggtgccacaaaacgcggccaacagaggtttaaaggcttccgaatgggtgcagcaggtgagcggcctgatggacgggaaggggggggggaaggatgtgtctgcacaagctacgggaaagaacgtaggctgtcttcaggaagcgctgcagctcgccacctccttcgcgcaactcaggctaggcgacgttaaaaattag

SEQ ID NO: 178546 - DNA, 2958 bp, synthetic construct
  misc_feature 1..2958: note = Description of Artificial Sequence: Synthetic coding sequence
  source 1..2958: mol_type = other DNA
atggccgccagcgtggccgccgccgcccggcggctgcggcgggccataagacggagcccagcttggaggggtctgtcccacaggccattatccagtgagcctcctgcagcaaaggcttcagccgtgagggcagccttcctgaattttttccgggataggcatggtcacaggctggtgccgagcgcctctgtacgacctcgtggtgaccctagcctgttgttcgtaaacgcaggaatgaatcagtttaagcctatttttctcggaaccgtcgatccccgcagcgagatggctggctttcgtcgcgtagccaactctcagaaatgcgtccgagcaggcggtcaccacaatgacctggaggatgtgggaagagatctttctcatcacaccttctttgagatgttaggaaattgggccttcggcggagaatatttcaaggaagaagcgtgcaacatggcttgggaacttctgacccaggtgtacgggatccccgaggagcggctgtggatctcctacttcgacggcgatcctaaagccggcttggaccccgacctcgagactagagacatctggctaagtcttggggtgcccgctagcagagttctatcttttgggccacaggaaaatttttgggaaatgggagataccggcccatgtgggccatgcacagagatccattatgatttggctggaggagtcggcgcaccgcagctcgttgaactctggaacttggtgttcatgcagcacaaccgggaagccgacggatctttgcagccactgccccagcgccacgtggatacgggtatgggattagagcgattagtggccgtcctccaggggaagcatagcacctacgacacagatctttttagccctttgcttaacgcaatccagcaggggtgtagagcacccccatacctcggacgtgtaggggtggccgatgagggtcggactgacactgcatatcgggtggtggcagatcacatccgcacgctctctgtttgcatctcagatggaatttttccaggaatgtccggccccccactggtcttgagaagaatcttacggcgagccgttcggttcagtatggaaattttaaaggccccaccagggttcctgggctctctagtcccagtggtagtggaaaccttaggcgacgcttatccggaactgcagcggaactccgcgcaaattgctaatcttgtttcagaagacgaggcggcttttctggccagtttagaaaggggacggcggatcatcgaccggacgctgcggaccctgggcccatcggatatgtttcccgccgaggttgcctggtcattaagtctatgtggcgatcttggattgcccttagacatggtcgagctaatgctggaggagaagggggtgcaactcgatagtgcaggcctggagcggctcgcgcaagaggaagcccagcatagagctcgccaagcggaacccgtccagaagcagggtctgtggcttgatgtacacgccctgggcgagctacagcgccagggggtaccacccaccgatgatagcccgaagtacaactattcattgcgcccttctggtagctacgagttcgggacatgcgaagcacaggtactacagctctacaccgaggacggaacagccgttgcgagtgttgggaaagggcaaagatgtggcctgctgttggatagaacaaatttctacgccgagcaaggaggccaggcctcagaccgcggctaccttgttagggcaggacaagaagatgtcctctttcctgtggctcgtgcccaggtttgcggaggatttatcctacatgaagctgtcgcacccgaatgtttacgattgggcgatcaggtgcaactccacgtcgatgaggcatggagattgggctgtatggcaaagcatacagccacacacctgctgaactgggctttgcggcaaacacttggaccaggcactgagcaacaggggtcccatttaaatcccgaacagctacgactcgatgtcactacacagactcccttaacccccgagcagctgagagctgttgagaacacagttcaggaggcagtcggccaggatgaggcggtgtacatggaagaggtccctctggccctgactgcacaggtcccgggtctgagatcgttagacgaggtataccccgatcccgtgagggtcgttagcgtgggagtgcccgttgcccatgccctggaccctgcatctcaggcagccctgcagacatctgttgagttgtgttgcgggacccacttactgcgcactggcgctgtaggggatctggtaatcattggcgatcgacagctgagtaaggggactacccgtctgctcgcagtcactggtgaacaggcccagcaagccagagagctgggacagtccctggcgcaggaggttaaggccgctacagagagactcagcttgggttcaagagatgttgcagaagcattaaggctgtcaaaagacattggacgcttgattgaggctgtcgagaccgcagttatgccacagtggcagcgaagagagttgttggctactgtaaagatgctgcagcgccgcgccaataccgcgatccggaagctacagatgggacaggccgctaagaagacacaggaactactcgagaggcacagcaagggacccttgattgttgataccgttagtgcggaaagcctgagcgtgctagttaaggtcgtccgtcagttatgtgagcaggccccatctacatctgtcttactgctgtccccacagccgatgggaaaagtgctgtgcgcctgtcaggtcgcacaaggcgccatgcccacattcaccgcggaagcatgggctttagccgtgtgcagccacatgggtggtaaagcatggggctcccgggtggtcgcacaaggaactggttcaactacagaccttgaagccgctctatctattgctcaaacttacgccttatcacagctgtag

SEQ ID NO: 178547 - DNA, 1578 bp, synthetic construct
  misc_feature 1..1578: note = Description of Artificial Sequence: Synthetic coding sequence
  source 1..1578: mol_type = other DNA
atggagttctgcgtggaggacagcaccgacgtgcacgtgctgatcgaggatcaccgcatcgtgtttagttgcaagaatgcggatggcgttgagctctacaacgagattgagttctatgctaaggttaattctaaggattctcaggacaaaagatcgagccggtctataacgtgttttgtaaggaaatggaaggaaaaagtcgcttggccaaggctgactaaagaagatattaagcccgtctggctgagcgtggactttgataattggcgcgactgggagggggatgaggaaatggaactggcacacgtggaacactacgcagagcttctcaaaaaggtcagcactaaacggccccccccagcaatggacgatctcgacttcacgaccaccgtagtgtcttgttgtccagctgagctgcaaaccgagggctccaacggcaagaaggaagtgctcagtgggtttcaggttgtcctcgaggataccgttctgtttccagaaggtgggggacaaccagacgacaggggcaccattaatgacatatctgtactgagggtgacccggcggggcgaacaggccgaccactttacgcaaacccctttggatccaggctcccaggtgttggtcagggttgattgggaaagacgcttcgatcacatgcagcaacactcagggcagcacttaatcactgccgtcgcagatcatctgttcaagctgaagaccacctcctgggaactgggacggtttcgttccgcgattgagctggatactccctctatgaccgccgagcaggtcgccgccatagaacaaagcgtcaatgagaaaattagagaccgcctgcctgtgaatgtcagagagctctccctggacgaccctgaggtggaacaggtcagtggccgagggctgccagacgatcatgctggacctataagggtggtcaatattgaaggcgtggacagcaacatgtgttgtggaacacatgtaagtaacctgagcgacctgcaggtcattaagatcctaggaactgagaaagggaaaaaaaaccgcactaatctgatattcctgtccggaaatcgggtgctgaaatggatggagcggagtcatggtaccgagaaagctttaacagcactgctcaagtgtggcgccgaggaccacgtggaagccgtcaagaagctccagaattcaactaaaatattgcagaagaacaatctgaacctcctgagggacctggcagtgcacatcgctcattccttacgaaatagccctgattggggcggagtagtgatcctgcatcggaaggaaggtgatagcgagttcatgaacatcattgccaacgagattggctcagaagaaactctgctcttcctgaccgtcggtgacgagaagggaggaggactctttttattggccggaccccccgcgtccgtagagactcttggaccccgcgtagcagaggttctggagggcaagggagccgggaagaagggtaggttccaaggcaaggcaaccaagatgagccggaggatggaggctcaggccctgctccaggactatatttccacacagagtgctaaagaatag

SEQ ID NO: 178548 - DNA, 1761 bp, synthetic construct
  misc_feature 1..1761: note = Description of Artificial Sequence: Synthetic coding sequence
  source 1..1761: mol_type = other DNA
atgttcagcctgcccctgaactgcagccccgaccacatccggcggggctcatgttggggtaggccccaggacttgaaaattgcggctccagcttggaacagtaagtgccacccaggagccggtgccgcaatggcacgtcaacacgccagaaccctgtggtatgacaggcctaggtatgtgtttatggagttttgcgtggaggattccacggatgttcacgtgttgattgaagatcacaggatcgtgtttagctgtaaaaacgctgatggcgtggaactgtataatgaaattgagttctacgccaaggtgaactccaaagactctcaggataagcgctcgtcaaggtcaatcacctgtttcgtgcgaaagtggaaagagaaggtagcgtggccaagactgacgaaggaagacattaagcccgtctggctttccgtggactttgacaattggcgagactgggaaggtgacgaggagatggagttggcccacgtcgaacactatgccgagttgctgaaaaaggtgagcactaaacgccctcccccggccatggatgacctcgatttcaccacaaccgtagttagctgttgccctgcagaactacaaaccgagggctcaaacgggaagaaggaggtactctctgggttccaggtagtcctcgaagatactgtgctgttccccgagggagggggacagccggacgaccgtggtacgatcaacgacatctccgttctccgcgtcacaagaaggggcgaacaggccgatcattttacgcaaaccccattggatcccggtagtcaagtgctcgtccgcgtagactgggaaagaaggtttgatcacatgcagcagcattcaggccagcaccttatcactgcggttgcggaccatctgtttaaactgaaaacgaccagctgggagctcggacgatttaggtcggccatcgaactggacacaccgagcatgacagcagagcaggtcgcagccattgagcagagtgtaaacgagaagattcgagacagacttcctgttaatgtgcgagagctttcgctagacgaccccgaggttgaacaggtctccggccgggggctgccggacgaccatgcaggaccaatccgggttgtcaacatcgagggtgtggatagcaacatgtgttgtgggacacatgtgagtaatcttagcgatctgcaggtgattaaaatccttggcaccgagaaagggaaaaagaatagaaccaacctgatctttctgagtggaaatagggtcctgaaatggatggagcgcagccatggaacagagaaagcactcactgctcttttgaaatgcggtgctgaagaccatgtggaagctgtgaaaaagctccagaattccactaaaatcctccagaagaataacctgaatttactgcgagatctggccgtgcatattgcccacagtctcaggaacagtcccgattgggggggagttgtcatcctgcatagaaaagaaggagactccgaattcatgaacattatcgcgaacgaaatcggatccgaagaaacactgctgtttttgacagtcggcgacgaaaaaggcggggggctgtttttgctggccggtcctcccgcttccgtggagacgctgggacccagggtcgcggaggtgctggaggggaaaggggcaggcaaaaaagggcggttccagggaaaggcaacaaagatgagtcgtagaatggaagcgcaagcgctgctgcaggattatatcagcacccaatcagctaaggagtag

SEQ ID NO: 178549 - DNA, 1761 bp, synthetic construct
  misc_feature 1..1761: note = Description of Artificial Sequence: Synthetic coding sequence
  source 1..1761: mol_type = other DNA
atgttcagcctgcccctgaactgcagccccgaccacatccggcggggttcatgttggggacgcccacaggacctgaaaattgccgctccagcttggaactccaagtgtcatcctggggctggcgcagctatggcaaggcagcatgcgaggacactctggtacgatcgtcccaggtacgtgttcatggaattctgtgtcgaagactcgacagatgtgcacgtgctgatcgaagatcataggatcgtcttcagttgtaaaaacgccgacggagtcgaactctacaatgaaatagagttctatgccaaggtcaattctaaggactctcaagacaagcgctcatctcgctccattacgtgtttcgtccggaaatggaaagagaaggtcgcctggcctagattgaccaaagaggacatcaaaccagtgtggctgagcgtcgattttgataactggagggactgggagggagacgaagaaatggagctggctcatgtggagcattatgctgagctgcttaaaaaggtgtccactaaaagaccccctccagccatggacgacctggattttacaacaaccgtcgttagctgctgtcccgcagaacttcagaccgagggcagtaatggaaagaaagaggtcctgagcggcttccaagtggtgctggaagatacagtgctgttccctgaggggggtggacaaccagatgatagggggaccattaacgacataagtgtactgcgtgtgaccagaaggggggaacaggccgatcactttacccaaacacccctcgacccaggcagccaggtcctggtcagggtcgactgggagagacggttcgaccacatgcaacagcactcggggcagcacctgatcaccgccgtggccgatcacctttttaagctaaagacgacttcttgggagctcgggagatttcgatcagccattgagctcgatacgcctagtatgactgccgagcaggtcgctgccatagagcaaagtgtgaatgagaagattcgggatcggcttcctgtcaatgtccgggaactctccctcgatgatccggaggttgagcaggtctcgggacgagggctgccggatgaccacgctggcccgattagggtcgtgaacatcgagggagtggactcaaacatgtgctgtggaacccatgtcagtaacctcagtgacctccaggtgatcaagatactcggaaccgagaaaggcaaaaagaatagaactaacctcatcttcttgagcggtaatagggttttaaagtggatggaaaggagtcacggcaccgaaaaggctttgacagctctgctgaagtgtggcgccgaggaccacgtggaggcagtgaaaaaactacagaattctactaagattctccagaagaataatctgaacctgctcagggaccttgcagttcatattgcccacagcctgaggaacagtcccgattggggtggagtggtaatcctgcacaggaaggagggtgacagcgaattcatgaatattattgctaatgagatcggcagtgaagagaccctcctctttctgacagttggagatgaaaagggcggaggactttttctgcttgccggccctcccgcgtccgtagagacccttggccctcgcgtcgccgaggtgctggaagggaaaggcgctgggaagaaaggacgctttcagggcaaggctactaagatgtcaagaagaatggaggcgcaggctcttctgcaggactacataagcacgcagtccgcaaaagagtag

SEQ ID NO: 178550 - DNA, 1239 bp, synthetic construct
  misc_feature 1..1239: note = Description of Artificial Sequence: Synthetic coding sequence
  source 1..1239: mol_type = other DNA
atggccttctggtgccagcgggacagctacgcccgggagttcaccaccacagtggtgtcttgctgcccagccgagttacagacagaggggtccaacgggaagaaggaggtgctcagtgggtttcaggtggttctggaggacacagtgctatttccagagggagggggacagcctgacgatcggggcactattaatgacatctctgttctgagagtcacgcgccggggggagcaagcagaccactttacacagacaccacttgaccctgggtctcaggtactggtacgggtagactgggaaaggcgctttgaccacatgcagcaacattctggccagcatcttattacagctgtagcggaccacctctttaagctaaagaccacgagttgggaactgggcaggttcagatcagctattgaactggacactcctagtatgaccgctgaacaggtagccgcaatcgagcagtctgtgaacgaaaagatacgggataggcttcccgtgaacgtacgagaattatctctggatgaccctgaagtggagcaagtatctggaagaggattaccggatgaccatgcgggtccaatacgggtggtaaatatagaaggcgtggacagtaacatgtgttgcggtactcatgtttcaaatctgtcagacctgcaagttatcaagatcctcggcacagagaaggggaagaaaaaccgcactaaccttatatttttgagtgggaacagagttctgaaatggatggagcgttctcatggcactgagaaagctctgaccgccctacttaaatgtggcgccgaagatcacgttgaagctgtgaagaagctgcagaacagcacgaagattctccagaaaaacaatctgaacctcctacgggatctggccgtgcacatagctcacagcctgagaaacagccccgactggggaggcgtggtgatcctccacagaaaagaaggtgactccgaatttatgaatataatagccaatgagatcgggtctgaagaaacgttactttttctgaccgtgggagatgagaaaggaggcggcctcttccttctagccgggccacccgcaagtgtcgaaactctgggcccaagggttgctgaagtactcgaagggaaaggcgccgggaaaaagggcaggtttcagggcaaggcaactaagatgtcacgacgcatggaggctcaggcactgcttcaggactatatctctactcagagcgcaaaggagtag

SEQ ID NO: 178551 - DNA, 501 bp, synthetic construct
  misc_feature 1..501: note = Description of Artificial Sequence: Synthetic coding sequence
  source 1..501: mol_type = other DNA
atgttcagcctgcccctgaactgcagccccgaccacatccggcggggcagttgttggggaagacctcaggacctgaaaatcgcagctccagcatggaacagcaagtgtcaccccggtgccggggccgctatggccaggcagcacgcccggaccctgtggtatgaccgtccacgctatgttttcatggagttttgcgttgaggattcgacggatgttcatgttcttatagaagatcatcggatcgtgttcagttgtaaaaatgcggacggggtggagctctacaatgaaattgagttttatgccaaagtgaatagcaaaccggtttggctaagtgtcgatttcgataattggcgcgactgggagggggacgaggaaatggagttagcccacgtcgagcactacgctgagctgctaaaaaaagtctcgacaaaacgaccccctcccgcaatggacgatctggatgatgactcggactctgccgatgacgctacttcaaactag

SEQ ID NO: 178552 - DNA, 399 bp, synthetic construct
  misc_feature 1..399: note = Description of Artificial Sequence: Synthetic coding sequence
  source 1..399: mol_type = other DNA
atggagttctgcgtggaggacagcaccgacgtgcacgtgctgatcgaagatcatcggattgtgttttcatgcaagaacgccgatggcgtggaactttacaacgagattgagttttatgcgaaggtgaattctaaggactcccaggataagaggagctccaggtccatcacttgctttgtccggaagtggaaagagaaggtagcctggcctcggcttacaaaggaggacattaagcctgtttggctatcggtcgactttgacaactggcgggactgggaaggtgatgaagagatggagctggcccacgtcgaacactatgcggagcttctgaagaaggtgtccacaaaaagacctccacccgctatggacgacttagacttcacgaccaccgtagtgtag

SEQ ID NO: 178553 - DNA, 1830 bp, synthetic construct
  misc_feature 1..1830: note = Description of Artificial Sequence: Synthetic coding sequence
  source 1..1830: mol_type = other DNA
atgaagtgggtgaccttcatcagcctgctgttcctgttcagcagcgcctacagccgcggagtcttccgtagggatgcccataaatctgaagtcgcgcataggtttaaggatctgggagaagagaattttaaagccctggtgttgattgctttcgctcagtacctgcaacaatgcccctttgaggaccatgtgaaattggttaatgaagtcaccgagtttgcgaagacttgcgtggccgacgagtctgctgagaattgcgacaagagcttgcatacgttgtttggcgataagctgtgcaccgtggcgacactccgtgagacctacggagagatggccgactgctgtgctaagcaggagcctgaacgtaacgagtgcttccttcagcacaaagatgacaacccgaatttaccgagattggtcaggcctgaagtggatgtaatgtgtacagccttccatgataatgaggaaacctttctgaaaaaatacctatacgaaatcgctcggcgacacccatatttctacgcacccgagctgcttttctttgccaagcgatataaagcagccttcacagaatgctgtcaagctgccgacaaagctgcctgtttgctgccaaaactggacgaactgcgtgatgaaggcaaggcctcttcggccaaacagcggctcaagtgtgcttctctgcagaagttcggggagcgggcgtttaaggcatgggcagtggctagattaagccaacgttttcccaaggctgagttcgctgaagtgtccaagctggttaccgatctgacaaaagttcatactgagtgttgccatggagatctccttgagtgtgctgacgatagagccgacctcgctaagtatatttgcgagaatcaagattccattagtagtaaattaaaggagtgttgcgaaaaacctctgctcgagaagagccactgcatagcggaggtcgaaaacgatgagatgccagctgacttgcccagtctagcggcagatttcgttgagtctaaagacgtgtgtaagaattacgcagaagctaaagacgtctttcttgggatgttcctatacgagtacgctaggaggcaccccgactatagtgtcgtgctgctcctgcggttagcgaagacttacgaaaccacactagagaagtgctgtgccgccgcagacccccacgagtgctatgctaaagtgttcgacgaatttaaacctctggttgaagagccccagaacctaatcaagcaaaactgcgagctattcgaacagctgggcgaatataagttccaaaacgctctgttggtaagatacacgaaaaaggttcctcaggtgtccacccccacccttgtcgaagtctctagaaatcttggaaaggtggggtctaagtgttgtaagcatcctgaagccaagagaatgccgtgtgctgaagactatctgtctgtcgtgctcaaccagctgtgcgtgctacatgagaagacacctgtcagtgatcgcgtgacaaaatgttgcaccgaaagtctcgtcaacagacgcccctgcttctctgccctggaggtcgatgaaacttacgtcccaaaggagttcaacgctgagacctttaccttccacgccgacatttgcacgctgagcgaaaaagagagacaaatcaaaaagcagacagctctcgtggagttggtgaagcataaaccaaaagccacgaaggagcagctgaaagccgtgatggacgactttgcggcgttcgttgagaagtgttgtaaagctgacgataaagagacatgcttcgcagaagaggggaagaagctcgtggcagcgagtcaggctgctttgggtctgtag

SEQ ID NO: 178554 - DNA, 1191 bp, synthetic construct
  misc_feature 1..1191: note = Description of Artificial Sequence: Synthetic coding sequence
  source 1..1191: mol_type = other DNA
atgaagtgggtgaccttcatcagcctgctgttcctgttcagcagcgcctacagtagaggagtttttagacgcgacgcccataagtctgaagtcgcacatcgctttaaggatctaggcgaggaaaacttcaaagccctggtgcttatcgcttttgcccaatacctccagcagtgcccattcgaggaccacgtgaaactggtcaacgaggtcacagaattcgctaagacatgcgtcgccgatgagagtgccgaaaattgcgacaagtcactccatacgctattcggcgataaactctgcacggtagccactttgcgggagacttacggagagatggccgactgttgcgcgaagcaagaaccagaaaggaacgagtgctttctgcaacacaaagacgataatccaaatctgcctcggttagtgagacctgaagtggacgtcatgtgcacagccttccacgacaatgaggagacatttttaaagaaatacttgtacgagaccacgttggagaaatgctgcgcagcagccgatccccacgagtgctatgccaaagtgtttgatgaatttaagccgcttgtcgaggaaccccagaaccttatcaaacagaactgtgaactgttcgagcaacttggcgagtacaagtttcagaatgcattgctcgttcgatacactaaaaaggtaccgcaggtgtccacccccacattggtcgaggtctctcgaaatctagggaaagtgggttctaaatgctgcaagcaccctgaggccaaacggatgccctgtgccgaggactatctcagcgttgtgctaaaccagctgtgtgttcttcacgagaagactcctgtgtccgatagagtgaccaaatgctgcaccgaatcactcgttaatcgcagaccctgtttctctgcccttgaggttgacgagacctatgtgcccaaagaattcaatgccgagacctttacatttcacgcagatatttgtaccctctccgagaaggaaagacagataaagaaacagaccgctcttgtggaacttgttaagcataagcctaaagcaactaaagagcaactcaaggctgttatggatgattttgcagctttcgttgaaaaatgttgcaaagccgacgataaggagacgtgctttgcggaagagggcaagaaactggtggccgcttcgcaggctgcgctcggactgtag

SEQ ID NO: 178555 - DNA, 1254 bp, synthetic construct
  misc_feature 1..1254: note = Description of Artificial Sequence: Synthetic coding sequence
  source 1..1254: mol_type = other DNA
atgaagtgggtgaccttcatcagcctgctgttcctgttcagcagcgcatattctcggggtgttttccggcgggatgctcacaagagcgaagtggcacaccgctttaaggatctgggtgaagagaacttcaaagccctcgccgtggcacgtttgtcccagaggtttcctaaagcagagttcgccgaggtatcgaagctagtcacggacctcacgaaagtccataccgagtgctgccacggggatctgcttgagtgcgcagatgaccgtgccgacctagcaaaatatatctgtgagaaccaagactcgatctccagcaagttaaaagaatgttgtgaaaagcccttgctggaaaagtcccactgcatcgcagaagttgaaaatgatgagatgcctgctgatctcccctccttagcagcggattttgtggaaagcaaagacgtttgtaagaattatgccgaggcaaaggatgtctttttagggatgttcctttatgaatacgcccgccgccaccccgattatagtgtcgtgctcctgcttcggttagccaagacctacgagaccaccctagagaagtgttgcgctgctgcggatcctcatgagtgctacgccaaagtgttcgatgaatttaaaccactcgtggaggagccccagaatctcattaaacagaattgcgagctgttcgaacagctgggtgaatacaaattccagaacgctctgttggtgcgatatacaaagaaggtgccacaggtcagtacccctacactggtcgaagtttccaggaatctcggcaaggttggatctaagtgctgcaaacaccccgaagcaaaaagaatgccatgcgcagaagattacctgtctgtagttctgaatcagctgtgcgtgctacacgagaagacaccagttagtgatagggtcactaaatgctgcaccgagagcctggtgaatcggcggccttgcttttctgcattggaggtggatgagacttacgtgcccaaggagtttaacgccgagacattcacttttcacgctgatatttgtacactgtccgagaaagagcgacaaatcaagaaacagactgccctcgtggagctggttaagcataaacctaaggcaacaaaggaacagcttaaggccgtcatggacgacttcgccgcttttgtggagaagtgttgcaaagcggatgacaaggaaacttgtttcgccgaggaagggaaaaagctggtggccgcatctcaggcggccctcggtctgtag

SEQ ID NO: 178556 - DNA, 1857 bp, synthetic construct
  misc_feature 1..1857: note = Description of Artificial Sequence: Synthetic coding sequence
  source 1..1857: mol_type = other DNA
atgaagtgggtgaccttcatcagcctgctgttcctgttcagcagcgcgtactcccgaggagtgtttagacgagacgccttatttttgttttttttcccttgccctgacaagagcgaggtcgcacatcgatttaaggacctgggggaagaaaactttaaagcacttgtcctgatcgcattcgctcaatatctgcagcagtgtccatttgaagaccacgtgaaactcgtcaacgaggtgaccgagtttgccaagacttgcgtggccgatgagagtgctgagaactgtgataagagcctgcacacactgttcggagataagctgtgtacagtggctaccttgagggagacatacggagagatggccgattgctgtgccaaacaggagccggaacgtaacgaatgcttcctgcagcacaaggacgacaaccctaacttacctcggctggttcgcccggaggtggatgtgatgtgcaccgctttccatgataacgaggagacatttctcaagaagtatctgtacgagatcgcccgcagacacccatacttctacgctcccgaattactcttttttgctaaaaggtataaggccgcctttaccgagtgttgtcaggcagctgataaggctgcttgcctcttaccaaagctcgacgagttgagagacgaaggcaaagccagctctgcaaagcaaaggttgaagtgtgcatcattgcagaaatttggcgaaagggcattcaaggcttgggccgttgcaagactctcacaacggttccccaaagctgagttcgcagaggtgagcaaattagtgactgacttgaccaaagtgcataccgaatgttgccatggagatctcttggaatgcgctgatgacagggctgatttagccaaatacatctgcgaaaaccaggatagcatttctagtaaactgaaagagtgctgcgagaagccactgttagaaaaaagtcattgcatagcagaggtcgagaatgatgagatgcccgctgatttgcccagtctagcagccgattttgtagaaagtaaagacgtgtgtaaaaattacgccgaggccaaggatgtgtttcttggcatgttcctctacgagtacgccaggcgacacccagactactcagtcgtgctcctgctccgcctggctaagacctatgagacaactttggaaaagtgctgcgcagccgctgacccacatgagtgttacgccaaggtgtttgacgagttcaaacccctggtggaggagccacagaatctgatcaagcaaaactgtgaactgtttgaacagctgggcgagtataaattccagaatgccctgctggttcggtataccaagaaagtgcctcaagtgagtacacctacactagttgaagttagccggaacctagggaaagtcggtagcaaatgttgtaagcatcccgaggccaagcgtatgccctgcgcagaagattatctgtccgtggttttaaatcaactgtgcgttcttcacgagaagactcctgtaagcgaccgagtgacgaagtgttgtactgaaagccttgtcaatcgaagaccatgcttctcggctcttgaggtggacgaaacatatgttcctaaggagtttaatgcagagacattcacgttccatgctgatatctgcaccctgtccgagaaggaacgccagattaagaaacagactgcactggtcgagctggtcaaacacaaacctaaagccactaaggagcaactcaaagctgtgatggatgactttgccgcgtttgtggagaaatgttgtaaggccgatgacaaggaaacttgttttgccgaggaggggaagaagctggtcgccgcctcccaagccgcgttgggactctag

SEQ ID NO: 178557 - DNA, 1161 bp, synthetic construct
  misc_feature 1..1161: note = Description of Artificial Sequence: Synthetic coding sequence
  source 1..1161: mol_type = other DNA
atgttcgccgagatccagatccaggacaaggaccggatgggcaccgccgggaaagtgatcaaatgtaaggccgctgtgctgtgggagcagaagcagcctttctcaattgaagaaatcgaggtggcgcctccgaaaacaaaagaggttcgaatcaaaatcctggctactggcatttgccgcaccgatgaccatgttatcaagggtaccatggtctccaagtttcctgttatcgtagggcatgaggctaccggcattgtagagagtatcggggaaggagtcactactgtaaagcccggagataaagtaataccactgttccttccacagtgtcgcgagtgtaacgcctgtagaaatccagacgggaacttatgcatcagaagtgacataactggcaggggagtcctcgctgacggtacaactaggtttacttgcaaaggcaagccggtgcatcactttatgaatacctctaccttcaccgaatacactgtggtggatgaatcttccgttgccaaaattgatgacgctgcgcctccagaaaaagtgtgcctgatcggctgtggcttttccaccggatatggggccgccgtaaaaacgggcaaagtgaaacccgggtcgacttgcgtcgtttttgggctcggcggtgtgggcctgtccgtgataatgggctgtaaatcagctggcgcgagtagaattatcggcatcgacctcaacaaagacaaatttgaaaaagcaatggcagtcggcgctacggagtgtatatctcccaaggattccacgaagcctatttccgaggtgctgagcgaaatgaccggcaacaacgtgggctacactttcgaggtcatcggacatttggaaacaatgatagacgccctagcgtcctgtcatatgaactatggcacatcagtcgtggtgggagtgcccccctctgccaagatgctcacgtacgatcctatgttgttattcactgggagaacttggaaaggatgtgtctttgggggcttgaagagtcgtgacgatgtgcccaagctcgtaaccgagttcctggctaagaaatttgacctcgaccagttgattacccacgtgttgccttttaagaaaatctcggaaggctttgagcttctcaactcaggtcagtccatccgaaccgtgcttactttttag

SEQ ID NO: 178558 - DNA, 1128 bp, synthetic construct
  misc_feature 1..1128: note = Description of Artificial Sequence: Synthetic coding sequence
  source 1..1128: mol_type = other DNA
atgagcaccgccggcaaggtgatcaagtgcaaggccgccgtgctgtgggaggttaagaaacccttttcaatcgaggatgttgaagtggctccacccaaggcttacgaggtaagaatcaaaatggtggctgtcgggatttgccatacggacgatcatgttgtaagtggtaacctggtaactccactcccagtgatcctgggacacgaggcagcaggaattgtcgagagtgttggtgaaggcgtaactaccgtgaagccaggagataaggtcatccctctttttacacctcagtgcggaaaatgtcgcgtttgcaagaatccggaatccaactactgccttaaaaacgatctgggtaatcctcgcggcactctacaagatggtacccgacgctttacctgccgcgggaagcctatccatcactttcttggtacgtccaccttctcccagtacaccgtggtcgatgagaatgcagtggccaagattgacgctgcatccccgttagagaaagtgtgtttgattggctgtgggttcagcaccggctacggctctgctgtgaacgtggccaaggttacgcctggatccacgtgcgccgttttcggactggggggggtggggctgagcgccgtcatgggatgtaaggccgccggtgcagcaagaatcatcgccgtcgatattaataaagacaagttcgccaaggccaaggagcttggcgctaccgaatgcattaacccacaggattataagaagcctattcaggaagttctcaaagagatgaccgacgggggggtcgatttctcatttgaggtgatcgggagactagacaccatgatggcaagcctgctgtgctgtcatgaggcctgcgggacgtctgtgattgtaggggttccgcccgcgagtcaaaatctttcgatcaaccccatgctgctcttgactggaagaacatggaaaggtgcagtgtatggggggttcaaaagcaaggagggcataccaaagctggtcgccgatttcatggccaaaaagttctccctggatgccctgatcacccacgtcctgcccttcgaaaagattaatgagggttttgatctcctgcacagtgggaagagcattcgaacagttttaaccttctag

SEQ ID NO: 178559 - DNA, 1008 bp, synthetic construct
  misc_feature 1..1008: note = Description of Artificial Sequence: Synthetic coding sequence
  source 1..1008: mol_type = other DNA
atggtggccgtgggcatctgccacaccgacgaccacgtggtgagcgggaacctggtaactcctttacccgtgatcttagggcacgaggctgcagggatcgttgagtcagtgggagaaggtgtgacaaccgtgaagcccggcgacaaggtgatacctctgttcacccctcagtgcggcaagtgtagggtatgtaaaaatcccgagagcaattattgcctcaaaaacgatttaggcaaccctcgcggaactctgcaggacgggacccggaggttcacatgccgaggcaagccgatccaccatttccttggcactagcaccttttcccagtacactgtggtcgatgagaacgctgttgccaagatcgacgcggcctctccactggagaaagtatgcctcattggatgcggcttttcgacgggctacgggtctgccgtgaatgtggccaaggtcactccaggctcaacttgcgcagtcttcggcttaggaggcgtggggctctcagctgttatgggatgtaaagccgctggagctgcgaggattattgccgtagacattaacaaggataagttcgcgaaagctaaagagctgggagcaacggaatgtatcaatccacaggactacaagaagcccatccaggaggtgctaaaagaaatgactgacgggggggtagatttttcatttgaggtcattggaagactggatactatgatggcttccctactttgctgccacgaagcgtgcgggacctcagttatagttggagttccacccgcctctcagaacctgtctattaatccaatgctgttgctgaccggaagaacttggaaaggcgccgtatatggtggtttcaaatccaaggaaggcatccctaagttagtggccgatttcatggccaaaaaattcagtctggatgccctgattacacacgtgctaccttttgagaagatcaatgagggatttgaccttctgcacagtggcaaaagcattcggacagtgttaacattctag

SEQ ID NO: 178560 - DNA, 1089 bp, synthetic construct
  misc_feature 1..1089: note = Description of Artificial Sequence: Synthetic coding sequence
  source 1..1089: mol_type = other DNA
atgagcaccgccggcaaggtgatcaagtgcaaggccgccgtgctgtgggaggtaaagaagcctttttccattgaagacgtggaggtggcccccccaaaagcttacgaggtccgaatcaagatggtggcagtcggaatctgtcatacagatgaccacgtggtgagcggaaatctggtcactccgctgcctgttattctaggacacgaagccgccggaattgttgaatctgtgggtgagggtgtgaccaccgtgaaaccgggagacaaagtgatcccactgttcactccccagtgcggtaaatgccgcgtgtgcaaaaatcctgaatccaattactgccttaaaaatgatttaggaaaccctagaggaaagccaatacaccattttcttggtactagtacgttctctcagtataccgtcgtggatgaaaacgctgttgctaagatcgacgcggcttcccctctggagaaggtctgtctgattggctgcgggttctccaccggttatggcagtgccgttaatgtcgccaaagtgacacctggatctacctgcgctgtcttcggactggggggggtaggcctgtctgcagtaatgggatgcaaggccgcgggagccgctcgcattatcgcagtggatattaataaagataagttcgccaaggccaaggagctcggcgccaccgagtgcatcaatccacaggattataaaaaaccaatccaggaagtgttaaaagaaatgacagacggcggagtagacttttccttcgaagtgattggtagacttgacacaatgatggccagcctgctttgttgtcatgaggcttgtgggacaagcgttatcgtgggagtgcctcccgcatcccagaatttgtcaatcaaccccatgctcctcctgacaggtcgcacatggaagggcgcagtttacggggggttcaagtcgaaagagggaattcccaagctggtggcagacttcatggctaagaagtttagcctggatgccttgattacgcatgtgcttcccttcgagaaaattaatgaaggatttgatttgctccattcaggtaagagcattcggaccgtgctaacattctag

SEQ ID NO: 178561 - DNA, 1143 bp, synthetic construct
  misc_feature 1..1143: note = Description of Artificial Sequence: Synthetic coding sequence
  source 1..1143: mol_type = other DNA
atgggcaccaagggcaaggtgatcaagtgcaaggccgccatcgcctgggaagccggcaagccactgtgtatcgaagaggtggaagtggcccccccaaaggctcacgaggtgcgtattcagatcattgccacctcactgtgtcacaccgacgctactgtaattgattccaagttcgaaggcttggcattccctgttatcgtaggacacgaggccgcagggatagttgagtcaattggaccaggagtcactaatgtgaagccaggagataaggtcattcccctgtatgcacccctgtgtcgtaagtgtaaattttgtctgtcaccgctaactaacctttgcgggaagatcagcaacctaaagagccccgcttccgatcagcagctgatggaggacaagaccagtaggttcacatgtaagggcaaaccagtgtaccactttttcggcacctcaacattctcacagtacacagttgtatccgatattaacctggcaaagattgacgatgatgcaaatcttgagagggtgtgcctcctaggctgcggtttctctacgggttacggggccgctattaacaacgccaaagtgaccccagggagtacctgcgccgtttttggcctgggcggtgtgggcctttcggccgtgatgggttgcaaggccgccggggcaagcaggattatcggcatagatatcaatagcgaaaaattcgtgaaggctaaggcactgggcgctaccgactgcttaaacccacgagatctgcacaagccaatccaggaggtcattatagagctgaccaaagggggcgtggatttcgctcttgactgcgcaggcggaagtgagaccatgaaggcagctctcgactgtactacggcaggctggggatcttgtacctttattggcgtggccgccggctctaaggggttaaccatcttccccgaggagctgattatcggaagaaccatcaatggaaccttttttggcggctggaagagtgtggatagcattcccaagcttgtcacagattataagaacaagaaatttaacctggatgccttagtcacccacaccttaccctttgataagatcagtgaagcttttgacctcatgaatcaggggaagtcagtcagaaccatactgattttttag

SEQ ID NO: 178562 - DNA, 1200 bp, synthetic construct
  misc_feature 1..1200: note = Description of Artificial Sequence: Synthetic coding sequence
  source 1..1200: mol_type = other DNA
atgctggtgcggggcccccacttcgagctgcagcggtgcaagacccatttgttctctagtaattaccttactcaggttatcaaatgcaaagctgccatcgcatgggaggctggaaaaccactctgcatcgaggaagtggaggtagcaccacctaaagcccatgaagtcagaatacaaatcatcgcgacgagtttgtgccacacagatgctaccgtgatcgacagcaagtttgagggactggcctttcctgtaattgtgggacacgaagcggccggaatcgtagagtctatcggcccaggagtgacaaacgtaaaacccggggataaggtcataccactgtacgcgccactctgccgcaaatgcaaattctgcctctccccacttacgaacttgtgcggcaagataagtaatctgaagtccccagcttccgatcaacagctaatggaggataagaccagtcgctttacttgtaaagggaagcctgtctatcacttcttcggaacctccacgttttcccaatacactgttgtctcagacatcaacctggcaaaaattgacgatgacgccaacctcgagagagtatgtctgctgggatgcggtttcagtacaggctatggggccgcgatcaacaatgccaaggtgactcctgggtctacttgtgctgttttcggcctcggaggcgtaggtttgtcagccgttatgggctgtaaggccgctggagcgtctagaatcatcggtatcgatataaactcagaaaagttcgttaaggctaaagccttaggggccactgactgcttaaaccctcgcgacctccacaagccaatccaggaagtcattatcgaactcactaagggcggagtcgattttgctttagactgcgccggtgggtcagaaacaatgaaagcggcactcgactgtaccacagccggatggggctcatgtacttttattggcgtcgcagctggatctaaaggcctgacgatcttccccgaagagttaatcattggcaggacaatcaacggtacgttcttcggcgggtggaaaagtgttgacagcatacctaaactagtcaccgattataagaacaaaaaattcaacctcgacgcattagtcacacacactctccccttcgacaagatctctgaagctttcgatcttatgaaccagggtaagagcgttaggactattctcatcttttag

SEQ ID NO: 178563 - DNA, 1125 bp, synthetic construct
  misc_feature 1..1125: note = Description of Artificial Sequence: Synthetic coding sequence
  source 1..1125: mol_type = other DNA
atggccaacgaggtgatcaagtgcaaggccgccgtggcctgggaggccgggaagccactgtccatagaggagattgaggtggcccctcctaaagctcatgaagtgagaattaagatcatcgcaaccgctgtgtgccacaccgacgcttacaccttgtccggtgctgaccccgagggctgcttcccagtaatcctcggccacgaaggagccggcatcgtagagtcggttggggagggggtgaccaaactgaaagcaggtgatacagttatccccctgtacataccccagtgtggagaatgcaaattctgcctgaacccgaagactaacctctgccaaaaaattagggttacccaaggtaaaggtctgatgccagacgggacttctcgcttcacctgcaaggggaagaccatcttgcactacatgggcacctccacatttagcgagtacacagttgtggccgacatttcggtggctaagatcgaccctcttgcacccttggacaaagtgtgtcttctcggctgcggtatctccacaggctacggcgccgctgtcaacacagctaagttggagccaggttctgtgtgcgctgtgttcggtctggggggggtgggtctcgccgtaattatggggtgcaaagttgccggagcttcaaggattataggagtcgacataaataaagacaagtttgcccgggcaaaagagtttggcgccaccgaatgtattaatccccaggacttttcaaaacccatccaagaggtgctgatcgaaatgacagatggcggggttgattactcctttgaatgtataggcaacgtcaaagttatgcgcgctgcactagaggcttgccataagggctggggggtttcagttgtagtgggcgtagctgctagcggcgaggaaatcgctacccggccctttcagctggtgacaggcagaacatggaagggaactgctttcggcggatggaagtctgtcgagagcgtgcccaagctcgtgtcagaatatatgagtaaaaagatcaaagtggacgagttcgtgacccacaacttaagttttgatgaaataaataaggcatttgagcttatgcattctgggaaaagtattaggaccgtcgttaagatctag

SEQ ID NO: 178564 - DNA, 1107 bp, synthetic construct
  misc_feature 1..1107: note = Description of Artificial Sequence: Synthetic coding sequence
  source 1..1107: mol_type = other DNA
atgtgcaccaccggccaggtgatccggtgcaaggccgccatcctgtggaaacctggcgccccttttagtattgaagaagttgaagtggctccccctaaagccaaagaggtgagaattaaggtagttgctacagggctctgtgggacagaaatgaaggttctcggatcaaagcatctggacctgctctatcccaccattctgggccatgaaggggccggcattgtcgagtcaatcggagagggagtcagtacagtgaaaccaggcgacaaggtgatcacattgttcctcccccagtgcggtgagtgtacctcgtgtctcaattccgaaggaaacttctgtatccagttcaagcagtcaaaaacccagctcatgagcgacggcacgagtaggttcacctgtaaagggaagtctatctatcacttcggaaatacatctaccttttgtgaatacaccgtaatcaaagagatttctgtcgccaaaatcgatgctgtagcaccccttgagaaggtgtgcctgatcagctgtggattctccacaggcttcggtgcagctatcaacaccgcgaaggtgacccccggatccacatgcgctgtgtttgggctcggcggggtgggattgtctgttgttatgggctgtaaagccgccggggcagcccgcattatcggcgtggacgtcaacaaagagaagtttaagaaggcccaggagttgggcgccaccgaatgcctgaatccccaggatttaaagaagcccatacaggaagtgctatttgacatgacagatgccggcatcgacttttgtttcgaagctattgggaacctggatgtactggcagccgctctcgcctcttgcaacgaatcctatggcgtctgcgttgtggttggggttcttccagccagcgtccaactgaagatctccgggcaacttttcttcagcggccgctcactgaaggggagcgtattcggagggtggaaatctaggcagcacatccccaagctcgttgccgattacatggccgaaaaactaaacctcgacccactcatcacacatacgctgaaccttgataaaatcaacgaggcagtggaattgatgaagaccggcaagtggtag

SEQ ID NO: 178565 - DNA, 1128 bp, synthetic construct
  misc_feature 1..1128: note = Description of Artificial Sequence: Synthetic coding sequence
  source 1..1128: mol_type = other DNA
atgtgcaccaccggccaggtgatccggtgcaaggccgccatcctgtggaaacccggggcgcctttctcaatcgaagaagtcgaggtggcccccccaaaagctaaggaagttagaataaaagtggtagctaccggcctgtgcggtacagaaatgaaagttttgggctctaaacatttggacctcctgtatccaacgatcttaggacatgagggtgccgggatcgttgaatccattggagagggcgtcagcacggtcaagccgggtgacaaggtaattactctcttcctgcctcagtgcggtgagtgtacttcctgtctgaattccgagggaaatttttgtatccagtttaaacagagtaaaacccagctgatgtctgatgggacatccaggttcacttgcaaagggaagtccatatatcattttggtaacactagcactttctgtgagtatactgtgattaaagagatctccgttgccaaaatcgacgccgtggcccctctcgaaaaagtttgccttatttcttgtggctttagtacagggtttggggcggctatcaacacagcaaaagttacccccggctctacttgtgctgtgtttggactgggcggagtgggattatctgtggtgatgggctgtaaagctgccggagctgcaaggatcataggtgttgacgtaaataaggaaaaatttaagaaggcccaggaacttggagccaccgaatgtcttaacccacaggatcttaagaaacctattcaagaggtcctttttgacatgaccgacgcagggattgacttttgttttgaggccatcggcaatttggatgtcttggccgctgccctcgcatcctgtaacgaaagctacggcgtgtgtgttgtcgtcggcgtgctacctgcctctgttcaattgaagatttcagggcaactattcttcagcgggcgctctctcaaaggttcagtgtttgggggatggaagtcgaggcagcatattcccaagctcgttgccgactacatggctgaaaagctgaacctggatcctctgatcacccatactctcaatctggacaagatcaatgaagccgtggagctgatgaagacgggcaagtgcattcgctgcattctcttgctttag

SEQ ID NO: 178566 - DNA, 501 bp, synthetic construct
  misc_feature 1..501: note = Description of Artificial Sequence: Synthetic coding sequence
  source 1..501: mol_type = other DNA
atgggctgcaaggccgccggcgccgcccggatcatcggcgtggacgtgaataaagagaagttcaaaaaagctcaagagctgggcgctacagagtgtctaaatcctcaggatctaaagaaaccaattcaggaggtgctgttcgacatgactgacgccggtattgatttctgttttgaggccattggaaatctggatgtcctggcggcggccttggcgtcctgtaacgagtcctacggggtttgtgttgtcgtcggagtcttgcccgcctccgtacagctcaagatatcaggacagctgttctttagcgggcggtctcttaaagggtctgtgttcggaggctggaagtccaggcagcatattcctaaactcgttgccgactacatggccgaaaaacttaatctggaccccttgatcacccacacactcaacctagacaagatcaacgaggcagtcgagctgatgaagacaggaaagtgtataaggtgcattctgctgctctag

SEQ ID NO: 178567 - DNA, 1068 bp, synthetic construct
  misc_feature 1..1068: note = Description of Artificial Sequence: Synthetic coding sequence
  source 1..1068: mol_type = other DNA
atggagcccgagaagcagaccgagatcagcgagttcttcctgcaggggctgagtgaaaaacccgaacatcagacgttgttgtttaccatgtttctgagcacctatcttgtaacgatcatcggtaacgcattgataatccttgcgatcataaccgacagtcacttgcacaccccaatgtacttcttcctgttcaacctttcgctcgtcgatacactgctaagtagcaccactgttcctaagatgctcgctaacatacaagcccagtctcgggccattcctttcgtcggctgcctcacacagatgtacgcttttcatctctttggcacaatggatagtttcctgttggcagtgatggcaatagatcggttcgtggccatcgtgcaccctcagaggtatcttgtcctaatgtgttcgcccgtgtgcggtctgctgctcggagcttcctggatgatcactaacttgcagagtctgattcacacttgtcttatggcccagctgactttctgcgcaggctcagaaatatcccactttttctgtgatctgatgccactgctgaagctatctggttccgacacacacaccaacgagctggtgattttcgccttcgggatcgtggtgggaacgtctccattcagttgtattctcctcagctacattcggattttttggacagtgttcaagatcccctctacacgcggtaagtggaaagccttctctacctgtggactgcacctgacagttgtttctctgtcatacgggaccattttcgcggtctatctgcagcctaccagcccctcctcttctcagaaggataaggcagcggccctgatgtgcggagtgttcatacctatgctgaacccattcatttatagcatccggaacaaagatatgaaggctgcgctgggcaagctcatcgggaaagtagctgtcccatgcccgagaccggaacaacttttagatgtgtaccacgtacctggatccctgctggcagcccgcgacactgagatgcaccccattccataccctggaggggtccaaagcctggcaggtaatagggatatggagtag

SEQ ID NO: 178568 - DNA, 1125 bp, synthetic construct
  misc_feature 1..1125: note = Description of Artificial Sequence: Synthetic coding sequence
  source 1..1125: mol_type = other DNA
atgggcaccgccggcaaggtgatcaagtgcaaggccgccgtgctgtgggaacaaaagcagccattttccatcgaggagatcgaagtcgccccgcctaagactaaagaggtcaggatcaaaatcttagcaacaggaatttgcagaacagacgaccacgttatcaaaggcaccatggtcagtaagtttcctgtgattgtcgggcatgaagcaacaggcatcgttgagtccattggtgaaggcgtgaccaccgtgaaacccggcgataaggtgattccactcttcctgcctcagtgccgtgagtgtaacgcatgtagaaatcccgatggtaatttgtgtattcgctccgacataacaggcagaggcgttctcgccgacggtaccactcgcttcacctgcaaggggaagcccgtccaccactttatgaacacctccaccttcacggaatacactgtggtggacgagagtagcgttgctaaaatagatgacgccgcaccgcccgaaaaggtatgcctaattggatgcgggttcagcacaggatatggcgccgcagtaaaaacagggaaagtaaaacctggatccacgtgtgtggtcttcggtctgggtggcgtggggctgtcagtgataatggggtgcaagtccgccggggcaagtagaatcattggtattgacctaaataaagataagtttgagaaagctatggccgttggagctacagagtgcatatcccctaaagactcaacgaagcccatcagcgaggtactgtctgagatgacggggaacaatgtgggctatacttttgaagtgatcggtcacctggagactatgatcgatgccttggcctcctgccacatgaactatgggacatcggtggtggtcggagttccaccttcagcaaaaatgttaacttacgacccgatgctgttgtttacaggacggacgtggaaggggtgtgtcttcggaggtctgaagtcccgagatgatgtgcccaagctggtcacagaattcctggccaaaaaatttgacctcgaccagctgatcacacacgtgctgcctttcaagaagatctccgaaggctttgagctgctgaattcgggacagtcaattcgcacggttcttaccttctag

SEQ ID NO: 178569 - DNA, 1185 bp, synthetic construct
  misc_feature 1..1185: note = Description of Artificial Sequence: Synthetic coding sequence
  source 1..1185: mol_type = other DNA
atgaagtgcctggtgagccggcacaccgtgcgggagaccctggacatggtttttcaacgaatgagcgtggaggccggcgtgatcaagtgcaaagccgccgtgctttgggagcagaaacaaccctttagcatcgaggagatcgaagtggctcctccaaagaccaaggaggtgagaatcaagatccttgctaccgggatctgtaggaccgatgaccatgttataaaagggacaatggtctccaagtttcccgtcatcgtgggtcacgaagcgacaggaattgtggagtcgataggggagggcgttacaactgtgaaaccaggagacaaggtgattccactgttcttaccacagtgcagagagtgcaacgcctgtagaaatccggatggcaacctgtgcataaggagcgatattacagggagaggcgtcctagctgatggcactacacgattcacatgcaagggcaaaccggtccatcattttatgaacacatctacgttcaccgaatacaccgttgtggatgagtccagcgtcgctaaaattgacgacgccgcccctcccgagaaagtgtgtctgattggctgtggattttccacagggtatggagccgccgtgaaaaccggcaaagtgaagcccgggtccacttgtgtcgtgttcggcctcggtggcgtgggcctgtctgttattatgggatgtaaaagcgccggcgcctcccggatcattggcattgacctgaataaggacaaatttgaaaaggccatggcggtgggggccaccgaatgcattagtccaaaggattctactaagcctatcagcgaagtgctcagtgagatgactgggaataatgttggttatacatttgaggtcataggccacctggaaacaatgatagatgcacttgcttcttgtcacatgaattacggcacttcagtcgtggtgggtgtcccacctagtgccaagatgcttacctacgatccgatgttactctttactggaaggacatggaaagggtgcgttttcggcggcttgaagagcagagacgacgttcccaaattggtgacagagttcctagctaagaaattcgaccttgaccagcttattactcatgttcttccattcaaaaaaatttcagagggattcgaactactgaactccggacaatccatcagaaccgttctgactttctag

SEQ ID NO: 178570 - DNA, 954 bp, synthetic construct
  misc_feature 1..954: note = Description of Artificial Sequence: Synthetic coding sequence
  source 1..954: mol_type = other DNA
atggtgagcaagttccccgtgatcgtgggccacgaggccaccggcattgttgaaagtatcggagagggggtaaccaccgttaagcctggggacaaggtgatccctctgtttctgccacagtgcagggagtgcaatgcctgtcggaaccccgacggaaatctctgtatccggtccgacattaccgggcggggcgtgttggctgacgggacgacgcggttcacatgcaaaggcaagccagtgcatcactttatgaatacctcgaccttcaccgaatatacagtggtggacgaatcatccgtcgccaagatagacgatgctgccccgcctgaaaaggtgtgcttgataggttgcgggttttcaaccggctacggagccgccgtcaagaccggaaaagttaaaccaggatcaacctgcgtagtttttggcctcggaggggtgggactgtccgtgattatggggtgcaagtctgcaggtgctagccgcataattggaatagatttaaacaaggacaagtttgaaaaggctatggctgtgggagcaactgagtgcatcagtcccaaagactccacaaaaccgatatcagaagttctctcagagatgaccgggaacaacgtcggctatactttcgaagtgatcggacacctggagaccatgatagacgcgctagctagctgtcacatgaactacgggaccagcgtggtagtcggtgtacctccttcggcaaaaatgcttacttacgatcccatgctcctcttcaccggccgcacgtggaaaggctgcgtttttggtggactgaagtctcgcgatgatgtccccaaacttgtgactgagtttctagccaagaaattcgacctagatcagctcattacgcacgttttgccattcaagaaaatatcagagggctttgagctccttaacagcgggcaaagcatcagaacagtgctgaccttttag

SEQ ID NO: 178571 - DNA, 912 bp, synthetic construct
  misc_feature 1..912: note = Description of Artificial Sequence: Synthetic coding sequence
  source 1..912: mol_type = other DNA
atggccgccgccgcccgggcccgggtggcctacctgctgcggcagcttcaaagggctgcctgccaatgcccaacacactcccacacgtactcacaggctccaggactatctccatccggcaaaacgaccgactatgccttcgagatggcggtgagtaatatccggtatggcgctgccgtgaccaaggaggtgggaatggacctgaaaaatatgggagcgaagaacgtgtgtctaatgacagataagaacctatctaagctcccccctgtgcaggtggcaatggatagtcttgtcaagaacggaattcccttcacagtttatgacaacgtccgagtcgagccgactgactcctctttcatggaagccatcgagttcgcgcaaaaaggcgcttttgatgcttacgtggccgtcggcggaggctccacgatggatacatgcaaggcagccaatctctatgcctccagcccacacagcgattttctggactatgtgagcgcgccaattggaaagggtaagccagtttcggtgcctttgaaaccgctgatcgctgtgcctaccacttcaggtactgggtcagaaactacaggcgttgctatctttgactacgaacatctgaaagtgaaaatcggcatcacgagtagggcaattaagcctacactcgggttgatcgaccccctgcacacattgcatatgcccgctcgggtcgtcgcaaactctggatttgatgtgctgtgtcacgccctggaatcttatactaccctgccttatcacctcaggtctccatgtcctagcaatcctattacccgcccagcctatcagggctcgaatccaatcagtgatatttgggcaatacacgctctgcggattgtggccaaatacctcaagagagcagtgaattctacagataaatag

SEQ ID NO: 178572 - DNA, 1404 bp, synthetic construct
  misc_feature 1..1404: note = Description of Artificial Sequence: Synthetic coding sequence
  source 1..1404: mol_type = other DNA
atggccgccgccgcccgggcccgggtggcctacctgctgcggcagttgcagagggctgcttgccagtgtcccacccactctcacacctattctcaagctcctgggctttcaccctcaggaaaaaccactgactacgcctttgagatggcggtctcaaatattagatatggcgccgcagtgactaaagaggtcggcatggatttgaaaaatatgggagccaagaatgtgtgtctgatgactgacaagaacctctctaaactcccacccgtgcaggttgccatggactcactggtaaaaaacggcattcccttcaccgtttatgacaacgtgcgtgtggaacccacagactcctccttcatggaggccattgagttcgcccaaaagggagctttcgatgcatatgtggccgtgggcggaggctcaactatggatacgtgcaaggctgccaatctgtacgcctcatctcctcactccgattttctggactatgtcagtgcccccatcgggaagggaaagcccgtcagtgttcctctgaagcccctcattgccgtgccaaccacgtctggcacaggtagcgagaccacaggggtcgcaatatttgattacgaacacctgaaggtgaaaattgggattactagcagagcgatcaaacccacactcgggctgattgatccactgcatactctccatatgcctgctcgagtcgtcgcgaatagtggattcgatgttctttgtcacgccctcgaatcctataccaccttgccataccaccttcgatctccatgtccaagcaacccaattaccagaccggcctaccagggctcgaatcccatctctgacatctgggccatccacgctctgagaatcgtggcaaaatatctgaaaagagccgtgcgcaatcccgatgacctggaggcccgctctcacatgcacctggcctcggcctttgcaggaataggattcggaaacgcaggcgttcacctgtgtcatggcatgtcctatccaatctcagggctcgtaaagatgtataaagcgaaggactacaacgtagaccaccctctcgtcccccacggcctctccgtggtgctaacctccccagcggtgtttactttcaccgctcaaatgttccccgaaagacacttggagatggccgagatcctcggcgctgacacaagaacggcccgaattcaagacgcaggattggtcctggccgatacactgcggaagttcctctttgacttggatgtggatgacggcctcgcagcggttggttattcaaaagctgacatacccgcactcgtgaaaggcacactcccacaggaacgtgtcaccaaactggcaccctgtccgcagtctgaagaggatttggcagcattatttgaggccagcatgaagttgtattag

SEQ ID NO: 178573 - DNA, 2406 bp, synthetic construct
  misc_feature 1..2406: note = Description of Artificial Sequence: Synthetic coding sequence
  source 1..2406: mol_type = other DNA
atgaagatcgccgtgatcggccagagcctgttcggccaggaggtgtattgccacctcaggaaggaggggcacgaagtagtcggtgtatttacagtgccggacaaggacggaaaggccgatccattgggtctcgaggcagagaaagatggtgtgcctgtttttaaatactctcgatggagggcaaaagggcaagccctgcctgacgtggtagccaagtatcaggccctgggggccgagctgaatgtcctgcccttttgctcccaattcatccccatggagattatatctgcaccacgccacgggtctatcatctaccacccatcactgttgccgaggcaccgcggagcgtcagcgatccacaactggatcagaggtaatgacaaggtccctggcgcctggacagaagcttgcgagcagaaattgactttttttaattccacccttaacactagcggcttagttccggaaggcgatgccttacccatacccggagctcatcgccccggggtcgtgaccaaggccgggctcatcctcttcggaaatgatgacaagatgttgctggtaaaaaatattcagctggaagatggcaagatgatcttagccagtaactttttcaagggagccgcatcttccgttctagagttaaccgaagccgaacttgttaccgccgaggcagtgcgctccgtctggcagagaattctaccaaaagttctggaggtggaagacagtaccgatttcttcaagtcaggggccgccagcgttgacgtcgtgcgcttggtggaggaggttaaggaactgtgcgacgggttggaacttgagaacgaagatgtttatatggcctcaaccttcggagactttatacagctgctagtaaggaagcttcggggggatgacgaggagggtgagtgcagcattgactatgtcgaaatggcagtcaataagcgaaccgtgcggatgccacatcagcttttcattggaggggaatttgtcgacgccgaaggtgccaagacgagcgagaccattaaccctacagatggcagcgttatctgtcaagtgtccctggcccaggtaacagacgtggataaggcggtcgcagcggcgaaggacgcctttgagaacggccgctggggtaaaattagcgcccgcgacagggggcggctcatgtaccgcctggctgacctcatggagcagcatcaagaggagctcgctacgatcgaggcccttgatgcaggtgctgtttatacactcgcactgaaaacccatgtgggcatgagcattcagacctttaggtactttgccggatggtgcgacaaaatacagggaagcaccattccaatcaatcaggcaagacctaatagaaatctgactctgacaagaaaagaacccgttggcgtgtgtggtattatcattccctggaattatccgctgatgatgctctcatggaagaccgccgcctgccttgccgcagggaacaccgttgtcatcaaacctgctcaggtaacaccgctgactgctctcaagttcgctgagctgaccctaaaggccggtattccgaagggagtggtcaacgttctgcccggtagcgggagtctcgttggacagcgcctgtcagatcaccctgacgtcagaaaaattggctttactggtagcaccgaggtgggcaagcacattatgaaaagttgcgctattagtaacgtcaagaaagtgtctctggagctcggcggcaagtccccactcatcattttcgccgactgcgacctgaacaaagctgtacaaatgggaatgtccagcgtgtttttcaacaaaggtgagaattgcatcgcggccggccggctcttcgttgaggactccattcatgatgagttcgtccggagagtcgtggaagaagtgaggaagatgaaggtgggtaacccgctcgacagggatactgaccatgggccacagaatcaccacgcacatctggtgaagctgatggaatactgccaacatggggttaaggagggcgcgacactcgtatgtggcggcaaccaggtacccagacctggattcttcttcgagcccacagtatttacggacgttgaagatcatatgttcattgccaaggaagaaagcttcggcccagtcatgatcatcagccgttttgccgacggggaccttgacgccgtgctgtctcgggctaacgccaccgagtttggactcgcgtctggcgtgtttactcgggatattaataaagctctgtatgtctccgataaactgcaggccggcacggtcttcgtaaacacttataataagactgacgttgcagccccatttggagggtttaaacagtccgggttcggcaaggatctgggagaggctgcccttaacgagtacctgagggtcaagacagtgactttcgagtactag

SEQ ID NO: 178574 - DNA, 1506 bp, synthetic construct
  misc_feature 1..1506: note = Description of Artificial Sequence: Synthetic coding sequence
  source 1..1506: mol_type = other DNA
atgagcagcagcggcacccccgacctgcccgtgctgctgaccgacctgaaaattcaatacactaaaatcttcatcaacaacgaatggcatgattccgtgtcgggcaaaaaatttcctgtctttaatcccgccaccgaggaagaattgtgccaggttgaagaaggcgataaggaagatgtggataaggctgtgaaggctgcaagacaggcgttccagatcggcagtccatggcgaacaatggacgcctctgagagagggcggctcctctacaagctagctgacctcatcgagagagacagactcctgctcgccactatggagtcaatgaatggcggcaagctatattccaatgcttatttgaatgacctggccggctgcattaagacgctgagatactgcgccgggtgggcggacaagatccaaggtcgtactatacccattgatggcaatttttttacatatacgcgccacgagccaataggcgtatgtggacagatcatcccctggaatttccctctcgtcatgctgatctggaaaattggaccagccttatcttgcggcaatacagtggtagtgaagcctgcggagcaaacacccttgaccgcacttcatgtggcttccctgatcaaagaggccggcttcccaccaggcgttgtgaacattgtgcctggctacgggcccacagccggggcagccatcagctctcatatggatattgataaggtggccttcaccggttctacagaggtcggcaagctgataaaggaggctgctggtaaatctaacctgaaacgcgtgacgctcgaattgggagggaaaagcccatgcatagtgttagcagacgcggacctcgataacgcagtcgagtttgctcaccatggtgtgttttatcatcagggtcagtgctgcattgctgcctcacgtattttcgttgaggagagcatatatgacgaatttgtcaggaggtccgtcgagcgggctaagaagtacatactaggcaaccctctcacccctggcgtcacacaaggcccacagatcgacaaagagcagtatgacaaaatactggatcttatagaatcagggaaaaaagaaggtgcaaaactcgaatgcgggggtggaccttgggggaataagggatacttcgtgcaacccactgtgttctcaaatgtcacagatgagatgcggattgccaaagaagaaatattcggacccgtgcagcagattatgaaattcaaatcgctggacgacgtgatcaagagagccaataataccttctatggtctcagcgccggcgttttcacaaaggatatagacaaggccatcaccatttccagcgcgctgcaagcaggcacagtgtgggtaaattgctatggggtggtctctgcccagtgtccatttgggggattcaagatgtctggaaacggccgcgagttgggcgagtatgggtttcatgagtacaccgaagtcaagactgtcaccgttaagatctctcagaaaaatagctag

SEQ ID NO: 178575 - DNA, 693 bp, synthetic construct
  misc_feature 1..693: note = Description of Artificial Sequence: Synthetic coding sequence
  source 1..693: mol_type = other DNA
atgagcagcagcggcacccccgacctgcccgtgctgctgaccgacttaaaaatccagtatacgaagatcttcataaataacgagtggcatgatagtgtatccggcaaaaagttccctgtcttcaatccagcaacagaggaggaactgtgtcaggtggaggagggcgataaagaagatgtcgacaaagcagtgaaggcggctcgccaggcctttcaaatcggtagtccctggcgaactatggatgcttctgaacgggggcgtttactctacaagctggctgatctcatcgaaagggatcgattgctgttggccacaatggaaagtatgaacgggggaaaactatacagcaatgcctacctgaacgacttggcaggttgcattaaaactcttcggtactgcgctggatgggctgataagattcaaggcagaaccatacccatcgatggaaatttttttacctacacccggcatgagcccatcggagtttgtggacaaataatcccttggaattttcccctggtgatgctcatatggaaaattggacctgccttgagttgtgggaacactgtggtcgtgaaacctgcagagcagacgcccctgacagctcttcacgtcgcttcacttatcaaggaagcaggttttcccccgggagtcgtaaacattgtgcccggctatggcgccagtgtggtgtag

SEQ ID NO: 178576 - DNA, 717 bp, synthetic construct
  misc_feature 1..717: note = Description of Artificial Sequence: Synthetic coding sequence
  source 1..717: mol_type = other DNA
atgagcagcagcggcacccccgacctgcccgtgctgctgaccgaccttaagatccagtatacgaagatcttcataaacaacgaatggcacgattctgtaagtgggaaaaaatttcccgtcttcaatcctgccaccgaagaagagttgtgccaggtggaagagggggacaaagaggacgtcgataaagccgtgaaggctgctaggcaggctttccaaatcggctccccctggcgcactatggatgcaagcgaacgaggtaggctgctgtataagttggcagaccttatcgagcgggatcgcctccttctggccactatggagtccatgaacggtggcaagctatattctaatgcctacctaaatgatttggccggatgtatcaagactcttagatactgcgctgggtgggctgacaaaattcagggccgcacaatccccattgatgggaactttttcacgtacaccagacacgaaccaattggtgtgtgcggccagattataccctggaattttcctttggtgatgctaatttggaagatcggcccagccttaagttgcggaaataccgtcgttgtcaaacccgccgagcagactcctttgactgcgcttcatgtggcaagccttatcaaggaagcaggcttccccccaggcgtggtgaatattgtaccagggtatggtcccacagcaggggccgccatcagtagccacatggattag

SEQ ID NO: 178577 - DNA, 990 bp, synthetic construct
  misc_feature 1..990: note = Description of Artificial Sequence: Synthetic coding sequence
  source 1..990: mol_type = other DNA
atcgccgagcccgtgacctgcgtgcccggcgccgagagcgagatgagttcttccggtacaccggatctgcccgtgttgctgacggatctgaagattcaatatactaagatcttcattaataatgaatggcatgactccgtgtcgggaaagaaattccctgttttcaatccagccacggaggaggagctctgtcaggtggaagaaggggacaaggaagatgtagataaggccgttaaggccgcccgacaagcctttcagattggctctccctggcgtaccatggacgccagcgaaagggggcgtcttctgtataagctggcagatttgatcgaaagagacagacttttgcttgcaacaatggagagcatgaatggtggtaagctatatagcaacgcatatctgaacgacctagccggatgtataaagacactgagatactgcgccggctgggccgacaagatacagggaaggaccataccaatcgacggcaattttttcacctacacccggcatgagcccatcggcgtgtgtgggcagatcatcccctggaacttccccctggtgatgctaatctggaagattggtcccgctttgtcatgcggaaataccgttgtggtcaaacccgccgagcagacgccgctgactgctttacacgtagcttcactgatcaaggaggcagggttccccccgggggtagtcaacattgtccctggctacggtcctaccgccggtgcggccattagctcacatatggacatagataaggtggctttcactggaagcacagaggtggggaagctgatcaaggaggccgctggcaagagtaatctgaaaagggtcactctggagttaggcggaaaatcgccttgtatagtgttggccgacgcagacctggataacgctgtggaatttgcgcaccacggggtcttctatcatcaaggccaatgctgtatcgccgcctctagattttgcgggcggattaacctgtag

SEQ ID NO: 178578 - DNA, 612 bp, synthetic construct
  misc_feature 1..612: note = Description of Artificial Sequence: Synthetic coding sequence
  source 1..612: mol_type = other DNA
atgagcagcagcggcacccccgacctgcccgtgctgctgaccgacctgaaaattcagtatacaaagatctttattaataatgagtggcatgactctgtgagcggcaaaaaattccccgtttttaatcctgcaaccgaagaggagttgtgtcaagttgaggagggggacaaggaggacgtggacaaagccgttaaagctgcccgacaggccttccagatcggcagtccttggcggacaatggacgccagtgagaggggccgcttgttatacaagttggctgatctcattgaacgtgaccggttactcttggcgacaatggaatcgatgaatggcgggaagttatatagcaacgcttatcttaatgatttagccggctgcataaaaactttgcggtactgcgctggatgggcagataagatacaaggacggactattcctattgatggaaacttcttcacctatacccgccatgaacccatcggtgtgtgcgggcagatcattccctggaatttccccctggtcatgttgatctggaagattggccctgcactgtcgtgcggcaacacagtggtggtaaagcccgcggagcagacacctctgacagcgctgtag

SEQ ID NO: 178579 - DNA, 1557 bp, synthetic construct
  misc_feature 1..1557: note = Description of Artificial Sequence: Synthetic coding sequence
  source 1..1557: mol_type = other DNA
atgaccagcagcaagatcgagatgcccggcgaggtgaaggccgaccccgccgccctgatggcatcactgcatctgctgccttccccaacgcctaacttagaaatcaaatacacgaagatcttcattaacaatgagtggcaaaattccgagtctggccgtgtcttcccggtctacaatcctgccaccggggaacaggtttgtgaagtgcaggaggctgacaaggccgatatcgataaagctgtgcaggctgccagattggcgttttctctcggcagtgtgtggcgacgaatggacgccagcgaaaggggacgcttgcttgacaaactggccgacctcgtggagcgcgatcgggccgtattggccacgatggagtcgttaaatggcggtaaaccctttctgcaggccttctatgtagatttacagggagttattaaaacatttaggtactacgcaggttgggcagacaagatccatggaatgacaattcctgtagacggagactacttcacctttacaaggcacgaacccattggggtgtgtggacaaataatcccttggaattttcctctgctgatgttcgcctggaaaattgcccctgccttgtgttgcggcaatacagtggtcatcaaaccagccgaacagacccccctgtccgccttatatatgggagctctgatcaaagaagctggattcccccccggcgtgataaacatcctccctgggtacggacccaccgctggggcggctatcgcttcccatatcggcatcgataagattgcatttactggcagtaccgaggtcggcaagctgatccaggaggccgctgggcggtctaacctgaagcgggtgaccctggagctcggcgggaaatctccaaatattattttcgctgacgccgacctcgattatgcagtcgagcaggcccaccagggcgtcttctttaatcaagggcagtgctgtactgcaggttctcgaatcttcgtcgaagaatccatctacgaggaattcgtgaggcgcagcgtggagcgcgcaaagcgacgggtggttgggtctccatttgatcccaccaccgagcagggtcctcagatagataaaaaacagtacaacaagatcctcgaactaattcagagtggcgtggccgaaggagccaagctagagtgtggtgggaaaggcctgggcagaaaaggcttcttcatcgagcctactgtcttcagtaacgtgactgatgacatgcgaatcgccaaggaagaaatattcggaccggtgcaagaaatcctaagattcaaaactatggacgaagtgatcgaacgagccaataacagtgacttcggcctagtggccgctgtcttcacaaatgacattaacaaggcacttactgtgtcatcagcgatgcaggctggaactgtgtggattaattgctataatgcccttaacgcccaaagcccctttggaggattcaagatgtctggtaacggaagagagatgggagagtttggactaagggagtactcagaagtgaagactgtgacggtcaagattcctcagaaaaactcttag

SEQ ID NO: 178580 - DNA, 1443 bp, synthetic construct
  misc_feature 1..1443: note = Description of Artificial Sequence: Synthetic coding sequence
  source 1..1443: mol_type = other DNA
atgaccagcagcaagatcgagatgcccggcgaggtgaaggccgaccccgccgccctcatggcttcactccacctactaccttcacccacacccaacctcgaaatcaaatatacaaagatctttattaacaatgaatggcaaaacagcgagtccggaagagtttttccggtctataatcctgctaccggcgagcaggtgtgcgaagtgcaggaggcagacaaggccgacattgacaaggccgtccaagccgccaggctggctttctcattggggtccgtctggcggcgcatggatgcatccgaacgagggaggttgctcgataagttggctgatctggttgagcgcgaccgagcggtgctcgctacaatggagagtctgaacggcggtaagccttttcttcaggcattctacgtggatctgcagggtgtgattaaaactttccgctattacgccggctgggcggacaagattcatggaatgactatccctgttgatggtgattatttcacctttacacggcacgagcccataggtgtttgtggccagattattccgtggaactttcccctgctgatgttcgcatggaaaatcgctcctgcattgtgttgtggcaatacagtagtaattaaaccagccgagcagacgcccctgtcggctctctatatgggagccctcatcaaggaggtcgggaagttgattcaggaagcagctggtaggtcgaacctgaagagagtcactctggagctggggggcaaatcaccgaacatcatcttcgccgatgcggatctcgactatgcagtggagcaggctcaccagggcgtcttcttcaatcagggacagtgttgcacggcgggctcgaggatcttcgtggaggagagcatctacgaggagtttgtgcgccgctccgtcgagcgcgccaagcgtagggtggtaggctccccctttgacccgacaaccgaacaggggccccaaatcgataaaaagcagtacaacaagatcttggagctcatccagagcggcgtggcagaaggggcaaaattagaatgtggaggtaagggcttgggacgtaagggcttcttcatcgagccaactgtgttctctaatgtgaccgatgatatgaggattgccaaagaggaaatttttggcccggtacaggaaatactacgtttcaaaactatggacgaggttatcgaaagggccaataatagtgactttgggctcgtggccgccgtctttacgaatgacataaataaagcacttaccgtgtccagcgccatgcaggctggtactgtatggataaactgttataatgctctgaatgcacagagccccttcgggggatttaaaatgtccggcaacggcagagaaatgggggagtttggcctaagggaatactccgaggttaagaccgtgactgtcaagattcctcagaagaatagctag

SEQ ID NO: 178581 - DNA, 1494 bp, synthetic construct
  misc_feature 1..1494: note = Description of Artificial Sequence: Synthetic coding sequence
  source 1..1494: mol_type = other DNA
atgaagaaccagtgcgagaccgtgtggctgaagagccccatcaagctgaaactgatttttattaataacgagtggcagaattcggaatctggccgtgtgttcccagtatacaaccctgcgaccggagagcaagtttgtgaagtccaggaggccgacaaagcagacatagacaaagccgtccaggccgcccggctggcattcagcctggggagcgtgtggaggaggatggatgcttcggagcgggggcgccttctcgacaaactggccgacttagtggagagggaccgcgccgtcctggcaactatggaatctcttaacggcggcaagcccttcctgcaggcattctacgtcgacttgcagggcgtgattaagacgttcagatactacgcaggttgggcagacaagattcatggaatgacaattccggtcgatggcgactacttcacgtttaccaggcacgaacctataggagtgtgtggacaaatcattccttggaactttccactgctgatgtttgcatggaagatcgcccccgctctgtgttgcggtaacactgtcgtgatcaagccagctgaacaaaccccattgagcgccttgtatatgggcgctcttatcaaagaagcaggttttcctccaggcgtcatcaatatactcccgggttatggcccaaccgcgggagccgccatcgcctcacacatcgggatagataagatagcctttacaggttcaacagaagtcggcaaactgatacaagaagccgccggcagaagcaatctgaagcgggtgacactggagctgggtgggaagtctcctaacatcatatttgctgatgccgatcttgactacgccgtcgaacaagcccaccaaggtgtgttctttaatcagggccagtgctgtacagcagggtcaaggatcttcgtagaagaaagcatatacgaggagtttgtgcggagaagtgtggaaagagctaaacgaagggtggtaggcagtccgtttgatcctacaactgagcagggcccgcagattgacaaaaaacagtataacaagattctagagttgatacagagcggagttgctgagggcgctaagctggaatgtgggggaaagggcctggggagaaaggggttcttcatcgagcctacagtgttcagcaatgtgaccgacgacatgcgcattgccaaggaagagatttttgggcccgtgcaggagatactgcggttcaaaaccatggacgaagtaatcgagagagcgaataattcggactttgggctcgtggccgcagtcttcaccaacgatatcaacaaagctctcacagtctcatcagcgatgcaggcaggaaccgtatggataaactgttataacgcgctgaatgcccagtctccattcgggggatttaagatgtctggcaatggcagagaaatgggtgagtttggactgcgcgagtatagcgaggtgaagactgtgactgtgaaaatccctcagaagaattcttag

SEQ ID NO: 178582 - DNA, 1470 bp, synthetic construct
  misc_feature 1..1470: note = Description of Artificial Sequence: Synthetic coding sequence
  source 1..1470: mol_type = other DNA
atgaagggcaagaactgcaacgacgtgaagatcttcatcaacaacgagtggcaaaacagtgagtccggccgcgttttccccgtatataaccctgctactggagaacaggtttgtgaggttcaagaggcagacaaagccgatattgacaaagccgttcaggccgcccggctggcgttttcgctgggttcagtctggagacgcatggacgcttccgagcgcggcagactgctggataagttggcggacctagtggagagggatagagcggtgcttgccactatggaaagtctgaatggtggcaaaccgtttctgcaggcattctacgtagatctacaaggtgtcattaaaacattccggtattatgccggatgggccgacaagatccatgggatgacgatcccggtggatggagattacttcactttcactcgacacgaaccgataggtgtctgtggacaaatcatcccatggaattttcccctactcatgttcgcatggaaaatagcccccgctttatgctgcggaaatactgtggtaatcaagcccgccgaacagaccccattatccgcattgtatatgggcgcactgatcaaggaggcagggtttcctcccggcgtgatcaatattctccctgggtacgggcccacagcgggcgccgccatagcatcacacattgggatcgataagatcgcttttacaggctccacagaggtgggtaagctcatccaggaggccgccggcagatctaacctgaagcgtgtgaccctggagctaggcggtaaatccccaaacatcattttcgctgacgctgatctggattatgcagtggaacaggcgcaccagggggtgttcttcaaccagggacagtgttgcacagctggatctagaattttcgtggaagagtctatctatgaggaattcgtgcgacgtagcgttgaaagagccaagagacgagtggtgggatccccatttgatcctaccactgagcaaggccctcagatagataaaaagcagtacaataaaatcctggagcttatacagtcaggcgtggctgaaggcgccaagctcgaatgcggagggaaaggactgggcagaaagggctttttcatcgagcccacggtgttctcaaatgtgaccgacgatatgaggattgctaaagaggagatctttggcccagtgcaagagatccttcgctttaaaaccatggacgaggtgattgagcgcgctaataacagcgatttcgggctggtcgctgcggtgttcaccaatgacatcaacaaggctctgaccgtcagctcagccatgcaggccgggacggtttggataaactgttataacgcactgaacgcccagtctccatttggcgggttcaagatgagcgggaatggacgtgaaatgggggagtttgggctcagagaatactctgaggtgaagacggtaacggtgaaaattccacagaagaactcgtag

SEQ ID NO: 178583 - DNA, 30 bp, synthetic construct
  misc_feature 1..30: note = Description of Artificial Sequence: Synthetic coding sequence
  source 1..30: mol_type = other DNA
atggacgccagcgagcggggccggctgtag

SEQ ID NO: 178584 - DNA, 1470 bp, synthetic construct
  misc_feature 1..1470: note = Description of Artificial Sequence: Synthetic coding sequence
  source 1..1470: mol_type = other DNA
atgaagggccggaactggaagaccaccaagatcttcatcaacaacgaatggcagaactcagagtccggaagggtgttccccgtgtacaaccccgcgacaggcgaacaggtttgcgaagtacaggaagcagacaaggcagacatcgacaaggctgtccaagccgcaaggttggcgttttcgctggggtcagtttggcggcgcatggacgcttcagagcgcggtcgcctgctagataagttggccgatctagtcgaaagagaccgcgcagtgctcgccacgatggagtcactgaatggtgggaaaccttttcttcaggctttctacgtcgacttgcagggcgttattaaaacattcagatactacgccggctgggccgacaaaatccatggaatgactatacccgtggacggggactattttacttttacacgacatgaacccatcggagtttgcgggcaaatcataccgtggaattttcccctactgatgtttgcttggaaaatcgcccccgccctctgttgcggaaacaccgtggtgatcaagcctgccgagcagacccccctttccgctttgtacatgggtgctttaataaaagaagccggctttccacccggcgtgattaatatcctcccaggctatggccctactgcaggagccgccatcgcctcccatataggcattgataaaatcgccttcacaggtagcactgaggttggcaaactaatccaggaagctgcaggtagatcgaatctgaagagggtgacattagagctggggggaaaatcaccaaacataattttcgctgatgccgatctggactatgctgttgaacaagcccaccagggggttttcttcaaccagggccagtgttgtacagctgggagcaggatcttcgtagaagagtccatatacgaagaattcgtcagacgatccgtggaacgggcgaaaagacgagtagttggctctccattcgatcccacaacagaacaaggcccacagattgataagaaacagtacaacaaaatacttgagctgatccaaagtggggtcgcagagggagccaagttggagtgcggtggcaaaggcctgggaaggaagggcttttttatcgagccaacagtcttttccaatgtgaccgacgacatgaggatagcgaaagaagagatctttggtcccgtgcaggagattctgcggtttaagaccatggacgaggtgattgagagagcgaataatagtgacttcggcttagtcgctgcggtgtttaccaacgacattaacaaagcattgactgtcagcagcgccatgcaggcagggaccgtctggatcaactgctacaacgccctcaacgctcagtctccgttcggtggttttaaaatgagcggaaacgggcgcgaaatgggcgaattcggcctgcgcgagtattcagaggttaaaacagtgacagtaaaaatcccccagaaaaactcatag

SEQ ID NO: 178585 - DNA, 78 bp, synthetic construct
  misc_feature 1..78: note = Description of Artificial Sequence: Synthetic coding sequence
  source 1..78: mol_type = other DNA
atggacgccagcgagcggggccggctgctggacaagctggccgacctggtcgagcgcgatagagccgttctcgcctag

SEQ ID NO: 178586 - DNA, 1269 bp, synthetic construct
  misc_feature 1..1269: note = Description of Artificial Sequence: Synthetic coding sequence
  source 1..1269: mol_type = other DNA
atggacgccagcgagcggggccggctgctggacaagctggccgacctggtggaacgtgacagggcagtgttggcaaccatggaatccttgaatggggggaaaccattcctgcaggcattctacgtggacctccagggagttatcaaaacatttcgctattatgccgggtgggctgacaaaatacacgggatgacaattcccgttgatggcgactactttacattcactcggcacgagcccatcggcgtgtgtgggcagatcataccctggaattttccgctgctgatgttcgcctggaagatcgccccagcgctttgctgcggcaacacagtagtgatcaagccagccgaacagaccccactgtcagccctttacatgggagcactcattaaggaagcaggttttccccctggcgttatcaacatcctccctgggtacggaccaacagctggggctgcaattgcctcacacatcggcattgataagatcgcattcaccggcagcaccgaggtcggaaaactgatccaggaggcagccgggaggtcaaacttgaagcgtgttacgctcgagttgggcggaaaatcccccaatattatctttgccgacgctgacctggactatgcagtggaacaagctcatcagggggtttttttcaaccagggccagtgctgcaccgctgggtctcggatttttgtcgaagagtcgatttatgaggaatttgtgcggagatctgtggaacgggccaagcgtcgcgtggttgggtctcctttcgatcccaccacggagcagggcccgcaaatcgataagaaacaatataataaaattctggagctcattcagagcggggtcgccgagggtgctaaactagagtgcggcggtaaaggactgggacgaaaggggttcttcatcgaaccaactgttttttccaatgtcaccgacgatatgaggatagcaaaggaagagatcttcggacccgtgcaggaaatcctgcggtttaaaacaatggatgaagtaattgagcgcgcaaataactccgactttggactggtagccgctgtgtttactaacgacataaataaggctttaacagtaagttccgccatgcaggctggcacagtgtggatcaactgttacaatgcgttgaacgcccaatcccccttcggcgggttcaaaatgagcggcaacgggcgtgagatgggcgaattcgggctgagagaatattcagaggtgaagaccgtgaccgtgaaaatcccacagaaaaactcctag

SEQ ID NO: 178587 - DNA, 258 bp, synthetic construct
  misc_feature 1..258: note = Description of Artificial Sequence: Synthetic coding sequence
  source 1..258: mol_type = other DNA
atggacgccagcgagcggggccggctgctggacaagctggccgaccttgtggaacgggatcgagccgtgctggccacaatggaatccctgaatgggggcaaaccatttcttcaggcattctacgttgatctgcagggcgtcattaagactttccggtactacgctggctgggcagataagatccacgggatgacaattccagtggacggagattattttacttttacacgccacgaacctattggcgtttgcggatag

SEQ ID NO: 178588 - DNA, 1539 bp, synthetic construct
  misc_feature 1..1539: note = Description of Artificial Sequence: Synthetic coding sequence
  source 1..1539: mol_type = other DNA
atggccaccgccaacggcgccgtggagaacggccagcccgaccggaagcccccagccttaccccgccccattagaaatctggaagtgaaattcaccaagatcttcataaacaacgagtggcatgaaagcaaaagtggcaaaaaatttgccacatgcaacccgtccacacgcgagcagatctgcgaagtcgaagagggagataaacccgacgtcgataaggccgttgaagcggctcaagtggcctttcaaagaggcagtccctggcgcagactggatgcactatcacgcgggagattattgcaccagttggcagatttggtggagcgcgatagggccactctggcggcactcgaaaccatggacacaggcaaaccattcctgcatgcctttttcatcgatttggaaggctgtattcgtaccctgaggtacttcgctggctgggcggataagattcaagggaagaccataccaaccgatgacaatgtggtctgctttactagacatgaaccgatcggggtgtgcggcgccatcaccccctggaactttccactgctgatgttagtgtggaagctagccccggctttgtgctgcggtaatacgatggtgcttaaacctgccgaacagacacccctgacggctttgtatttagggtctctgatcaaggaggctgggtttcctcctggggttgtaaacattgttcccggtttcggccccacagtaggtgcagccatctctagccatccacagataaacaaaatcgctttcactggcagtactgaggtggggaagctcgtcaaggaggctgcctcaagaagtaacctcaagagggtgacattggaactcggcggaaaaaatccatgcatcgtgtgtgctgacgctgatctggacttggcggtcgagtgcgcacaccagggcgtgttctttaaccagggtcagtgttgcacagccgctagtcgcgtgttcgtcgaggagcaggtttactctgagttcgttcggagatccgtcgaatatgctaaaaagcggcccgtcggtgatccttttgatgtgaaaacagagcaggggccacagatcgatcagaaacagttcgataaaattctggaactgatcgagagtggaaaaaaggagggcgccaagttagagtgtggtggatctgctatggaagacaagggattgtttatcaagcccacagttttctctgaggttaccgataacatgagaatcgccaaagaggaaatcttcggccccgtgcagcctattctgaagttcaagagtattgaagaagtgatcaagagggccaactcaactgactacggtctgactgcagctgtctttactaagaacctggacaaggccctgaagcttgctagcgctctagagtctgggacggtttggatcaactgttacaacgctttgtatgctcaggctcccttcggtggctttaagatgtctggcaatggccgagagttgggcgagtacgccctagccgagtatacagaagtgaagactgtcacgataaaactgggggataaaaatccatag

SEQ ID NO: 178589 - DNA, 456 bp, synthetic construct
  misc_feature 1..456: note = Description of Artificial Sequence: Synthetic coding sequence
  source 1..456: mol_type = other DNA
atggccaccgccaacggcgccgtggagaacggccagcccgaccggaaacctccagccttgccgcgccccattaggaatctggaggtaaagttcacaaaaatcttcattaataatgaatggcatgaatccaagtccggcaaaaaattcgccacgtgtaaccctagcaccagggagcaaatttgcgaggttgaggagggcgataaaccggacgttgataaggctgtggaagctgcacaggtcgcattccaaagaggtagcccttggcggcgtctggacgcgttgtctcgcgggagattgctgcatcagcttgcagatttagttgagagggaccgggctactctcgcagcactggagaccatggatactggcaagccttttttgcacgctttttttatcgacctggaaggttgtatcaggacgctgagacttatcaaaagctcttctacaaaatcttag

SEQ ID NO: 178590 - DNA, 1554 bp, synthetic construct
  misc_feature 1..1554: note = Description of Artificial Sequence: Synthetic coding sequence
  source 1..1554: mol_type = other DNA
atgctgcggttcctggccccccggctgctgagcctgcagggccggacggcacgatattcaagtgccgcagcactgccctctcctattctgaaccctgacatcccctataatcagttgttcatcaacaatgagtggcaagatgcagtctctaaaaaaacatttcctacagtaaaccccacaactggggaagtgatcgggcacgtggctgagggagatagggccgacgtggaccgtgctgtaaaagcggcacgagaggcttttaggctcgggtcgccttggaggaggatggacgcttctgagcgtggcaggctactgaacaggctggcggatttggttgaaagagaccgggtctacttggccagtcttgagacactcgacaatgggaagcccttccaggagtcctatgcacttgatttagatgaagtcattaaagtgtatcgctactttgccggctgggccgataaatggcacggaaaaactatccccatggatggccaacatttttgctttacccgacacgaacccgtaggcgtctgcggccaaattattccgtggaatttcccgcttgtcatgcaaggctggaagctggccccggccctggctaccggaaacactgttgtcatgaaagtagccgaacaaacaccactgagcgcgctttacctggcctctctcataaaagaagccggatttccaccaggcgtcgtaaatatcattactggatacgggcccacagcaggggctgcaatcgctcaacatgtagacgttgacaaggtggccttcacaggttctaccgaggtcggtcacctcattcagaaggcagcaggcgactccaatctcaagagggttacattggaactgggcggtaaaagccccagcattgtccttgcagatgcagatatggagcacgcggtggagcagtgtcacgaggccctattctttaacatgggtcagtgctgctgtgctgggagcagaactttcgtcgaggaatcaatctataacgaattccttgagcggacagtggagaaagctaaacagagaaaagtgggcaatccctttgaactggatacgcaacagggacctcaggtggacaaggaacagttcgagcgtgtgctaggctatatccagttgggtcagaaggagggcgcaaaattgctctgcggtggtgagcggttcggcgaacgcggattttttatcaagcccacagtgttcgggggggtgcaggatgacatgcggatcgccaaggaggagatttttggcccagtgcaaccccttttcaagtttaaaaagattgaggaagtggttgaaagagcaaacaatacacgctacggcctggccgccgcagtctttacccgtgatttggacaaggctatgtacttcacacaggcactgcaagcaggtacagtctgggtgaacacttataacatcgtgacttgccacactcccttcggcggttttaaagagagcggcaatgggagagagctcggtgaagatgggctcaaggcttacacagaagtgaaaactgtcacaatcaaagtcccacagaagaattcatag

SEQ ID NO: 178591 - DNA, 657 bp, synthetic construct
  misc_feature 1..657: note = Description of Artificial Sequence: Synthetic coding sequence
  source 1..657: mol_type = other DNA
atggagcacgccgtggagcagtgccacgaggccctgttcttcaacatgggacagtgctgctgtgcgggctcacgaacctttgttgaagagagcatctacaatgaattcctggaaaggacagtagagaaggctaagcagagaaaggtaggtaatccgttcgagctggacacccagcaaggcccacaggtcgacaaagagcagtttgaacgcgttctcggatacatccagctcggtcaaaaggaaggcgctaagttactttgcggaggtgagagattcggagagcgcggttttttcatcaaacctaccgtctttgggggtgtgcaggacgatatgcggattgcaaaagaagagattttcggacctgtgcagccgttgtttaagttcaagaagatagaggaggtcgttgagcgcgcaaataataccagatatggtctcgcagcagcggtttttactcgagacttggataaggccatgtattttactcaggctctgcaggctggcacggtgtgggttaatacatataacattgtgacttgccacaccccttttggaggctttaaggagtccgggaacgggcgcgagctgggagaggacggcctgaaggcttataccgaagtgaagactgttacaattaaggtcccacagaaaaacagctag

SEQ ID NO: 178592 - DNA, 2739 bp, synthetic construct
  misc_feature 1..2739: note = Description of Artificial Sequence: Synthetic coding sequence
  source 1..2739: mol_type = other DNA
atggccggccccagcaacccccccgccaccatgaagatcgccgtgatcgggcagtccctctttgggcaagaagtctattgtcatctcagaaaggaaggccacgaagtggtgggcgtgttcaccgtgcccgataaagatggaaaggcggacccactcgggctggaggctgagaaggatggggtgccagtgttcaagtattcgcgatggcgcgctaagggacaggcattgcctgacgtggttgccaagtaccaggcactaggagctgaactcaatgtccttccattctgttcacagttcattcccatggagatcattagtgcgcctaggcatggtagcatcatctatcacccatcactgctccctcgacatcgcggcgccagcgcgatcaattggacattgattcatggagataagaaagggggcttcagtatcttttgggctgacgacggcttagacactggggatctgttacttcagaaggaatgcgaggtactgcccgacgatacggtctccaccctctataacaggtttctgttccccgaagggattaaggggatggtgcaggcggtgagactgatcgccgaggggaaggccccacgtcttcctcagcctgaagagggtgcaacatatgagggtatccagaagaaggaaaccgcaaaaattaattgggatcaaccagccgaagctattcataattggattcgagggaacgataaggtaccgggagcttggaccgaagcctgcgagcagaagctgaccttcttcaactcaacattgaataccagtgggctggttcctgagggcgatgcgctaccgatccctggggcgcacagaccgggtgttgtgaccaaggcaggcctgatactcttcggtaacgatgacaagatgctactggttaaaaacatccaacttgaggacggaaagatgattttagcgagcaacttcttcaagggagctgcctcaagtgtgctggagctgacggaggccgagctggtgacagccgaggcagtgagaagtgtgtggcaacgcatactgcccaaggtgcttgaggttgaagactccaccgatttcttcaagagtggggccgccagtgtagacgtggtgcgattggtggaagaggtgaaggagctttgcgacggactggagctggagaacgaggatgtgtacatggcaagtacgtttggggatttcattcagttactggtgaggaaacttcggggagacgacgaagaaggcgagtgtagcattgactatgtggaaatggctgtgaataagaggactgtgcgaatgccgcatcagctgttcataggtggcgaattcgtcgatgctgagggcgccaagaccagtgagaccattaaccccaccgacggctccgtcatctgccaggtgtcgctggcgcaggtcacagatgtcgataaggccgtggcggccgcaaaggatgcattcgaaaacgggcggtgggggaaaatctctgcgcgcgaccgcggtcggctaatgtatcgcctcgccgatctgatggagcaacatcaggaggaattagcgacgatcgaggccctcgacgccggcgcggtctacactctggccctgaaaacccacgttggaatgtctatacagacattccggtattttgctggatggtgcgacaagatccagggcagcacaatcccaatcaaccaggcgcggcccaacaggaacctgactctgacgcgaaaggaacctgtcggcgtgtgtggcatcattatcccatggaactacccactgatgatgttgagttggaaaaccgctgcctgcctcgcggcgggcaacacagtcgtgatcaagccagcccaagtgacccctctcactgccctgaaatttgccgaactcacccttaaggctggtatccctaagggggtcgtgaacgtgctgcctggttctggaagcctggtgggccagcggctgtcagatcaccctgacgttcgcaaaatcgggttcactggaagtaccgaagtcgggaaacatatcatgaagtcatgcgccatctccaatgtgaaaaaggtttcgttagagcttggggggaaaagtcccctcattatctttgctgactgtgacctcaataaggccgttcagatgggcatgtcatccgtatttttcaataagggagagaattgcatcgccgctggtcggctgttcgtggaagatagtatacacgacgagtttgtccgcagggttgtcgaggaggtgcgcaaaatgaaagtagggaatccactggaccgagacacagatcatgggcctcagaaccatcatgcccatttagtcaaactgatggagtattgtcagcatggagtaaaagaaggagccactttggtgtgcggagggaaccaggtcccacggcctggatttttcttcgaaccaactgtatttacagacgtcgaggatcatatgtttatcgctaaggaagaaagtttcggccccgtgatgatcatatctcggtttgcagacggcgatcttgacgccgtattgagtcgcgctaacgcaactgaattcggcctggcctcgggggtatttacccgcgacatcaataaggccttgtatgtcagtgataagcttcaggcaggtaccgtgttcgtgaatacgtataacaagacagacgtcgccgccccgttcggcggttttaaacagagcggcttcggaaaggatttaggtgaagcggcgctgaatgaataccttagagtgaagacagtaacttttgaatactag

SEQ ID NO: 178593 - DNA, 1518 bp, synthetic construct
  misc_feature 1..1518: note = Description of Artificial Sequence: Synthetic coding sequence
  source 1..1518: mol_type = other DNA
atgaagatcgccgtgatcggccagagcctgttcggccaggaggtgtattgccatctgaggaaagagggccatgaggttgttggcgtgtttaccgtgcctgataaggacggcaaggccgaccccctaggtcttgaggccgaaaaagacggagtcccagtatttaaatatagtaggtggcgagccaagggacaagcactgcccgatgtagtggcaaagtaccaggccctcggcgcagagcttaacgtcctccctttctgttcacagttcatccccatggagataataagcgcccctcgccatggaagtattatctatcaccctagcctgctcccaaggcatcggggggccagcgcaatcaactggacattgatacacggggataagaaagggggtttctccatcttttgggcagacgacggccttgacaccggcgatctgctacttcagaaggagtgtgaggtcttacccgatgatacggtttctactctctataatcgattcctctttccggagggtattaaaggtatggtacaggccgtcagacttatagccgaagggaaggccccaaggttacctcaaccagaggagggagctacttatgagggaattcagaaaaaggagactgccaagatcaactgggatcagcccgccgaggcaattcataattggattagaggtaacgacaaagtgccaggcgcctggacagaagcctgcgagcagaagctcacattctttaatagcacattgaatacctctgggctggtgcccgagggagacgctctccctattcctggtgcccatcgaccaggcgtagtgaccaaagctgggctgattctttttggaaatgatgacaagatgctcctggtcaaaaacattcagctggaggacgggaagatgatactggcctcaaatttctttaagggggcagcttcttctgtgctcgagctcaccgaggctgagctggtgacggccgaggctgtgcgctcagtctggcagaggatcctacccaaagtgctcgaggtcgaggactccaccgacttttttaaaagcggcgctgcaagtgtcgacgttgtgagacttgtagaggaggtgaaagagctttgtgacggccttgagctcgagaatgaggatgtgtacatggcatcaacattcggagatttcatacaactgctggtgcgaaaactccgcggcgatgacgaagagggcgagtgtagcattgactacgtagaaatggctgtcaataagagaaccgttcgcatgcctcaccagctgtttatcggtggtgaatttgtagacgcggaaggcgcaaaaacctccgagaccatcaaccctactgacgggtctgtgatatgtcaggtaagcctagctcaggtgaccgatgtagataaagctgtggccgccgctaaagacgccttcgagaatggcagatggggcaaaatcagcgctagagacagagggcggctaatgtatcgagcgcccccatcacccagtacacgtccagaccccactgccacttag

SEQ ID NO: 178594 - DNA, 2709 bp, synthetic construct
  misc_feature 1..2709: note = Description of Artificial Sequence: Synthetic coding sequence
  source 1..2709: mol_type = other DNA
atgaagatcgccgtgatcggccagagcctgttcggccaggaggtgtattgccatcttcgcaaggaggggcatgaagtcgtgggcgtgtttacggtcccggacaaagacgggaaggccgatcccctaggacttgaagctgaaaaggatggtgtaccggtgttcaaatatagccggtggcgggccaagggacaggcattgccagacgtcgtggctaaatatcaagcgctcggggcagagctgaatgtgttgccattctgttcacaattcatccctatggaaattatttctgcccccaggcacggtagcatcatataccatccatctctcttgccacgtcatcgaggagctagcgctatcaattggaccctcatccatggggacaagaagggagggtttagcatcttctgggccgacgacggattggataccggagatctgctgcttcaaaaagaatgcgaagtacttccagacgacaccgtgtcaaccctctacaataggttcctctttcccgagggaatcaagggaatggttcaagctgtgcgcctgatcgccgagggtaaggcgcctagactcccccaaccagaggagggagcaacctatgaaggaattcagaagaaagaaaccgcaaaaatcaattgggatcagcctgctgaggccatccacaactggatcaggggaaatgataaggtgcctggagcctggacggaggcgtgcgaacagaagctgacattcttcaactcaactctgaacacatcaggcctcgtgcccgagggagacgctttacctatccccggcgcgcacaggccaggagtggtgaccaaagctgggctcattctgtttgggaacgatgacaagatgctccttgttaaaaatatccagcttgaagatggaaagatgatccttgcctccaatttcttcaagggcgccgcgtcctctgtgctagagttgaccgaggctgagcttgtgactgctgaagccgtgcgaagcgtgtggcaacgcatcctacccaaagtcctggaggtcgaagactccaccgatttttttaagagcggagcagcctctgtggacgttgtcaggcttgtcgaggaggtgaaggaactctgcgatggcctggaattagaaaatgaggacgtttacatggcaagtacattcggagactttattcagctgttggtgcggaaactgcgcggggatgatgaggaaggagagtgttccatcgactacgtggagatggccgtaaataaaaggaccgttcgtatgccccaccagctcttcattggcggcgaattcgttgatgccgaaggcgctaaaacctcagagaccattaatcccacagacgggagtgtgatctgtcaggtcagccttgcacaggttacagacgttgataaggccgtggctgctgccaaggacgcttttgaaaatgggaggtggggcaaaatttctgctcgcgatcggggccgcctgatgtaccgcctcgcagacctaatggaacagcaccaggaagaactggccaccattgaggcactcgacgctggagccgtttacaccttggccctcaaaactcatgttggaatgtccatacaaacctttagatattttgccggctggtgcgacaaaatccaagggagcacaattcctattaatcaggctcgtcctaatagaaatctgaccctcactaggaaggagcctgtgggcgtgtgcggaataatcatcccttggaattaccctctgatgatgctgagctggaagaccgcagcttgcctcgctgcaggaaacacagtggtaatcaagcccgcccaggtgaccccacttactgccctcaagttcgctgaactaacactgaaagctggaattcccaagggggtggttaacgtactgcccggcagcggatctcttgtcggtcagaggctaagcgaccaccccgacgtccgtaaaataggttttacaggctctaccgaagttgggaagcacatcatgaagtcatgcgccattagcaatgtgaagaaggtcagcctggaactcggaggtaagagcccccttatcatttttgctgactgcgacttaaataaagcagtccagatggggatgtccagcgtgttcttcaacaagggcgaaaattgcattgccgcaggaaggctgttcgtggaggattccatacacgatgagttcgtccgccgggtcgttgaggaggtcagaaagatgaaggttggtaacccgctagatcgggacactgaccacggcccgcagaaccatcatgcccacttagtgaaactcatggagtattgtcagcacggcgtcaaagaaggtgctacgctcgtgtgtggcggtaaccaagtccctcgccccggcttttttttcgaaccaacagtcttcacagacgttgaggaccatatgttcattgccaaagaagaatcatttggtcctgtaatgatcatttctagatttgcagacggcgacctcgatgccgtcttgagccgggcaaatgccacagagttcgggctggctagtggagtttttactagagacattaacaaagcattgtatgtgagtgataagttgcaggctggtaccgtatttgtgaatacttacaataaaaccgacgtggccgcgccttttggcgggtttaaacagagcgggttcgggaaggacctcggcgaggcggccctgaatgagtatctccgagtgaaaaccgttacgttcgaatactag

SEQ ID NO: 178595 - DNA, 483 bp, synthetic construct
  misc_feature 1..483: note = Description of Artificial Sequence: Synthetic coding sequence
  source 1..483: mol_type = other DNA
atggtgcaggccgtgcggctgatcgccgagggcaaggccccccggctcccccagcccgaagagggtgctacatacgaggggattcagaaaaaggaaactgccaaaatcaattgggatcagcccgcagaagctatccacaactggatcagaggaaacgataaagtcccgggagcgtggacggaggcctgtgagcagaaactgacctttttcaacagtaccctaaacaccagcggcttggtgccagagggtgacgctttgccaatcccaggcgcccatagaccaggggtggttacaaaagcaggccttattcttttcggaaacgacgacaagatggttcgggcgagactgtgggtgacatgtctcctgaaggcaacccacgctcctgtgctcgggcttcggccgcatcgtaagacgctcggatcgtcgggcgagaatggaaaaaatcagactcaggagggcacactaacactcatatgtccctag

SEQ ID NO: 178596 - DNA, 507 bp, synthetic construct
  misc_feature 1..507: note = Description of Artificial Sequence: Synthetic coding sequence
  source 1..507: mol_type = other DNA
atgaagatcgccgtgatcggccagagcctgttcggccaggaggtgtactgtcatttgcgaaaggaaggccacgaagtggtgggtgtgtttacagttccagacaaagatggtaaggccgacccattagggttggaagccgagaaagacggggttcccgtgttcaagtactctcgatggcgagctaagggccaagctctccctgatgtggtggctaagtatcaggcactgggcgcagagttaaatgttttacctttctgcagccaatttatccccatggagataatcagcgccccccgtcacggatccataatctatcatccaagcctgctaccacgccatcgaggagctagcgccatcaactggacgctgatacacggcgataaaaagggtggtttttccatattttgggccgacgatggactggacacgggggacctgctgttacaaaaggaatgtgaggtactgcccgatgacaccgttagcactctctacaataggttcctgtag

SEQ ID NO: 178597 - DNA, 2709 bp, synthetic construct
  misc_feature 1..2709: note = Description of Artificial Sequence: Synthetic coding sequence
  source 1..2709: mol_type = other DNA
atgaagatcgccgtgatcggccagagcctgttcggccaggaggtgtactgccatcttagaaaagagggtcacgaagtagtgggcgtgttcactgtccccgataaggacggtaaggctgaccccctcggcctggaagccgagaaagacggggtcccagtgtttaagtattcgagatggcgggcaaagggacaagcactgcctgatgtggtagcgaagtaccaagcacttggcgcggagctcaatgtactgcctttttgtagtcagtttattcccatggagatcatttccgctcccaggcacgggtctatcatctaccaccctagtcttctcccaaggcatcggggcgcatcagccatcaattggacactcatccacggggacaagaaaggtggcttcagtattttctgggccgatgatggcttggacactggcgacctgttgctgcaaaaagagtgtgaggtccttcccgatgacacagtctcaacactctataaccggttcctgttcccagaaggcatcaaggggatggtgcaggccgttagactgattgcggaggggaaggcacctcgcctcccacagcccgaagaaggcgccacatacgaagggatccaaaaaaaagagaccgccaaaattaattgggaccagccagcagaagccatccataattggattcgcggcaatgataaggtgcctggagcatggacagaggcgtgtgagcagaaactgacctttttcaatagcaccctgaacacttctggactcgtgcctgaaggggatgcattaccaattccaggggcccaccgcccaggcgtggttacgaaagctggattgatcctgttcggaaatgatgacaaaatgctgctagtcaagaacatccagttggaggacggaaagatgatactggcttcaaatttcttcaagggggcagccagcagtgtgcttgagctgaccgaggcagaacttgtgactgcggaggctgtgcggagtgtatggcagaggatcctcccgaaggtgctggaagtggaggactccactgacttttttaaaagcggggccgctagcgtggacgtggtgagactcgttgaggaagtgaaggaattgtgtgacgggctggagcttgagaacgaggacgtctacatggcctctacctttggggatttcatccagctgctggtgcgtaaactgcgtggtgatgacgaggagggcgagtgctctatcgactatgtcgagatggctgtgaacaagcgcaccgtgaggatgccccaccagctatttatcggcggcgagttcgtggacgcggaaggcgccaaaactagcgaaaccattaatccaactgatggttcagtgatatgccaggtgagcctggcacaagttaccgacgtcgacaaggctgtggctgccgccaaagacgcttttgagaacggccgctgggggaagatcagcgctagggaccggggtcgtctgatgtacagactggcagatctgatggagcaacaccaggaagaactagccacaattgaagcactagacgccggggccgtttatacactggcgctgaagactcacgtcggaatgagcatccagacctttcggtactttgctgggtggtgtgacaaaatacagggctctaccatcccaattaaccaggcacggccaaatagaaatctgaccttgactaggaaagagcctgttggcgtctgtggcattattatcccatggaactatccattaatgatgttgagctggaagactgcagcttgtctcgctgctggaaacacagtcgtgatcaagcccgctcaggtgactcctctgactgccctgaaatttgctgaacttactctgaaggctggcatccctaagggagtggtgaacgtactcccggggtcaggttctttggtcgggcagcgactgtccgaccatccagacgtgaggaagataggcttcactggatctaccgaagttggcaagcacataatgaagtcttgcgccatttctaacgttaaaaaggtgagcctggagttaggcggtaagtccccactaattattttcgctgattgtgacttgaacaaggcggttcagatgggaatgagctccgtgtttttcaacaaaggggaaaattgtatcgccgcaggcagattgtttgtagaggactcaattcatgacgagtttgtgcgccgagtggtagaggaagtcaggaaaatgaaggtgggcaatccactggatcgcgacaccgatcatggcccgcagaatcaccatgcacatctggtcaagctgatggagtactgtcaacatggcgtcaaagaaggcgcaaccctggtgtgcggtggcaatcaggtcccccgccctgggttcttcttcgagccaaccgttttcacagatgtggaggaccatatgtttatagctaaagaggagtccttcggacctgtgatgatcatttcacggtttgctgatggtgatctggatgcggtgctcagccgcgctaacgccacggagtttggactggcgtctggggtgtttacaagggatattaataaagctttatatgtgtccgacaagttgcaagctggtacagttttcgtgaatacatataacaaaacggatgtagccgccccttttggcggattcaagcagtcgggattcggcaaggaccttggggaggctgctctgaatgagtacctgcgcgtgaagaccgtaaccttcgagtattag

SEQ ID NO: 178598 - DNA, 474 bp, synthetic construct
  misc_feature 1..474: note = Description of Artificial Sequence: Synthetic coding sequence
  source 1..474: mol_type = other DNA
atgaagatcgccgtgatcggccagagcctgttcggccaggaggtgtactgccatctgaggaaagagggtcatgaagttgtgggcgttttcacggtgcccgacaaggacgggaaagccgaccctctcggcctggaagctgagaaggacggggttcctgtgttcaaatattcacgatggcgtgctaaaggccaggcccttcccgatgtcgtagcaaaataccaagccctgggggctgaactcaatgtcctgcccttttgtagtcaattcattcccatggaaatcatcagcgccccaagacacggaagtataatttatcatccctccctccttccccgacatagaggcgcatcggccatcaattggacactgatccatggtgacaagaagggaggattctccattttctgggccgatgatggcctggataccggagatttgctactgcagaaggaatgtgaggtgctgccagattag

SEQ ID NO: 178599 - DNA, 534 bp, synthetic construct
  misc_feature 1..534: note = Description of Artificial Sequence: Synthetic coding sequence
  source 1..534: mol_type = other DNA
atgaagatcgccgtgatcggccagagcctgttcggccaggaggtgtattgtcaccttaggaaggaaggtcatgaggtggtcggcgtctttacagtccccgacaaggacgggaaagccgaccctctgggactggaggccgagaaagacggggtccccgtctttaagtactcccgatggcgagcaaaggggcaggccctccccgatgtggtggcaaaatatcaggccctcggcgcggaattaaacgtcctgccattttgcagtcagtttattccaatggaaattatctccgccccgcggcatggaagtatcatctaccaccctagcttgctccctagacataggggcgcgtcagctatcaattggacccttatccatggggacaagaagggaggattcagcatattttgggccgacgacggtctcgacaccggcgacctgttgctgcagaaggagtgtgaagtcctccccgatgacacagtttctactctttataaccgattcctctttcctgaagggattaagggaatggtgtag

SEQ ID NO: 178600 - DNA, 303 bp, synthetic construct
  misc_feature 1..303: note = Description of Artificial Sequence: Synthetic coding sequence
  source 1..303: mol_type = other DNA
atgaagatcgccgtgatcggccagagcctgttcggccaggaggtgtactgccatttaaggaaagaaggccatgaggtggtaggcgtgttcactgtgcctgacaaggatggtaaagcagaccctctgggtctggaggccgagaaggatggggtccccgtgtttaagtatagcagatggcgcgcgaaaggtcaagctctgccagatgtcgttgcaaagtatcaggccctgggggccgagctaaatgtgcttcccttctgtagtcagtttatacccatggaaattatcagcgcccccagacattag

SEQ ID NO: 178601 - DNA, 2409 bp, synthetic construct
  misc_feature 1..2409: note = Description of Artificial Sequence: Synthetic coding sequence
  source 1..2409: mol_type = other DNA
atggccgccacccgggccggcccccgggcccgggagatcttcaccagcctcgagtacggccccgtgcctgagtcgcacgcctgcgcccttgcttggctggatacccaggatcgctgtctggggcattatgtgaatggcaaatggcttaagccagaacaccgtaacagcgtaccttgccaggatcccatcactggggagaacctcgcctcatgcctccaagcacaggctgaggacgtggctgcggcagtggaagccgctcgcatggctttcaaaggttggagcgcccacccaggcgtggtgagggcccagcacctgacccgcctggcagaagtgattcagaagcaccagcggcttttgtggactctcgagagcctcgtgaccggtcgggccgttagagaagtgagggatggagacgtgcagctggcccaacaactgctccattaccacgccatccaggctagtactcaggaagaggcccttgccggctgggagccaatgggagtcattgggcttatattgccaccgacattctctttcttagaaatgatgtggcgtatatgccccgcgttagccgttgggtgcacagtagttgccctggttccccctgcatctccagcccctttattactggctcagctggccggcgagctggggccttttcccggcatcctgaacgtgctcagcggtcccgcttcactggtaccaattctcgcctctcagcccggcattcggaaggtggccttctgtggcgcgcccgaagaggggcgggcattacgacggtccctggccggggaatgcgcagaacttggcctggcactaggtaccgagtcactcctgctcctgacagataccgcagacgtggactccgccgttgaaggcgtcgtagatgctgcctggagtgaccgcggtcccggcgggttacggttgctcattcaggagtctgtttgggatgaggccatgcggcgcctgcaggaaagaatgggcaggcttcgttccggcagaggcctggacggagctgtagatatgggagctcgcggggctgccgcgtgtgacctggtgcagcgatttgtgagagaagctcagagccagggcgctcaggtgttccaggcgggggacgtgccaagcgagcgccctttctaccctccaacactggtaagcaacctcccacctgcctctccatgcgctcaggtcgaggtaccttggcctgttgtcgtagcttccccttttaggacggctaaggaggctctgttagtagctaacgggacacccaggggcggaagtgcctctgtgtggtccgaacggctaggccaggctctggagctgggctacggattacaggttgggacagtgtggatcaacgcccatggcctgcgagatccaagtgtgcctacaggaggctgtaaggaatcaggctgctcatggcatgggggcccggacggcctgtacgagtaccttcgccctagcgggaccccggcacgcctcagttgcctcagcaaaaacctgaattacgacacatttggacttgccgttccaagcacgctgcctgccggaccagagattggaccgtccccggctcccccatacggcctctttgttggggggaggtttcaggctcctggtgcccgatcctcgcgacccatcagggacagcagtggcaatctccatggctacgtcgccgaagggggtgcgaaagacatccggggggcagttgaggctgcccatcaggctttcccaggctgggccgggcagtcccccggtgcccgggctgcgctgttgtgggcattggctgccgctctggaacgcagaaaatcaaccctggcatctaggctggaacgacagggagcagagctgaaggccgcagaagctgaagttgagttgtcggctagacgtctgcgggcatggggtgccagagtccaagcccagggacacacactacaggtggctggtcttcgcggcccagtgctgaggctacgcgagcctcttggcgtgctggcagtggtgtgccctgatgagtggccactccttgccttcgtgtccctgctcgccccagccttggcatatggaaataccgtggtaatggtccctagcgccgcctgtcccctgctggccctggaagtttgtcaggatatggcgactgtgttccccgccgggctggcgaatgtggtgacgggcgacagggaccatttgaccagatgcctggccctgcaccaggatgtgcaggcgatgtggtacttcggatcagcgcagggcagccaatttgttgagtgggcgagtgcagggaatttgaagcctgtttgggcttcacggggctgccccagagcttgggatcaggaggcagaaggtgccgggcccgagctgggcctcagagtggccagaacaaaagctttatggcttccaatgggcgattag

SEQ ID NO: 178602 - DNA, 1914 bp, synthetic construct
  misc_feature 1..1914: note = Description of Artificial Sequence: Synthetic coding sequence
  source 1..1914: mol_type = other DNA
atgggcgtgatcggcctgatcctgccccccaccttcagcttcctggaaatgatgtggaggatatgccccgcgctggcagtcggctgtacagtagtcgctctggtaccacccgcctccccagcccctttattactggcccagttggcaggtgagctcgggccttttcccggtatcctgaatgttctcagcggccccgcttctcttgtgcctatattggcatcacagcccggcatcaggaaagtggcattttgcggagcacctgaggaggggcgggctcttaggcgtagcctggctggagagtgtgccgaactgggccttgccttaggtactgagtctctgcttttactgactgacacagctgacgtggacagcgcagtagagggagtagtagatgccgcctggtccgacaggggccctgggggactcaggctgctgattcaggagtctgtgtgggacgaggccatgaggcgcctgcaggagcgaatgggacgattgcgctctgggcgtggcttagacggggccgttgatatgggagccagaggagcagctgcctgtgacctggttcaacgtttcgttcgcgaagcccaaagtcagggcgcacaggtgtttcaagccggggatgtgccatcagaaagacccttttacccacctacgctcgtgagtaacctgcctcccgcctctccctgcgcgcaggtcgaggtgccatggcccgtggtagttgcttctccctttagaaccgccaaggaagcgctactggtggctaacggcacaccgcgaggcggctcagcatccgtgtggagcgagcggcttggccaggcactggaacttggatatgggctccaggtcgggactgtatggattaacgctcacggactgcgcgatccgagtgtcccgactgggggctgtaaggagtcagggtgttcatggcacggtggccctgatggtctgtatgaatatctgagaccttctgggacaccagcgcggcttagttgtctcagtaaaaacctgaactatgacacgttcggccttgctgtgccttcgaccctccccgccggtcctgaaatcgggcccagcccagccccaccatatggactttttgtaggagggcgatttcaagccccgggtgcccggtcatccaggcctattcgggatagcagcgggaacttacacgggtacgtcgctgagggaggcgcaaaagatattcggggagcagtggaggcagcccaccaggcttttcccgggtgggccgggcagtcgccgggtgccagggctgcacttctgtgggccttggcggctgcactcgagcgccgcaagtctaccttagcctccaggttggagcgtcagggggcagaactcaaggctgcagaagcagaagtcgaactcagtgcccgacgccttcgcgcctggggtgctagagtgcaagcccagggacacacgctacaggttgccggccttcgcggccccgtgctgcggctaagagaacctcttggagttttggcagtggtctgtccagatgagtggccactccttgccttcgtaagcctcctggccccggcgcttgcatatggcaacactgttgtgatggtaccaagcgctgcttgcccgctattagctctggaggtgtgccaggacatggctactgtttttccagctggactggctaacgtggtgacgggtgatagagaccatctgactaggtgccttgccctgcaccaggatgttcaggccatgtggtattttgggtccgcacagggatcccagttcgtggaatgggcgagcgccggcaacctcaagcctgtgtgggcttcgcgaggttgtccacgagcgtgggaccaggaagccgagggcgcaggccccgaattgggactgagagtagctcgcactaaggctttgtggctgcctatgggcgattag

SEQ ID NO: 178603 - DNA, 2256 bp, synthetic construct
  misc_feature 1..2256: note = Description of Artificial Sequence: Synthetic coding sequence
  source 1..2256: mol_type = other DNA
atggccgccacccgggccggcccccgggcccgggagatcttcacctccttggagtatggccctgtgcccgagagccacgcgtgtgctctggcatggcttgatacccaggaccgctgtctagggcactatgtaaatgggaaatggctcaagcctgagcatcggaactccgtcccatgccaggatcctatcaccggtgaaaatctcgcgtcttgcctccaggctcaggcagaggatgtggcggccgctgtggaggctgctagaatggccttcaaagggtggtccgcacacccaggagtagtgcgcgcccaacacctgactaggctggccgaggtgattcagaagcaccagaggttactgtggacattggagagcctggtaactggccgggctgtgcgcgaggtcagagacggcgatgttcagctggcccaacagctcctccattatcacgcgattcaagcaagcactcaagaggaagctcttgcaggttgggagccaatgggcgttatcggtctcattctacctcccacatttagtttcttggagatgatgtggagaatctgccctgccttggccgtgggttgtactgtagtagctttggttccccctgcaagccctgctccgctgctcttggcccaactcgccggagagctaggccctttccccggaatcctgaacgtgctgagcgggccagcctccctggtgccaatcctggcctcgcagcccgggattcgcaaggtagccttttgcggcgctcctgaggggggtctgcgattactcatacaggaatcagtatgggacgaggctatgcgcaggctccaagagcggatgggacgcctaagaagtggcagggggttggatggcgccgtcgacatgggcgccaggggcgcagctgcatgtgacctggtgcagcggtttgtcagggaggcgcagagtcagggggcacaggtgttccaggccggggatgtgccttccgagaggccgttttacccaccgacactcgtcagcaaccttcccccagcctctccatgcgcacaggtggaagttccttggcccgtggttgttgctagtccttttcgcacagccaaggaggctctgctcgtggctaacgggaccccacgcgggggttcagctagcgtgtggtcggaacgattgggtcaggccctggagcttggatacgggctgcaggtgggaactgtatggatcaatgcacatggcctcagagaccccagtgtgcctacgggcggatgtaaagagagtggatgttcgtggcatggtggtccagacggtctgtatgagtacctgaggccctcaggtactccagcgcggctgagctgcctttcaaaaaacctcaattatgacacttttgggcttgctgtgccttccacactgcccgctggacctgagattggcccatcacctgcacctccctacggtctgttcgtgggcggacgatttcaagccccaggtgcccgttcttctcggccaatccgtgattcgtcaggcaatttgcacgggtacgttgcagagggcggcgcaaaagacattcgcggagccgtggaggccgcccatcaggccttcccaggatgggcgggacaaagcccaggtgcgcgcgctgctctgctgtgggctctggccgctgccctggagcggcgcaagtctacccttgcatcccgcttagagcggcaaggtgctgagctgaaggctgccgaagcggaagtcgagctgtccgctcgccgtctgcgcgcttggggcgccagagtgcaggcgcagggacataccctccaggtcgcaggacttaggggcccagttctgcgtctcagggaacccctgggcgttctggccgtggtgtgcccagatgaatggcctctgctagcgtttgtgagcctcttggcccctgctcttgcctatggtaacacggttgtaatggtgcctagtgctgcgtgcccgctgctggccctggaggtctgtcaggacatggccactgtgttccccgccggtctggccaacgtcgtaacaggtgaccgggaccatttaacccggtgtctggctctgcaccaggatgtgcaggccatgtggtactttggaagcgcccagggcagccaatttgtggagtgggcctccgcaggaaacctgaagcccgtgtgggcaagccgtggctgtcctcgtgcatgggaccaagaagccgagggcgcagggcctgaactgggtttgagggtggccaggactaaggccctatggttacctatgggtgactag

SEQ ID NO: 178604 - DNA, 1920 bp, synthetic construct
  misc_feature 1..1920: note = Description of Artificial Sequence: Synthetic coding sequence
  source 1..1920: mol_type = other DNA
atgcggaccggcgtgatcggcctgatcctgccccccaccttcagctttttagagatgatgtggcggatctgccccgccttggccgtcggatgcactgtggtggcactggtccctccagcttctccagcccctctgctgcttgcacagctggctggcgaattggggccctttcccggcatcctgaatgtcctgagcggcccagccagtttggtgccaattttggcttctcaaccaggaatcaggaaagtcgctttttgtggggcacccgaagaaggtcgggcgctgcgtcgctctcttgccggcgagtgcgctgaactgggcctcgcgctgggaaccgagagtctgctgctgttgaccgacaccgcagacgtggacagtgctgtcgagggcgtagtagacgccgcctggtcggacagaggtcctggcggactgcgacttctgatccaagagagcgtgtgggatgaggctatgcgacgtctccaggagcggatgggaagacttcggtctggtcggggactggatggcgcggtggacatgggagccaggggcgctgccgcttgtgatttggtccagcgcttcgtacgtgaagcacaaagtcagggagctcaggtcttccaggctggcgacgtgccatcagagcggccattttatcctcctactttggtctccaatctgcctccagcctctccttgtgctcaggtggaggtaccgtggcctgtagtcgtcgcatcaccctttaggacagctaaggaagccctgttggttgcgaacgggaccccacggggaggcagcgcatctgtgtggtctgagagactgggacaagcccttgaacttggttacggcctgcaggttggaacagtgtggattaatgctcatgggctccgtgacccatctgtaccaaccggaggttgtaaggaaagcgggtgtagttggcatgggggacccgacgggctatatgaatacctgcgtccttctggcactccagccaggctctcatgtcttagcaagaacctaaactatgacacctttgggcttgccgtgccgagtacattgcccgctgggccagaaatcggtccgtccccagcccctccgtacggattattcgttggcggcaggttccaggcaccgggggcccggagctcacgacccatccgggatagctctggaaaccttcacggctatgtcgctgaggggggggccaaagatatccggggagccgtagaggccgcacaccaggcttttccaggctgggctggccagtcaccaggggcacgcgccgctctgctctgggccctggccgccgccttggaacggcgcaaatctaccctggcctcccggctcgaaagacagggggcagagcttaaagctgcggaagccgaggttgagttatcagctcggcggcttcgcgcctggggcgccagagttcaggcccagggtcacaccctacaggtggccgggcttagaggccctgtgctgcgactgagggaaccgcttggcgtgctcgctgttgtttgcccggatgaatggccattgcttgcattcgttagcctgctggcacccgcactcgcatatggcaatacagtggtgatggtgccatctgctgcgtgccctctcctggccctcgaagtgtgtcaggatatggcaacagtctttcccgctgggttagcaaatgtggtgacaggtgacagagatcacctgacccgctgtctggcactgcaccaggacgttcaagcaatgtggtatttcgggagcgcccaaggatcccagtttgtcgaatgggctagcgccggaaatctaaaaccagtgtgggcctcacgggggtgccctcgcgcttgggatcaggaggctgaaggggccggccccgaacttggcctccgggtagcccgcaccaaggccttgtggctcccaatgggcgattag

SEQ ID NO: 178605 - DNA, 2382 bp, synthetic construct
  misc_feature 1..2382: note = Description of Artificial Sequence: Synthetic coding sequence
  source 1..2382: mol_type = other DNA
atgctgagccaggtgtaccggtgcggcttccagcccttcaaccagcacttgcttccttgggtcaagtgtacaacagtgttcagatcccactgcattcagccatctgtcatccggcacgtaagaagttggagcaatattcctttcatcaccgtacctctctcccggacccacggaaaatcgtttgcgcatagatcagagctgaagcatgctaaacgtattgttgtcaagctcggctccgcggtagtcactaggggagatgagtgcggtctagcactgggcaggctggcttctattgttgagcaagtaagcgtactgcaaaatcagggaagagaaatgatgctagttactagtggcgctgtagcattcggaaagcagaggctaaggcatgagattctactgtctcagagcgttcgtcaagcattgcatagcggccagaatcagttgaaggagatggccatccccgtcctcgaggccagagcctgcgcagccgctggacagtccggcctgatggccctgtacgaggctatgtttactcaatacagcatctgcgctgcccagattctggtcaccaatctcgacttccacgacgagcaaaaacgtagaaacttaaacggtaccctgcatgagctgctaagaatgaacatcgtgccaattgtgaacaccaacgacgccgtggttcctcctgccgaacccaattcggacttgcagggggtgattagtgtgaaggataatgatagtctggctgccagactggctgtggagatgaagacagatttgttaatagtcttaagcgatgtcgaggggctgtttgattccccccctggaagcgacgatgccaaactaattgatattttttatccaggtgaccaacaatccgtcacgtttgggaccaaaagcagagtcgggatgggaggcatggaagccaaggtgaaagctgccctctgggcactgcaaggcgggacatctgtcgttatcgctaacggaacacaccctaaggtcagtggacacgtcatcacagacattgttgaaggaaaaaaggtaggtacattcttttccgaggtaaaaccagctggacccacagtcgaacagcagggggaaatggctcgctcgggcggtcggatgctcgccactctcgagccagaacagcgcgccgaaatcattcaccacctggccgacttgctgaccgatcagagggacgagatactcctggcaaacaagaaagacctggaagaagccgagggaagacttgcggcccccctattgaagcgcctctccctaagcaccagcaagttaaattcactcgccatcggccttagacaaatagcggcttccagccaggacagcgtgggcagagtgctgcgacggactagaatcgccaagaaccttgagctggagcaggtcaccgtgcctataggcgtgctgctcgtcatcttcgaaagccggcccgactgcctgccgcaggtcgccgctttagccatcgcttctggcaacggcttactgctgaaaggcggcaaagaggccgcacacagcaataggattctgcatctcctgacacaagaggccctgtccattcatggggtgaaggaagcggtccaattggtgaacactagggaagaggtggaggatctgtgtaggctcgacaaaatgatagatcttattatccccagggggtccagtcagctagtgagagatattcaaaaggccgctaagggtattcccgtgatgggccactcagagggcatatgtcacatgtacgtggattccgaagcgtcggtggataaggtgaccagacttgtaagggattcaaaatgtgaatacccggctgcctgtaacgctctcgaaacccttctcattcatagagacttgcttaggacacctctctttgatcagattatagacatgctgcgcgtggaacaggttaaaatacatgcagggcccaaatttgcctcttatttgacgttctctccatctgaggtgaagagccttcgcactgaatatggcgatctggagctgtgcatagaagtagtcgataacgtgcaggatgcaattgatcacatacacaagtatggctcgagccatacagacgttatcgtgacagaagacgagaacactgccgaattctttctgcaacatgtagattctgcatgcgtgttctggaacgcatctacgcggttctccgacgggtacaggttcgggttgggtgctgaagtggggatttccacctcacgtattcacgcccgcggtccagtggggcttgagggcctactaaccaccaaatggttgctccggggtaaagatcacgtggtgtctgactttagtgaacacggatctctcaaatacctgcatgagaacctccctatcccccagcgaaacacaaactag

SEQ ID NO: 178606 - DNA, 2388 bp, synthetic construct
  misc_feature 1..2388: note = Description of Artificial Sequence: Synthetic coding sequence
  source 1..2388: mol_type = other DNA
atgctgagccaggtgtaccggtgcggcttccagcccttcaaccagcatctcctgccttgggtaaaatgtacaaccgtgttcagaagccactgtatacagcccagtgtgatccggcacgtccggagttggagcaacatcccttttatcaccgtccctctgtctcggacccacggcaagtcatttgctcataggtctgagttgaagcatgccaagcgcatcgttgtcaaactcggatcagcagtggtgacccggggtgatgagtgcggcctggcccttgggagactcgcttctattgtcgagcaggtctcagtcctgcagaaccaagggcgagaaatgatgttggtcacctccggcgccgtggccttcggaaaacagaggcttaggcatgagatcctgctctctcaatctgtgcgccaggcactccatagcggccagaaccagttaaaagagatggctatcccggtcctagaagcaagagcctgtgccgctgctggccagagcggcttgatggctctgtacgaagcgatgtttacccaatattccatctgtgccgcgcagatcctggtcactaacctcgattttcacgatgagcagaaaaggaggaatcttaacggaaccctccacgaattgttgcgcatgaacatcgtgccaatcgtgaacacgaacgacgccgtcgtccctccggctgagcctaatagcgaccttcaaggcgtaaacgtgattagcgttaaggacaacgactctctggctgcaagattagccgtggagatgaagaccgacttgctaatagtcctgagtgacgttgaaggtctgtttgattccccaccaggctctgacgacgccaagctgatagacattttctatcctggggatcagcaaagcgtaacctttggtaccaagtcccgagtcggcatgggcggcatggaggccaaagtcaaggccgccctgtgggctcttcaagggggtacgtccgtggtaattgcaaatggcacacatcctaaggtgtccgggcatgtgattacagacattgtggaaggtaaaaaggttggtacatttttctcagaagtgaagcctgcaggccctaccgttgaacaacaaggcgaaatggcacgctcaggtggacggatgttggccacactagagcctgaacagcgtgccgaaatcatccatcacctggccgacctgttgacagatcaacgtgacgagatcttactagctaataagaaagatcttgaagaagctgaaggacgcctggcggctcctctactcaaacgcctgagcctcagcacaagcaaattgaactcattggcgattggcttgaggcagatcgccgcgagctctcaggattccgtgggtcgtgtgctgagacgtacgcgaatcgctaagaacctcgagctagagcaggtaacagttccaatcggcgttctgctggtcattttcgagagcagaccagattgcctcccccaggtggcagccctggcaattgcttcaggtaatggcctcctcctcaaagggggtaaagaggcagctcactcaaatcgtattctgcacctgcttactcaggaggcactgagtatccacggcgtcaaggaagcggtacagttggttaatacccgggaggaagttgaggatctatgccggctggacaaaatgatcgacctcattatcccaaggggcagctctcaattggttcgagacatccagaaggctgcaaagggcatacctgttatggggcacagcgaggggatatgccacatgtatgtcgactctgaagcaagtgtagataaggtcacaagattagtcagagatagcaagtgtgaatatcccgccgcatgtaatgccctggagactctgctcatccacagagacctgctacgcacaccccttttcgatcagatcatcgacatgctgcgcgtcgaacaggtaaaaattcatgcgggccctaagttcgcatcatatctgacattctccccgagcgaggttaagtcgctgcggacagagtacggggacctggagctatgcatcgaggtcgtcgataacgttcaggacgccatagatcacattcacaaatacgggtcttcccacaccgatgttatagtgactgaggacgagaacactgccgaatttttcttacaacacgtggactcggcctgcgtcttctggaatgcttcaactagattctcggatgggtacagatttgggctcggggccgaggtggggatatccactagtcgtatacatgcccgaggcccagtcggactcgagggtctgctgaccacgaaatggctgctccgaggcaaggatcacgtggttagtgacttctctgagcacgggtccctcaaatatcttcatgagaacctgccaattcctcagagaaatactaactag

SEQ ID NO: 178607 - DNA, 1554 bp, synthetic construct
  misc_feature 1..1554: note = Description of Artificial Sequence: Synthetic coding sequence
  source 1..1554: mol_type = other DNA
atgctgcgggccgccgcccggttcggcccccggctgggccggcggcttctgtccgccgcagcgacacaggccgtgcccgctccaaaccagcagcctgaggtgttttgtaaccaaatctttatcaacaacgagtggcatgatgcagtaagccggaagacttttccaaccgtgaatccgagcactggggaggtgatttgccaagtcgcagagggcgacaaggaggacgtggacaaggcagtgaaggctgccagagctgctttccagctgggctccccttggcgccgaatggatgctagtcaccgtggccggcttctcaataggctggccgacctcatagagagagatagaacttacctggccgcactggagacactcgataacgggaagccctacgtaataagctacctggtggatctggacatggtgttgaagtgcctgcgctactacgccggatgggccgataagtaccatggtaaaaccatccccatcgatggtgatttctttagctacacccgccatgagccagtgggagtatgcggacagataatcccgtggaatttcccattactcatgcaagcttggaagttaggccccgcgctggccacaggaaatgtggtggtgatgaaagttgcggagcagacaccactgaccgctctatatgtggctaacctaatcaaggaggccggattcccgcctggggtagtgaacatcgttcccggtttcggcccaaccgcaggcgcagcaatagcatcccatgaagatgtggacaaagttgcatttaccggatccaccgagataggacgagtcatacaggtggctgcagggagctcaaacctgaaacgggtgacgcttgaattaggcgggaaatcccctaacataatcatgagcgatgcggacatggattgggccgtggagcaggcacacttcgcgctgttttttaatcagggccagtgctgctgtgccgggagccgcacgtttgttcaagaagacatctacgacgagttcgtggagcggagcgtggcgagagcaaagtcccgcgtagttggcaaccctttcgacagtaagacagaacagggaccccaggtggatgaaacacaattcaagaagatcctgggatacatcaataccggtaaacaggagggggccaagctcctttgcggcggcggcatcgctgccgatcgggggtatttcattcagccaaccgtttttggtgacgtacaggacggaatgaccattgccaaagaggagattttcggaccagttatgcagattttgaagtttaagactatcgaggaggtcgtcggtcgggcgaataattctacttatgggctcgccgctgccgtgtttacaaaagatctcgacaaagccaattatctgagtcaagcattgcaggccggtacagtctgggttaattgctacgacgtgttcggcgctcagtcgcccttcggcggctataaaatgagcggatcaggacgcgagttgggcgagtacggtcttcaagcctataccgaagtgaaaacagtgacggttaaagtccctcaaaagaattcctag

SEQ ID NO: 178608 - DNA, 1413 bp, synthetic construct
  misc_feature 1..1413: note = Description of Artificial Sequence: Synthetic coding sequence
  source 1..1413: mol_type = other DNA
atgctgcgggccgccgcccggttcggcccccggctgggccggcggctgctcagtgcagccgccacccaggctgtgccagccccgaatcaacagccggaggtattctgcaaccaaatctttatcaataatgagtggcatgatgccgtgtctaggaaaacatttccgacagttaatcccagcaccggcgaggtaatctgccaggtcgcagagggcgacaaggccctcgagacacttgacaatggaaagccttatgttatctcttatcttgtggatctcgacatggtgctcaagtgtttacgttattatgccggctgggcggacaagtaccacgggaaaacaattccaatcgatggggacttcttttcatatacccgtcacgagcctgtgggcgtttgtgggcagattattccctggaatttccctctgttgatgcaggcctggaaactcggtcccgccctggcaaccggcaacgtggtagtaatgaaggtggctgagcaaacacctctcactgcgttgtacgtcgcgaatctgatcaaggaagcgggctttccccccggggtggtaaacattgtacccggctttggacctactgccggtgccgccatcgcaagtcatgaggatgtagacaaagtggcttttactggcagtactgaaatcggccgcgttatccaagtcgccgcgggcagctctaacctgaaaagagtcaccttggaactcgggggcaagagccccaatatcattatgagcgacgctgacatggactgggcagtcgaacaggctcattttgctctgttttttaaccagggccagtgttgctgcgcaggaagcagaacctttgtgcaggaagacatttatgatgagtttgtcgagcgctctgtggcccgggctaagagccgtgtggtcgggaatcccttcgactccaagaccgaacagggccctcaggtcgacgaaactcaattcaaaaagatcctcggatacattaacaccggcaagcaggaaggggctaagcttctatgtggcggaggcattgcagcggatcggggctactttatccaacccacagtgtttggcgacgttcaggacggaatgacaatcgccaaagaggaaattttcggcccggtgatgcagattctgaagtttaaaacaatcgaagaagtggtgggaagagcaaacaattctacctacgggttagccgccgcggtgtttacaaaggatctcgacaaagctaactatttatctcaggctctccaggctggcacagtctgggtgaattgctacgatgttttcggggctcagtctccatttggaggctataagatgagtgggtccgggagagaactgggagaatatgggctgcaggcctatacagaagtgaaaaccgtgacggtcaaggtcccacagaagaattcctag

SEQ ID NO: 178609 - DNA, 1989 bp, synthetic construct
  misc_feature 1..1989: note = Description of Artificial Sequence: Synthetic coding sequence
  source 1..1989: mol_type = other DNA
atgcggggcgccggccccagcccccggcagagcccccggaccctgcggccagaccctgggcctgcgatgtcattctttaggcgtaaggtcaaagggaaagagcaggagaaaaccagtgatgtaaagtccattaaagccagcatctcagtccattctccacagaaatctaccaaaaatcatgccctgctcgaagccgcaggcccatcccatgtggcaatcaacgcaatctccgcaaatatggacagtttctcctccagccgcacggcaacactgaaaaaacaaccctcccacatggaagcggcccatttcggggatttaggcagaagttgtcttgattaccagacgcaagagaccaagtcatcattaagcaaaaccctggaacaggtgctgcacgacactatcgtcttaccctacttcatccagtttatggaactgagacgtatggaacacctcgtcaagttctggctcgaggccgaatcttttcacagtacaacatggagccggatcagggcacactccctcaatacggttaagcagtcctcactggccgagccagtatcgccttcaaagaagcacgagacaactgccagcttcctcacagacagtctggataaacggctcgaagattccgggtcagcccagttattcatgacacacagtgaaggcatcgatctgaacaatcgcaccaactcaacccaaaatcatctgcttctgtctcaggaatgtgattctgctcacagcttgcggctggagatggcaagggctggcacccaccaggtctctatggaaacccaggagtctagttcaactttaacggtcgcatcgcggaacagccctgctagcccacttaaggaactctctgggaagctgatgaaatctatagagcaggacgccgtaaataccttcaccaaatacattagtcctgatgctgctaaacccattcccatcacagaggcaatgaggaatgatatcattgctcgcatttgtggcgaggacgggcaggtcgatcccaattgttttgtcttagctcagtctatagtttttagtgctatggagcaggaacacttcagtgagtttctgcgctctcaccacttttgcaagtaccaaatagaggtgttaaccagcgggaccgtatatctggccgatattctcttttgcgagagcgccctgttctattttagcgagtatatggaaaaggaagacgccgtcaacatcctccaattctggctggcggcagacaatttccagtcacagcttgcagccaagaaaggtcagtatgatggccaagaggctcagaacgatgcaatgattctctacgataagtatttttccttgcaggctacgcatcccctgggtttcgatgatgtggtgcggctagaaatagaatctaacatttgtcgggaagggggacccttgccaaattgcttcactactcccctgcggcaggcttggactacgatggagaaagtctttctgcccggcttcctgagttctaacctctactacaaatacctgaacgatttaatacacagtgttcggggggacgaatttctcgggggtaatgttagccttaccgcgcctgggagcgtgggtccaccagacgaaagtcaccccggaagcagtgactcctctgcctcccagtcatcggtgaagaaggcctccatcaaaatcctgaaaaactttgatgaggccataattgttgatgccgcctccctcgaccccgagtcactctatcaaaggacatatgctggaaagatgaccttcgggagggtcagtgaccttggacaattcatcagagaatccgagcccgaaccagatgtgcggaagagcaagggttctatgttcagtcaggctatgaagaagtgggtgcagggtaacacagacgaggctcaagaagagttggcttggaagatcgcaaagatgattgtgagtgacatcatgcagcaagcgcaatacgaccagccactggaaaagtcaacgaagctatag

SEQ ID NO: 178610 - DNA, 1536 bp, synthetic construct
  misc_feature 1..1536: note = Description of Artificial Sequence: Synthetic coding sequence
  source 1..1536: mol_type = other DNA
gaggtgcagcggaccccccaccccaccttcgagtacttcttcttcttgtccagaaagctgcccggccaggagctgcagggtctaaacggcagggaggcaggcagcctgaatacatcacccttaggctcttgccgttccaggtcaccctcatatcgcgagcgcttatgccagagaagacacgagcaagatcaacgcgggagagaggcaagaccaagacgtctccaggggcgcacccgcccactgcaattcagaattcaacagcttgaagccctgcagaggctgatccaggaacaggagcaggagctggttggggccctggctgccgacctgcataaaaacgagtggaacgcctattacgaggaggtcgtctacgttctggaggagatcgagtatatgatccagaagctgcccgagtgggccgctgatgagccagtggaaaaaaccccccagacacagcaggatgagctgtatatccattctgagcctctcggtgttgtgttggtgatcggcacctggaactaccccttcaacctgaccattcaaccaatggtgggggccatcgccgcaggaaacagcgtagtcctgaagcccagtgaactatccgagaacatggctagcctcctagccacaataattcctcagtatctagacaaggatctctatccggtgattaacggcggagtgcctgagaccaccgagttgcttaaagaaaggtttgaccacattctctacactgggtcaaccggagttggcaagataattatgacagccgcagccaagcatctgactcccgtgaccttggagctcggtgggaaatccccttgttacgtggacaagaattgtgacctcgacgtcgcgtgtcggcgtatcgcttggggcaaattcatgaactcaggacagacttgcgttgccccagattatatcctgtgcgaccccagcattcagaaccagatcgtggagaagttgaagaaatctctgaaagaattctatggagaagacgccaagaagtccagagactacgggcgcattattagcgcccggcacttccagcgagtaatggggctcatcgagggccagaaagtagcctatgggggcacaggtgatgccgcgactcgctatatagcaccgactatcttaaccgatgtggaccctcagtcgcctgtaatgcaggaagagatcttcggcccggtgctgcctatcgtgtgtgtgagatcccttgaagaggcaattcagttcataaaccaaagagaaaaaccccttgccctgtatatgttctcaagtaatgataaggttattaaaaaaatgatagccgagactagtagtggcggagtagctgccaacgacgtgatcgtgcacatcaccctgcacagcctcccttttgggggtgtgggcaactctggcatggggagttaccatggcaaaaaatcttttgagacgttttctcaccgccgctcctgcctggtgagaccactgatgaatgatgaggggttgaaggtgcgataccccccctctcccgcaaaaatgacacagcactag

SEQ ID NO: 178611 - DNA, 1170 bp, synthetic construct
  misc_feature 1..1170: note = Description of Artificial Sequence: Synthetic coding sequence
  source 1..1170: mol_type = other DNA
atgagcaagatcagcgaggccgtgaagcgggcccgggccgccttctctagtgggcgaactcgacccctgcagtttagaatacaacagctggaggccctgcaacgtctgattcaggaacaggagcaagaactggtgggcgctctcgctgctgacttacacaagaacgaatggaatgcttactacgaggaggtggtttacgtccttgaggagatcgagtacatgattcagaagctgccagagtgggccgccgatgaaccagtagagaagactccccagacccaacaggatgaactgtatatccattccgagcccctcggagtggtgctagtgatcggaacctggaactatccctttaatctaacaattcagccgatggtcggagctattgccgctggcaacagcgttgtgctgaagccttcagaacttagtgagaatatggcctcactcctggcaacgattattcctcaatatctagataaggatctctaccccgtcatcaacggcggtgttcctgagaccaccgaattactgaaggagcgctttgaccacatcttgtatactggttctaccggggtgggaaaaatcataatgacagccgctgctaagcacttaaccccagtgacactggagttagggggaaagagcccctgctatgtcgacaaaaactgcgacttggacgtggcctgtagaagaatcgcctggggtaagtttatgaattcaggacagacgtgtgtggctcctgattacattctgtgcgatccatcaattcagaaccagatagtggaaaagctgaagaagtctttaaaagaaatatttggacccgttctcccaatcgtatgcgttcgaagtctcgaagaagccattcaatttatcaatcagcgggaaaagcctctcgctctctacatgttttctagcaacgataaggtgattaaaaaaatgatcgccgagacgtcaagtggaggggtcgcggccaacgacgtaattgtgcacataactttacactccttgcccttcggcggggtggggaactccgggatggggagctaccatgggaagaaatctttcgagactttctctcatagacggtcatgtttggttcgtccacttatgaatgacgaagggctgaaagtgcggtaccccccgagtccggccaagatgactcagcattag

SEQ ID NO: 178612 - DNA, 693 bp, synthetic construct
  misc_feature 1..693: note = Description of Artificial Sequence: Synthetic coding sequence
  source 1..693: mol_type = other DNA
atgagcaagatcagcgaggccgtgaagcgggcccgggccgccttcagcagcgggaggacgcggcctcttcaatttcggatccagcaactggaggcacttcagcggctgatacaggagcaggagcaggagttggtcggagcgttggctgctgatctgcacaaaaacgagtggaacgcctactacgaggaggtggtgtacgttctggaggagattgaatacatgatacaaaaactgcctgaatgggctgccgatgagccagtcgagaagacaccacagactcagcaggacgaactgtatatccattcagagcccctgggagtagtgctcgtcataggtacttggaattatccgttcaatctgacgattcaaccaatggtaggcgccattgccgctggcaattcggtggtgttgaaacccagcgagctctctgaaaacatggcaagcctgctggcaaccattattccccagtaccttgacaaggacctctacccggttattaatggcggtgtaccggaaaccacggaactgctgaaggagaggtttgatcatatcctgtatacagggagtacaggtgtaggaaaaataattatgacagccgctgccaagcacctgacccccgtgactctggaactgggcggaaagagcccgtgttatgtcgataagaattgcgacttggacgttgcctgtcgttag

SEQ ID NO: 178613 - DNA, 1119 bp, synthetic construct
  misc_feature 1..1119: note = Description of Artificial Sequence: Synthetic coding sequence
  source 1..1119: mol_type = other DNA
atgagcaagatcagcgaggccgtgaagcgggcccgggccgccttcagcagtgggaggacgaggcccctgcagtttcgcattcagcaattggaggccctgcagcgcctgatccaagaacaggaacaggagctggtgggtgctctcgctgctgacctgcacaaaaatgaatggaatgcatactacgaggaggtggtgtacgtgctggaggagattgagtacatgatccaaaagttgccagagtgggccgcagatgaacccgtggagaaaaccccccagacccagcaggacgagctttatatccacagcgagcccttaggtgttgtcctggtgattggcacatggaactatccatttaatcttacaatccagcctatggtgggtgcaattgctgctggcaatagcgttgtcctgaaaccctctgagctttctgaaaatatggcttccctactcgctactataatcccacagtatttggacaaggacctttacccggtgatcaatggcggtgtgcctgagactactgagctactaaaagagcgcttcgatcacattctctacacaggcagtactggagttgggaagatcataatgactgcggcagccaagcacctgacccctgtgacccttgagctgggggggaaatctccttgctatgtggataagaattgcgatcttgatgtggcatgtaggaggatcgcttgggggaagttcatgaattccggacaaacttgtgtggcccctgactacattctctgcgatccaagcatacagaaccaaattgtggagaaattaaagaaatcgttgaaggagttctatggggaggacgccaaaaaatcccgagactatgggcggattatcagcgccagacactttcagcgggtgatggggttgatcgagggacagaaagtggcctacggtggcaccggtgacgccgccaccagatacatcgcccccaccattctaaccgacgtggacccccagagcccagtgatgcaggaagagattttcggaccagtcctgcccatcgtgtgcgttcggtccctggaagaagccatccagttcattaaccagagagagaaaccactggcgctttacatgtttagcagcaacgataaatag

SEQ ID NO: 178614 - DNA, 1362 bp, synthetic construct
  misc_feature 1..1362: note = Description of Artificial Sequence: Synthetic coding sequence
  source 1..1362: mol_type = other DNA
atgagcaagatcagcgaggccgtgaagcgggcccgggccgccttctcatccggccgtacgagacctttacagttccgcatacagcagctggaggcgctgcagaggctaatccaggagcaagagcaggagcttgtcggtgctctcgcggcagacctgcataagaacgagtggaacgcctattacgaggaagtggtgtatgtgttggaagaaatagaatatatgatccagaagctgccagaatgggctgcagatgagccggttgagaagactccacaaactcagcaggacgagctgtatatacatagtgagccactgggggtcgtgctcgtaattggcacctggaattatccctttaacctcacaatacaacccatggtaggggcaatcgccgccgggaactcggttgtcttaaaaccctctgagttgtcagagaatatggccagcctgctcgcaactattataccgcagtatttagataaggatctgtatcccgtcatcaatgggggagtgccagaaaccacagagttgctgaaggaaaggtttgaccacattctatatacaggcagtacgggcgtaggcaaaatcataatgacagcggcagctaaacaccttacacccgtgacccttgagttggggggcaagtctccatgttacgtcgacaaaaattgcgacctggacgtcgcttgccgtagaatcgcttggggtaagtttatgaattctggacaaacttgtgtggctcccgattatatcttgtgcgacccttcgatccaaaatcagattgtggagaaattgaaaaagtccctgaaggaattctacggcgaggacgcaaaaaagtcccgagactatggaagaataatctctgcccggcactttcagagggtgatgggcctgatcgaaggtcagaaggtggcctatggcggcaccggggatgctgccacacgctacatcgctccaacaatcctgactgatgtcgacccccaatctccagtgatgcaggaggagatcttcggccctgtgctacccattgtgtgcgtacggagcttagaggaggccatccagttcatcaatcagcgcgagaaacccctagcgctatacatgttctctagcaacgataaagtgatcaaaaaaatgattgccgaaacaagttccggcggcgttgccgccaacgacgtaatagtgcatatcaccctgcactcattaccgttcgggggagttggcaattctggaatggggagttatcacggcaaaaaatccttcgagacgttcagccatcggcgctcctgcttagttcgtccactgatgaatgacgagggactcaaagtgaggtatcctccatcgcccgcaaagatgacccagcattag

SEQ ID NO: 178615 - DNA, 1362 bp, synthetic construct
  misc_feature 1..1362: note = Description of Artificial Sequence: Synthetic coding sequence
  source 1..1362: mol_type = other DNA
atgagcaagatcagcgaggccgtgaagcgggcccgggccgccttctcttctgggagaacccgcccactgcaatttcggatccagcaactggaagccctacagcggctgatccaggaacaggaacaggagctagttggcgcgctggccgcggacctccataagaatgaatggaatgcttattatgaagaggttgtctacgtccttgaggagatagaatacatgatacagaagttacccgagtgggccgctgatgaacccgtggaaaaaacgcctcagactcagcaagatgagctatatattcacagtgaacccttgggtgtggtacttgtaatcggaacctggaactatcccttcaatctaacaattcagccaatggtcggcgccattgcagccgggaatagcgttgtgctgaagccttctgaactgagcgaaaatatggcctcacttttagcaacaatcatcccgcagtatctggacaaagacttatatcccgtcattaatggaggtgtccccgaaaccacagagctgctgaaagagagatttgatcacattctttacacagggtctacaggcgtgggcaagatcatcatgacagcagcagcgaagcatctaacccctgtgacactcgagttgggggggaaaagtccttgctacgttgacaagaattgtgatttggatgttgcttgccgcaggatagcctggggaaaattcatgaactccggccagacgtgtgtcgcaccggattatatcctttgcgacccttctattcagaaccagatcgtggagaagcttaaaaagtctctcaaggaattttatggggaggatgcaaaaaagtcccgggactatggccggattatttctgcccgccatttccagagggtgatgggtctgattgagggacagaaggtggcatacggtgggactggggacgctgctacgcgctatattgccccgaccattctcacagacgtggatccccagtctcccgtgatgcaggaagagatatttgggccagtgctccccattgtctgtgtgcggtcactggaggaggcaattcagttcatcaatcagagggaaaagcccttagcactgtacatgttctccagtaatgacaaagtgatcaagaagatgatcgctgagacctcctcaggaggtgtcgcggctaacgacgtaatcgtacatattacacttcactccctgccctttggcggtgtcgggaactcaggcatgggaagctatcacgggaagaagtcctttgagacattttcccacaggcgctcctgcttagtcaggcccctgatgaatgatgaaggtctgaaagtccggtacccaccctcgccagccaagatgacacagcattag

SEQ ID NO: 178616 - DNA, 1203 bp, synthetic construct
  misc_feature 1..1203: note = Description of Artificial Sequence: Synthetic coding sequence
  source 1..1203: mol_type = other DNA
atgatccagaagctgcccgagtgggccgccgacgagcccgtggagaagactcctcaaacacagcaggacgagctctacattcacagtgaacccctaggggtggtactagtcataggtacttggaattatccattcaaccttaccatacagccaatggtgggcgcgatcgctgccgggaacagcgtggttctgaagccgtccgaactcagtgaaaatatggcttcccttttggcaacaatcatccctcagtacctcgacaaagatctgtacccagtgatcaacggaggagtgccagagactactgagcttcttaaggagcgatttgatcatattctgtataccgggtccaccggcgtgggtaagataattatgactgctgccgctaagcatctaactcccgttactctggagcttggaggaaagagtccatgctacgtggataagaattgcgatttggacgtcgcatgtaggcggatcgcttggggcaagtttatgaatagtggccagacatgtgtggcgcccgattatatcctctgcgatccgtctattcagaaccagatcgtggagaagctcaaaaagtctctgaaggagttttacggggaggatgctaaaaaatcccgtgattatggaaggataatcagcgctaggcatttccagagagttatgggattgatcgagggacagaaggttgcgtatggggggactggcgatgctgccacacgatatattgcacctaccatcctcacagacgttgatcctcagtccccagtgatgcaggaggaaattttcggaccagttctgcctatcgtgtgtgtacgaagcctagaggaagccatccagttcatcaaccaacgcgagaagcctctcgccctgtatatgttcagtagcaacgataaggttattaagaagatgatcgcggagacaagttccggcggggtggcagccaacgacgtgatcgtccacatcactttgcatagccttccatttggaggagtcggtaatagcgggatggggagctaccatggcaagaaatcattcgaaaccttcagccaccgtcgtagctgtctggtgcgtcccctgatgaacgatgagggcctcaaggttaggtacccacctagtcctgcaaagatgacccaacactggctttcatggccgtgggaaaacagaagctgtagcccctcccccgccccactcctgtgctag

SEQ ID NO: 178617 - DNA, 1458 bp, synthetic construct
  misc_feature 1..1458: note = Description of Artificial Sequence: Synthetic coding sequence
  source 1..1458: mol_type = other DNA
atggagctggaggtgcggcgggtgcggcaggccttcctgagcggcagaagcagaccattacgattcagactgcaacagcttgaggctctgcgccggatggtgcaggagcgcgaaaaggatattttgacggccatcgcagctgacctgtgtaaatccgagttcaacgtatattctcaggaggtgataaccgttttaggcgagatcgacttcatgctggagaacctgcccgagtgggttaccgcaaagcctgtgaaaaagaatgtgcttactatgcttgacgaagcatacattcaacctcagccccttggtgttgtccttataattggcgcttggaactatccatttgtactcacaattcagcctctaataggcgcaatcgcggctggcaacgcagtcattatcaaaccaagtgaactgtccgagaatacagctaaaattctggctaaactgttgccccaatacctcgatcaagatttgtacattgttattaacgggggcgtggaagagaccacagagctgctgaagcagcgatttgaccacattttttatacaggtaacacagcggttggcaagatcgtcatggaagctgcagctaagcacctcactcccgtcactttggagctgggcgggaaatccccttgctacattgataaagactgcgatctggacatcgtgtgccgccgaattacttggggcaagtacatgaactgcggacagacatgcatcgcccctgactacatcctgtgcgaggcgtcacttcagaatcaaatcgtgtggaagatcaaagagacggtgaaagaattctacggtgagaatatcaaggagagccccgattatgaacgcattataaatctgagacatttcaagcggattctgagtctcctggaagggcagaaaattgcctttgggggcgaaacagacgaggccacacgctatatagcccccactgtgctgacagacgtggatcccaagaccaaagtcatgcaggaggagatttttggacctattctgccaatagtgccagtgaaaaatgttgacgaggctattaatttcatcaatgagcgcgaaaagccactggccttatacgtgttcagccataaccacaaactgattaaacggatgatagatgagacctccagtgggggagtcacaggcaacgatgtgattatgcattttactctcaattcttttcctttcggcggagttgggagttcagggatgggagcttatcatggtaaacatagctttgacacattctcacaccagcgcccctgcctactgaaatccctcaaaagggagggtgccaataaactgagatacccaccgaattctcagtcaaaggttgactgggggaagttttttctgttaaagcggttcaataaagagaaactgggtttgctactgctaacttttctgggaattgtggcagcggtacttgtgaaagcggagtactattag

SEQ ID NO: 178618 - DNA, 1527 bp, synthetic construct
  misc_feature 1..1527: note = Description of Artificial Sequence: Synthetic coding sequence
  source 1..1527: mol_type = other DNA
atggagctggaggtgcggcgggtgcggcaggccttcctgagcggccggagtcgccctttgcgtttccgtctacagcagctggaagcgctgcgacggatggtgcaagagcgagaaaaggacattctgaccgccattgccgctgacctgtgcaagagcgagttcaatgtgtattcacaggaggtcataaccgtcctgggcgagattgattttatgctagagaaccttcctgagtgggtaacagccaagcccgttaagaagaacgttcttacgatgctggatgaggcgtatatccagccacagcctctcggtgtggtgctgatcatcggcgcttggaactatccattcgtgctgaccatacagcctctgatcggtgctatcgccgccggcaatgccgtaatcattaaacccagcgagctgtctgagaacactgcgaagatcttggccaaactcctaccccaatatctggaccaagacctgtatatcgtgatcaacggcggagtcgaagagacaaccgagttgctcaagcagagatttgatcacatcttctacaccgggaacaccgcagtgggcaagattgtcatggaggccgccgcaaagcacctcacaccagtcacattagagttggggggaaagagcccttgctacatcgacaaggattgtgacctggatatcgtgtgtcggaggataacatggggcaaatacatgaattgtggccagacctgcatagcccctgattacatcctctgtgaagcaagcttacaaaaccagattgtgtggaagataaaggaaacggtgaaagagttttacggcgagaacattaaagagtccccggactacgagcggatcatcaatctccggcactttaagagaatcctctctcttcttgaagggcagaagattgccttcggtggtgaaactgacgaggctactagatatatcgcacccacggtgctgacagacgtagacccaaaaaccaaggtgatgcaggaggagatattcggaccaattttaccgatcgttcccgtgaagaatgtggatgaagccatcaacttcatcaatgaacgtgagaagcctctggcgctgtatgtattctcccataatcacaagcttatcaagagaatgattgacgaaacttcttcaggtggcgtgacagggaatgacgtgatcatgcattttaccctgaactccttcccttttgggggggtgggctcatccgggatgggagcgtatcacggcaagcattcattcgacactttcagccaccagcgtccatgccttctgaagtcacttaaacgtgagggggccaataagctccgctatcctcctaatagccagtctaaggtggactggggtaagttttttttgcttaagcgcttcaacaaagagaaactcggcctgctgttactgacgttcttaggcatcgttgctgcagtgctggtgaagaaataccaagcagtgctcagaaggaaagccttgcttattttccttgtggtgcaccgccttcggtggtcatcaaagcaaagatag

SEQ ID NO: 178619 - DNA, 1458 bp, synthetic construct
  misc_feature 1..1458: note = Description of Artificial Sequence: Synthetic coding sequence
  source 1..1458: mol_type = other DNA
atggagctggaggtgcggcgggtgcggcaggccttcctgagcggccgctccaggccattgcgttttagattacagcagcttgaagcgctcagacggatggtgcaggagcgcgagaaggacattctcacagctatcgccgccgacctctgtaaaagtgagtttaacgtttactcacaggaagtaatcacggttttaggagaaattgatttcatgctggagaacctaccagagtgggtcacagcaaagccagtgaagaaaaatgtcctgaccatgctagatgaagcttacatacaaccacagccccttggtgtcgtactcatcatcggtgcatggaattatccatttgtcctgacaatccagcctcttatcggcgccatagccgccggtaatgccgtcattatcaaaccttccgaattaagcgagaacacagcaaagattttggcaaagctcttgccccagtatttggatcaagacctgtacattgtgatcaacggaggagtcgaagagacgactgaattgcttaagcagcgttttgaccatattttctatacgggaaacactgccgtgggcaaaatcgtgatggaggcagctgctaaacacctgaccccggtgacattagagctcggaggtaaaagcccctgctatatcgacaaagattgcgacttggacattgtctgtcggcgtattacgtggggtaaatacatgaactgcgggcaaacatgcatagcaccagactacattttatgtgaagccagcctgcagaatcagatcgtctggaaaatcaaggaaaccgtaaaagagttctatggcgagaacatcaaggagagccccgactatgagcgcattatcaaccttcggcattttaaacgcatcttatccctactggagggccagaagatcgcctttggcggcgagacggatgaggccacacggtatatagcaccaactgtcctgacggatgtggatcccaagaccaaggtgatgcaggaagaaattttcggcccaatcctcccaatcgtgccagtcaagaacgtcgatgaagccattaacttcatcaacgagcgggagaagccccttgcactttatgttttcagccataaccataaactgataaagaggatgatcgatgagacctcctcaggaggtgtaaccggcaacgacgtgataatgcacttcactctcaatagttttccgttcggcggggtgggctcctctgggatgggggcgtaccacgggaagcattctttcgacaccttttcgcaccagaggccttgcctcctcaaatctttaaaacgtgagggagccaacaaactgcgttatccccccaacagccaatcaaaggttgactggggcaagttcttcctcttgaagcgcttcaacaaggagaaactgggcctgctgttattaacctttctgggaatagtggcagccgtactagtcaaagccgagtactactag

SEQ ID NO: 178620 - DNA, 501 bp, synthetic construct
  misc_feature 1..501: note = Description of Artificial Sequence: Synthetic coding sequence
  source 1..501: mol_type = other DNA
atggagctggaggtgcggcgggtgcggcaggccttcctgagcggcagatcacgtcccctcaggtttaggttgcagcagttggaagccttacgtcggatggtgcaggagcgggagaaggatattctgaccgcaatcgccgccgatctgtgcaaatcggagttcaatgtctactctcaggaggtgattacagtgctgggagaaatcgacttcatgctcgagaacctgccagagtgggtgacagctaaacccgtgaagaagaatgtcctcacaatgctcgatgaggcctacattcagcctcagcccctcggggtagtcctcataatcggtgcttggaattacccatttgtacttacaatccaacctctgattggggccattgctgctgggaacgctgtgataatcaaacccagcgagttgtctgaaaatacagcaaaaattttggccaaattgctgccacagtaccttgatcaggacttgtatatcgtcataaatggaggctag

SEQ ID NO: 178621 - DNA, 1158 bp, synthetic construct
  misc_feature 1..1158: note = Description of Artificial Sequence: Synthetic coding sequence
  source 1..1158: mol_type = other DNA
atgaaggacgagccccggagcaccaacctgttcatgaagctggactcagtgtttatatggaaagaaccctttggcttagtgctgattattgcaccctggaattaccccctcaacctgactttggttttgttagtcggtgcgctggccgcgggctcttgtgtagttctgaagccaagtgaaatttcacagggcactgaaaaagtactagcagaagtcctcccacagtatttagaccaaagctgtttcgccgtggtgcttgggggccctcaagagacaggtcagttgctggagcataagttggactacatattcttcacaggctcaccccgcgtcggcaagattgtgatgacagctgccaccaagcacttgactcccgttacactcgaattggggggcaaaaatccctgttacgtggacgacaattgtgatccccagaccgtggctaatcgggtggcttggttttgttatttcaacgccgggcagacctgtgtggctcctgactacgtgctctgttccccagagatgcaggagagactactgccagcgcttcaaagtactatcacaaggttctacggggatgaccctcagagctctccaaacttagggcacattatcaatcagaagcagtttcaacggctgagggccttgctcggctgttcacgtgtagcgatcggggggcaaagtaatgaaagcgacaggtatatcgctccaaccgtgctcgttgacgtccaagagacggaacccgttatgcaagaagagatttttggaccaatactgccaattgtcaatgtgcagtcagtggatgaagctatcaaattcatcaacaggcaggagaaacctctggccctgtacgctttttctaactccagccaggttgtgaatcagatgttggagcgcaccagctctggatcctttggaggcaacgaaggcttcacatacatttcactgctctcagtacctttcggaggcgtgggtcacagcggcatgggacggtaccatgggaaatttacatttgacactttcagccatcacagaacatgcctcctagctccttctgggctggaaaagctaaaggagatccactaccccccctacacagactggaaccagcagcttctgcggtggggaatgggctcccaatcttgtacacttctctag

SEQ ID NO: 178622 - DNA, 447 bp, synthetic construct
  misc_feature 1..447: note = Description of Artificial Sequence: Synthetic coding sequence
  source 1..447: mol_type = other DNA
atgaaggacgagccccggagcaccaacctgttcatgaagctggactccgtatttatttggaaagagcccttcgggctggtgctcatcattgccccatggaactatccgcttaatcttacactcgtactgttagtcggggctttagcggcaggttcgtgtgtggtgctgaagccttccgagataagccaggggacagaaaaagttctggccgaggtcctgcctcagtatctggatcagtcctgtttcgccgtggtgttgggcggcccacaggaaaccgggcagctcttggaacacaagttggactatatcttctttaccggatcacctagagtcgggaaaattgtcatgacggctgctacgaaacacctgaccccggtgacactcgaactcggcggtaaaaatccatgttacgtcgacgataattgtgatccacagacagtggcttag

SEQ ID NO: 178623 - DNA, 288 bp, synthetic construct
  misc_feature 1..288: note = Description of Artificial Sequence: Synthetic coding sequence
  source 1..288: mol_type = other DNA
atgaaggacgagccccggagcaccaacctgttcatgaagctggactctgtgttcatatggaaggagccctttgggctggtcctaatcatcgcaccatggaactacccactcaatttgacactggtgctgctcgtaggcgctctggccgcaggatcctgcgtggtgctaaaaccatctgagatttctcaaggaacagagaaggtgttggctgaggtgttgcctcagtacctggatcagtcttgttttgccgtggtcctcggcggtccccaggaaactggccagctgtag

SEQ ID NO: 178624 - DNA, 1158 bp, synthetic construct
  misc_feature 1..1158: note = Description of Artificial Sequence: Synthetic coding sequence
  source 1..1158: mol_type = other DNA
atgaaggacgagccccggagcaccaacctgttcatgaagctggactcagtgtttatctggaaagaaccgtttggcctggtgctgatcatcgctccttggaactatcccctaaacctcacattagttctgctggtcggggcgctagcggccgggtcctgtgtggttctgaaaccgtctgaaatctctcaggggaccgaaaaagtactggccgaagtgctccctcaatacctggaccagagctgcttcgccgtagtgcttggcggtccccaggagaccggtcagctcttggaacacaagctcgattacattttctttactggcagtcctagagttggcaaaattgttatgaccgcggccactaagcatctgacacctgttacgctcgagttgggcggaaagaacccttgttatgttgacgataactgtgaccctcagactgttgccaatcgtgtcgcctggttctgttacttcaatgccggccagacttgcgtcgcccctgattatgtcctgtgctctcccgaaatgcaggaacgcctccttcccgccctccagtccaccattaccagattctatggcgacgatcctcagtcctcgcctaacttagggcacatcattaatcagaaacagtttcaacgcttgcgagctcttctcggctgcagtagagttgctataggtggacagagcaacgagagtgaccggtacatcgccccaaccgtcctggttgacgttcaagaaacagagccagtcatgcaggaggagattttcggacccatcctgcccattgtgaacgtacaatccgtggacgaggccatcaagtttattaacagacaggaaaagccactcgccctttacgcctttagtaattcttctcaggtggtgaatcagatgctcgaacgcactagctctggttctttcgggggtaacgaaggcttcacctacattagcctgctgagtgttcccttcggcggagttggacactctggaatgggcaggtatcacggaaagtttacatttgataccttcagccaccatcgaacttgtctcttagctccttctggccttgaaaagctcaaagaaatccactatcccccatacacagattggaaccagcagctactgcgctggggcatggggtcccagtcctgtacactgttatag

SEQ ID NO: 178625 - DNA, 1692 bp, synthetic construct
  misc_feature 1..1692: note = Description of Artificial Sequence: Synthetic coding sequence
  source 1..1692: mol_type = other DNA
atgctgctgcccgcccccgccctgcggcgggccctgctgagccggccgtggacgggcgcagggctcagatggaaacatacatccagcctgaaagtcgctaacgagcccgtgctggcttttacacagggctctcccgagagggacgctctgcaaaaggcgttgaaggacctcaaggggagaatggaagctataccctgtgtggtcggcgacgaggaagtgtggactagcgacgttcagtaccaggtgagccctttcaaccatggtcataaggttgcaaaattctgttacgctgataagagcttgctgaataaggcaatagaagcagcactggcagcccgcaaggagtgggacctgaaacctatagcggaccgtgcccagattttcctgaaagctgccgacatgctgtcaggacctaggcgagccgagatcttggctaaaaccatggtcggacagggcaagacagtgatacaggccgagattgacgcagcagcggagcttatcgacttctttagattcaacgccaaatacgcagttgaactggagggacagcagcctataagcgtgccacccagtaccaattcgacagtataccgcggcctagagggatttgttgccgccatatcacccttcaactttacggcaataggcgggaatctagccggagcccccgcactgatggggaacgtggtgctgtggaagccctccgacaccgcgatgcttgccagttatgccgtctatagaatactacgtgaggccggactacccccaaatattatacaatttgtcccagctgacggcccccttttcggagatactgtgacatccagcgagcatctgtgcggcatcaacttcactggttctgtgcctacctttaagcatctgtggaagcaggtggctcagaacctagatcgctttcatactttccccaggctagccggagaatgtgggggaaagaactttcatttcgtccaccggtctgccgacgtcgagtccgtcgtttccggcacccttaggtccgcctttgagtacggagggcagaagtgttcagcctgcagtagattgtacgttcctcacagtctgtggccacagatcaagggccggcttttagaagaacattcccgaattaaagttggagaccctgccgaggatttcggcacctttttttccgcggtcattgacgccaagtctttcgcgcgaatcaaaaaatggctggagcatgctcgtagcagcccatcactcactatactcgccggcggtaagtgtgatgattcggttggatacttcgtcgaaccttgcatagtggaaagcaaagatccgcaagaacctattatgaaagaggagattttcgggcccgtgctgagcgtatatgtttatccagacgacaaatacaaagaaactttgcagctggtggattccacgacctcgtatggactgacaggtgccgtgttctcacaggataaagatgtcgtgcaggaggccactaaagtgctgcggaacgccgctggcaacttttacattaatgacaaaagcactgggagtattgtggggcagcagccctttgggggagcaagggcttcaggaacaaacgacaagcccggaggcccacactacatcctacggtggacatcaccacaggtcatcaaagagactcacaaacctctgggtgattggagctatgcctacatgcagtag

SEQ ID NO: 178626 - DNA, 588 bp, synthetic construct
  misc_feature 1..588: note = Description of Artificial Sequence: Synthetic coding sequence
  source 1..588: mol_type = other DNA
atggaggccatcccctgcgtggtgggcgacgaggaggtgtggacctctgacgtgcagtatcaggtatccccctttaatcacggccataaagtagctaaattctgctacgccgataaaagtctcttgaataaggccattgaggcggctctcgccgccagaaaagaatgggatttgaagcctatcgccgatagagcacagatctttctaaaagccgccgacatgttgtccggcccgcggagggctgagattcttgccaaaacaatggtaggacaaggcaagaccgttattcaggccgagatcgatgctgccgccgaactaatcgactttttccgttttaacgcaaaatatgctgtagagctggagggacagcagccaatttccgtcccgccttccaccaacagcacagtctatagaggcctcgagggttttgtggccgccattagcccgttcaacttcaccgccatcggaggcaacctcgcaggtgcgcctgccttaatgctcagggaaggggtggtgactcttccattatgccaaatgaccaagctcaggcacacggccgtcacgtatcttgcgcgactgtcagattag

SEQ ID NO: 178627 - DNA, 633 bp, synthetic construct
  misc_feature 1..633: note = Description of Artificial Sequence: Synthetic coding sequence
  source 1..633: mol_type = other DNA
atgctgctgcccgcccccgccctgcggcgggccctgctgagccggccctggacgggcgctggactgcgctggaagcatactagctccctgaaggtggctaacgagcccgtgctggcgttcacgcaggggtctccagagagagatgcgcttcagaaggcactgaaggaccttaaaggcagaatggaagccattccctgtgtggttggtgacgaagaagtgtggacctccgacgtccagtatcaggtgagttcgctgctgaataaggcgatcgaagctgctctagccgcccgtaaagagtgggacctgaaacccatcgctgaccgcgcccagattttcttgaaagcagcagatatgctcagcggcccccggcgtgctgagattctcgcaaagaccatggtggggcaggggaagacagtaatccaagctgagattgatgccgccgccgagcttatagatttctttaggtttaatgcgaagtatgccgtcgaactagaaggccagcagccaatttctgttcctccgagtaccaatagcactgtgtataggggcctggagggttttgtggccgcaattagcccatttaatttcacagctatcggaggaaacttagcgggcgctcccgcgctcatgtag

SEQ ID NO: 178628 - DNA, 1692 bp, synthetic construct
  misc_feature 1..1692: note = Description of Artificial Sequence: Synthetic coding sequence
  source 1..1692: mol_type = other DNA
atgctgctgcccgcccccgccctgcggcgggccctgctgagccggccctggactggcgcgggcctgcggtggaaacacaccagtagtttgaaagtagccaacgaacccgtgctggcatttacccagggatccccagagagggatgcactgcaaaaggcactcaaagatcttaaaggccgtatggaggccattccatgtgtggtaggcgacgaggaggtatggacctcagacgttcagtatcaagtgtcccccttcaatcacgggcacaaggtggctaaattttgttatgccgataaatcccttctcaataaagcaatcgaagcagctctcgctgcccgcaaggaatgggacttaaagcccatcgctgacagggcacagatcttccttaaggccgccgatatgctgtcgggccctcggcgagccgagatccttgccaagaccatggtcgggcaggggaagaccgttatccaagcagagatagacgccgcagctgaactcatcgacttctttagattcaatgctaaatatgcagtcgagctcgagggccagcagcccatcagcgtgccgccttccacaaacagcactgtgtacagaggcctggaggggtttgttgccgcgattagccctttcaatttcactgccatcggcggcaatttggccggggcccccgccctcatgggaaatgttgtactgtggaagcctagtgacactgcgatgctggctagttacgcagtgtataggatcctgagagaggctgggctcccacctaacatcatccagttcgtgccagcagacgggccactgttcggtgataccgtgaccagttcagaacatctctgtggcataaactttacggggagcgttcccacctttaagcacctgtggaaacaggtggcccaaaacttggacagatttcacactttcccgcgcttggccggggaatgcgggggcaagaatttccactttgtgcaccggtccgcggacgtggaatcggttgtgtctgggacacttcgctccgcttttgagtacggagggcagaaatgtagtgcatgcagcaggctatatgtccctcactctctttggcctcagatcaaaggtcggttgctggaggagcactcacgcataaaagttggtgatcctgccgaggactttgggactttcttttccgccgtgatcgacgcaaagtcctttgcccgcattaaaaagtggcttgaacatgcccgttcctcaccgtccttgacaatcctggccggcggtaaatgcgatgactctgtgggctattttgtggaaccatgtatcgtggagtccaaggatccacaggagcctataatgaaggaggaaatattcggaccagtgctctctgtttatgtgtatcccgacgacaaatacaaagaaacactacaattagtggatagcaccacctcctatggacttacgggggccgtcttctcccaggataaggacgtggtgcaggaagcaactaaggttctgcggaacgccgcagggaatttctacattaacgacaaatcgactggcagtatcgtaggtcagcagcccttcggcggtgccagggcatctggcaccaacgataagcctggggggcctcactacatcttgcggtggaccagcccccaggtgatcaaggagacccacaagcccctgggggactggtcttatgcatacatgcaatag

SEQ ID NO: 178629 - DNA, 645 bp, synthetic construct
  misc_feature 1..645: note = Description of Artificial Sequence: Synthetic coding sequence
  source 1..645: mol_type = other DNA
atgctgctgcccgcccccgccctgcggcgggccctgctgagccggccttggactggtgccggccttcggtggaaacacacaagctcgttaaaagtcgcaaatgagcctgttctcgccttcactcaggggtcgcccgaaagagacgccctgcagaaggcacttaaggacctgaaaggcaggatggaggctataccctgcgtggttggagacgaggaagtgtggacctccgacgtgcagtatcaggtctccagcctcctgaataaggcgattgaggctgctttggctgccagaaaggaatgggacttgaaacctattgccgatcgcgcccagatatttcttaaggcagccgatatgttaagtggacctcgcagggctgagatactcgcaaaaactatggtaggtcaaggaaagactgttattcaggcggagatcgacgccgctgccgaactcattgattttttccgctttaacgcaaaatatgccgtcgaactcgagggtcagcagccaatctctgtcccgccgtccaccaacagtacagtgtatcgagggctggaagggtttgtggccgccatttcaccctttaacttcacagccatcggcggcaacttggcaggagcccccgcactgatggttaggtgtggatag

SEQ ID NO: 178630 - DNA, 462 bp, synthetic construct
  misc_feature 1..462: note = Description of Artificial Sequence: Synthetic coding sequence
  source 1..462: mol_type = other DNA
aacaaggccatcgaggccgccctggccgcccggaaggagtgggacctaaaaccaattgcagaccgggctcagattttcctgaaagctgccgacatgctctctggcccccgaagggccgagatcctggctaagactatggtgggtcaaggaaaaacagtaatacaggctgagatcgacgctgccgctgaattaatcgatttttttagatttaacgcgaaatacgccgttgagctcgaggggcagcagcctatttctgtgcctccctcaactaatagcacagtgtatcggggtttggagggtttcgtggcggcaatttcgcccttcaacttcaccgctattggcgggaatcttgccggggccccagccttgatgctccgcgagggcgtggtgaccttgccactgtgccagatgacaaaacttcgccacactgccgtgacgtacctcgccagactctccgattag

SEQ ID NO: 178631 - DNA, 1512 bp, synthetic construct
  misc_feature 1..1512: note = Description of Artificial Sequence: Synthetic coding sequence
  source 1..1512: mol_type = other DNA
atggaggccatcccctgcgtggtgggcgacgaggaggtgtggaccagcgacgtgcaataccaggtcagccctttcaatcatggacataaggtggccaagttctgttatgctgacaagtcacttctgaacaaggcaatcgaggccgctctggccgcaaggaaagagtgggatctaaagcctattgcagacagggcccaaatttttctgaaggctgccgacatgctgtctggcccacgacgggccgagattcttgccaagacaatggtgggccaaggtaaaaccgttattcaagctgagattgacgctgctgccgaactgattgactttttccgctttaatgctaagtatgctgtggagctcgaaggtcagcagccgatatccgtcccgccctctacaaactccaccgtttacaggggcctcgagggatttgtagccgcaatctctccatttaactttaccgccatcggtggaaacctggccggcgcgccagccctcatgggaaatgtcgtcctgtggaagccctctgacaccgcaatgctggcatcctacgcagtgtaccgcatcctgagggaggccgggctgccaccaaatattatacagtttgtaccagccgacggaccattgtttggagatacagtgacatcaagtgagcacctgtgtggaatcaactttaccggcagcgtacctacgttcaagcatctgtggaagcaggtcgcacagaatctggacaggtttcatacctttccgagactcgcaggggagtgcggaggcaagaatttccattttgtccacagaagcgctgatgtggagtcagtggtcagtggaacccttaggtccgctttcgagtacggtggccaaaagtgttctgcctgctccagattatatgtgccccactccttgtggcctcagattaaagggcgcctcctagaggagcatagccgcataaaggtgggcgaccctgccgaggatttcggcacattcttcagcgccgtgattgatgctaaaagtttcgcacgaattaagaagtggctggagcacgcccgctcttcccccagcttgactatattggctggagggaaatgcgacgacagcgttggatatttcgtcgagccctgtatcgttgagtctaaggatccacaggagcctatcatgaaggaggaaatctttggccccgtgctgtccgtgtatgtttatccggacgataagtataaggagaccttgcagctcgtagactctaccacatcatatggattgaccggcgccgtgttttctcaagacaaggacgtggtgcaggaggccaccaaagttttaaggaacgccgccgggaacttctatatcaacgataagtctactgggagtatcgtcggtcagcagccttttggcggagctcgggcttccggaaccaatgacaaacccggcggcccgcattatattttaagatggacctccccacaggtgattaaggagactcataagccactcggcgattggtcctacgcgtatatgcaatag

SEQ ID NO: 178632 - DNA, 1539 bp, synthetic construct
  misc_feature 1..1539: note = Description of Artificial Sequence: Synthetic coding sequence
  source 1..1539: mol_type = other DNA
atgctgctgcccgcccccgccctgcggcgggccctgctgagccggccctggacaggcgcggggctgcgttggaaacacacctcaagccttaaagttgctaacgagcctgtgttggccttcacacagggatcgcccgagagagacgccctgcagaaagcactcaaggatcttaagggccggatggaggccataccgtgcgtggtgggggatgaggaagtctggaccagtgacgtgcagtaccaggtgtcaccctttaaccacggacataaggtcgctaagttctgctacgcggataagagcttgctcaataaggccattgaggctgcactggcagctaggaaggaatgggacctgaaaccaatcgccgatcgagcccagatctttctcaaagccgcagacatgctctccgggccaagaagagcagagattctggccaagaccatggtcggtcaagggaagacagttatccaagctgagattgacgcggccgcagagttgatcgatttctttagatttaatgccaagtatgccgtagagctggaaggtcagcagccaatcagcgtgcccccctccacgaatagcaccgtgtaccgcggactagaggggttcgtcgccgcgatttcaccatttaactttaccgccatcggaggcaatcttgccggtgccccagcccttatggggaatgttgtcctttggaaaccctccgacactgccatgctcgcctcatacgcggtttaccgaatactgagagaagccggtttgccaccaaatatcatacagttcgtgcccgccgacgggccactgtttggagacaccgtgacgagctcagagcacctgtgcggcatcaactttacagggagtgtgcctacatttaagcatctgtggaaacaagtagcccaaaatctggaccgcttccatactttcccccgtcttgcaggggagtgcggggggaagaattttcatttcgtgcatcgatcggccgacgtggagtcagtagtttccggtacactgcgaagtgccttcgagtatggcggccaaaaatgctccgcttgcagcagactgtatgtcccgcacagtctgtggccccagattaagggccgtcttttggaggaacactcacgtataaaagtcggagaccccgccgaagatttcggaactttcttcagcgctgtcattgacgccaaggaaatctttggtccagtcttgtccgtgtacgtgtatccagacgataaatacaaagagacgctacagttggtggattctacaacgagctatgggctgacaggtgccgtcttttcacaggataaggacgtggtccaggaggccaccaaggtattgcgaaatgcagccggtaacttttatatcaacgacaagtcgaccggctccatagtaggacaacagccatttggtggcgcccgcgcctcaggcactaatgacaaaccaggaggcccccactatattctgagatggacatctccccaggtgataaaagaaacccacaaacctttaggcgattggtcttacgcctatatgcaatag

SEQ ID NO: 178633 - DNA, 1647 bp, synthetic construct
  misc_feature 1..1647: note = Description of Artificial Sequence: Synthetic coding sequence
  source 1..1647: mol_type = other DNA
atggccacctgcatctggctgcggagctgcggcgcccggcggctgggctctacctttcccgggtgtagactgcgacccagggcaggtggattagtgcctgcctcggggccagcgcctggaccagctcagctcaggtgttacgcagggcgattagcagggttatccgccgcactcttaaggacggactcattcgttggaggaaggtggctcccagccgccgccacgtttcccgtacaggaccctgcttccggtgctgccttgggaatggttgctgattgcggcgtccgggaggccagggcggcagttagggcggcctatgaggctttctgccgatggagagaagtcagcgccaaagaaagaagctccctgctgcgcaagtggtataaccttatgatacaaaataaggatgatctggcacgtatcatcactgccgagtctggaaaacccctgaaagaagcccacggcgagattctgtattctgccttcttcctcgagtggttcagtgaagaggccagacgcgtatacggagatataatccatacgcctgcgaaagaccgacgggcccttgtgttgaagcaacccatcggcgtggccgcagttatcacaccatggaatttcccaagcgcaatgattacaaggaaggttggagctgcactagccgcgggatgtaccgtcgtagttaaaccagcagaggacaccccattttctgccttggctctcgcggaggtcaaccagggtttcttgcttgaccttgaccccctccttctagcttcccaggcaggcatcccttcaggcgtgtacaacgtcattccctgcagtcggaagaatgctaaggaagtgggcgaggcaatttgtaccgacccgctggtctctaaaatcagttttaccggatccacgactaccggcaagatcctccttcaccatgcggctaacagtgtaaagagggtctcaatggagttgggcggcctcgcgccatttattgttttcgattcagccaatgtcgatcaggcagtggcaggagccatggcctctaaattccgtaatacgggccaaacttgtgtctgttccaaccagtttcttgttcagcgcgggatccatgacgcatttgtgaaggcatttgctgaagcaatgaagaaaaatctccgcgtcggaaatgggtttgaagaaggaacgacccaagggccactgatcaacgagaaggctgtcgagaaggttgagaaacaggttaatgacgcagtgagcaaaggagccaccgtcgtgacagggggtaagcgtcaccagctcgggaagaatttcttcgaacccacactcctgtgcaatgtgactcaagacatgctttgtacccatgaggaaacctttggcccactggcccccgtcatcaagttcgatacagaggaggaggccatagccatagctaacgcggctgatgtcggcctagccgggtacttttattcccaagaccctgcccaaatctggcgtgtggccgaacagctggaagtgggcatggtgggcgttaacgaggggctcatttcatctgtcgaatgtcccttcggaggcgtgaaacagagcggcctggggagagaaggaagcaaatacgggattgacgagtatctggagctgaagtacgtgtgttacgggggcctgtag

SEQ ID NO: 178634 - DNA, 1608 bp, synthetic construct
  misc_feature 1..1608: note = Description of Artificial Sequence: Synthetic coding sequence
  source 1..1608: mol_type = other DNA
atggccacctgcatctggctgcggagctgcggcgcccggcggctgggatcaacattccctgggtgtagactgaggccgcgggccgggggcctcgttccagcttcaggaccagcacccggacctgcacagctgcgatgttatgcagggaggctggcaggactgtccgctgccctgctccggacagactccttcgtagggggccgctggctgccggctgccgccacctttcccgtgcaggaccccgcctctggcgccgctctggggatggtggccgactgtggtgtgagagaggcccgggccgcagtgagggccgcatacgaggccttctgcaggtggcgagaggtctcagcaaaggagcggtccagcctcctaaggaaatggtataacctcatgattcagaacaaagacgatctcgctagaataataaccgccgagtcaggaaaacctctgaaagaagcccacggcgagattctgtactcagctttctttctggaatggttttcggaggaagctcgacgggtgtatggggatatcatccatacacccgcaaaagacaggagggcactggtactcaaacaaccaataggcgtggccgccgtgatcacaccatggaatttcccctccgctatgattacacgcaaagtcggggctgcgttggctgcgggctgtacggttgtggtgaagcccgccgaagacacacccttctccgcactcgcactggctgaactggccagtcaggcagggatccccagcggtgtctataacgtcattccctgtagcaggaaaaacgccaaggaggtaggcgaagccatttgcaccgacccactggtcagtaagataagcttcacgggatccacaacaaccgggaagatactgttacatcacgccgccaactctgtgaaacgcgtgtctatggagttagggggcctggctccattcatcgtgttcgattcggccaatgtcgaccaggcagttgcaggcgcaatggccagtaagtttagaaataccggccagacttgcgtgtgctctaaccagttcttagtgcaacgcggaattcacgacgcattcgtcaaggccttcgcggaagcgatgaaaaagaacctcagggtcggtaatggttttgaagagggcacaacacaagggcctctgatcaacgaaaaggcagtggaaaaggtagaaaaacaagttaacgacgcagtgagtaaaggagccaccgtggtgactggcggaaagagacatcaattggggaagaacttcttcgagcccactttgttgtgcaacgtgacacaggatatgttgtgtacccatgaagaaacttttgggcctcttgcaccagtcataaagttcgacaccgaggaggaggctattgccatcgctaacgccgctgacgtgggactcgcaggttacttctactcccaggatcccgctcagatttggcgggttgctgagcagctcgaagtggggatggtgggcgtcaatgagggactgatcagctctgtggagtgcccttttggtggggtgaagcagtccggactcggccgagaaggttctaaatacggaatcgacgagtaccttgaactgaaatacgtctgctatggaggtctatag

SEQ ID NO: 178635 - DNA, 1344 bp, synthetic construct
  misc_feature 1..1344: note = Description of Artificial Sequence: Synthetic coding sequence
  source 1..1344: mol_type = other DNA
atggtggccgactgcggcgtgcgggaggcccgggccgccgtgcgggccgcatatgaggccttctgtcgttggcgggaggtctccgcaaaggagagatcctccctactccggaagtggtacaaccttatgatacagaataaggatgaccttgccaggataattactgccgaaagtggaaagcccctcaaagaggcgcacggagagatcttgtactcggccttctttctggagtggttttccgaggaggcgaggagggtatatggcgacattatccacacccccgccaaggaccgccgggcactggttctaaaacagcccatcggggtggccgccgtgatcaccccatggaacttcccgagcgcgatgattactcgtaaagtgggggccgccttggccgcaggctgtactgttgtggtcaagccagcggaagataccccattcagtgctctcgcgttggccgagctcgcatcacaagcagggatccccagcggtgtctacaacgttatcccatgtagcaggaagaatgctaaagaagtgggggaggctatatgtaccgatcctttagtcagcaaaatttcctttacagggagtacaacgaccgggaagattctcctgcaccacgcggcaaacagtgtcaaacgcgtgtctatggagctcggaggtctggccccttttatcgtgtttgattcagccaacgtggatcaggccgttgccggagccatggccagtaaattccgaaatacaggccagacatgtgtctgctctaatcagtttctggtacaaagaggaatacatgacgcattcgtcaaggctttcgcagaggcaatgaaaaagaacttgagagttggcaacggcttcgaagagggtaccacccaagggccactcattaatgagaaagcagtcgagaaggtggagaaacaagtcaacgacgctgtatctaaaggggcaaccgttgtgacagggggtaaacgccaccagctgggtaagaacttctttgagcctacattactctgtaatgttacacaggacatgctctgcacccatgaagagacgttcggacctctggccccggtgattaagttcgacaccgaggaagaggccattgctattgccaatgcggctgacgtgggactggccggatatttctattctcaagatccagcacagatctggagggtggccgaacagcttgaggtcggaatggttggtgtgaacgagggtctaataagctccgtggagtgcccattcggtggtgtcaaacagagtggtctagggcgtgagggttccaagtacggcatcgacgaatacctggagctgaaatacgtctgctacggcggactgtag

SEQ ID NO: 178636 - DNA, 1608 bp, synthetic construct
  misc_feature 1..1608: note = Description of Artificial Sequence: Synthetic coding sequence
  source 1..1608: mol_type = other DNA
atggccgccctgctggccgccgccgccgtgcgggcccggatcctgcaggtgagttctaaggtgaaaagctcacccacctggtatagtgcttcctcgttctcctcatccgtgcccaccgttaaactcttcattgggggtaaattcgtggaatcaaagagtgataagtggattgatatacacaatcctgctacgaacgaagtgatcggtagagtgccgcaggcaactaaagctgagatggacgccgcaatcgcctcttgcaaacgggcatttccagcgtgggcagacacgagcgtcctttcacgacagcaggtgctgctgcgataccagcagctgattaaggagaatctgaaagagatcgcaaagctgataaccctggaacaggggaagacactggcagatgctgagggcgacgtgttcagggggctgcaagtcgttgaacatgcctgcagtgtgacctctctgatgatgggtgaaactatgccctccataaccaaggatatggatttgtatagctacagactgcccctgggcgtatgcgcaggtatcgcaccttttaatttccccgctatgattcctctttggatgtttcctatggcgatggtgtgtggaaacactttcctgatgaagccatctgagagggtcccaggggctacaatgttgctggccaaacttctgcaggactcaggagcacctgatggaaccctcaacattatccacggtcagcacgaagccgttaactttatttgtgaccaccccgacatcaaggccatatcttttgtgggctcgaataaagcaggggagtatattttcgagcggggttcacgccatggcaaaagggtgcaggccaatatgggcgctaaaaatcacggcgtcgtcatgcctgacgcaaacaaggaaaacaccctcaatcaactcgtaggcgccgcatttggggcagcaggacagagatgcatggctctgagcaccgctgtcttagttggcgaggccaagaaatggctcccggaactggtcgaacacgccaagaatctgagagttaatgccggagaccagcccggagcagatttgggaccgttgattacgccccaggcaaaggaacgggtctgcaatctgatagatagcggaaccaaagagggtgcctcaatcctgctggatggtaggaagatcaaagtgaaagggtacgaaaatggaaattttgtggggcccacaatcatctctaacgtaaagcccaatatgacgtgttacaaagaagaaatcttcggccctgttcttgtagtgttggagacagagaccttggacgaggccatccaaatagtgaacaataacccgtacggaaacgggacggccatcttcaccacaaacggagctaccgcacgaaaatatgcacacttagtggacgttggacaggtgggcgtgaacgttcctatcccggtcccattgccaatgtttagcttcaccggctcacggagctccttcaggggcgatacaaatttttacgggaaacaagggatccagttttatacccagctgaagacaatcactagccagtggaaggaggaggacgccactttatcctcccccgccgtcgtaatgcccactatggggaggtag

SEQ ID NO: 178637 - DNA, 1620 bp, synthetic construct
  misc_feature 1..1620: note = Description of Artificial Sequence: Synthetic coding sequence
  source 1..1620: mol_type = other DNA
atgtggcggctgccccgggccctgtgcgtgcacgccgccaagaccagtaaactgagcggtccatggagtagacctgcagcatttatgtccactttattgatcaatcaaccccagtacgcctggttaaaggaactcgggctgcgcgaggaaaatgagggggtgtacaatggaagctggggtggacgcggggaagtgataaccacctactgcccagccaataatgagcctatagcacgtgtgagacaggcttctgtggccgactacgaggagactgtgaaaaaagctagggaggcttggaagatatgggcagacattccagccccaaagcggggtgagatcgtgaggcagataggcgacgctttgagagaaaaaatccaagtcctggggtctttggtgagccttgaaatgggcaaaattctggtagaaggagtcggtgaagttcaagagtatgtggacatctgcgactatgcagtaggtctcagcagaatgatcggcgggccaatcctgccttctgagcgatccggtcatgctcttatcgagcaatggaatcctgtcggcctggttggcattattacagcattcaacttccccgtggctgtgtatggatggaataatgccatagctatgatttgcggaaatgtttgcctttggaagggggcgcctacaacgagcctaatctcggtggcagttactaaaataatcgctaaagttctagaggacaacaagctgcctggggcaatctgctcacttacgtgtgggggggccgatatcggtaccgccatggctaaggacgagcgcgtgaacctgttaagttttacaggttccacccaggtggggaagcaggtcggactgatggtgcaggaaaggttcggaaggtccctgctggaactgggaggcaataacgccatcatcgcatttgaagatgcagatctctctctggtcgtcccgagcgctctgttcgctgccgtcggcaccgcgggacagaggtgtacaactgcccgtagactgtttatacatgaaagcatccatgacgaagtggtcaaccgactcaagaaagcgtatgcccagatccgggtgggtaacccctgggacccaaacgtgttatatggcccactccatactaagcaggctgtatccatgttccttggagctgttgaagaggccaagaaagaaggcggtactgtagtctacgggggaaaagttatggatcggccgggcaattacgttgagccaaccattgtcacggggctcggacatgacgccagcatcgcacacactgaaaccttcgcaccaatcttatatgttttcaaatttaaaaacgaggaagaagtcttcgcctggaataacgaggtcaagcaaggcctgagctcctcgatcttcacaaaagacctcggacggatctttaggtggctcggacctaaggggtctgattgtgggatagtgaatgtgaatataccaaccagcggcgcggaaattggaggagccttcggcggcgaaaaacacacaggtggcgggagagagtccggcagtgacgcctggaaacagtacatgcgccgctctacttgtaccatcaattacagcaaggatttaccattagcccaaggcattaagttccaatag

SEQ ID NO: 178638 - DNA, 1044 bp, synthetic construct
  misc_feature 1..1044: note = Description of Artificial Sequence: Synthetic coding sequence
  source 1..1044: mol_type = other DNA
atgtggcggctgccccgggccctgtgcgtgcacgccgccaagacctctaaattgagtggaccttggtcaaggcccgctgcctttatgtcaactagtctgatctctgtggcggtgacaaagataatcgccaaggtcctggaagacaacaaattaccgggcgcgatttgctccctcacgtgtgggggggcagatatcggcacagctatggccaaggacgaacgagtaaaccttctgtcttttacggggagtacccaggttggtaaacaggtcggcctcatggttcaggagagattcgggaggtcactgctggagttgggcgggaacaacgctatcattgcgttcgaagacgccgacttgtccctcgtggtacccagcgccctgttcgccgccgtgggaacagccggccaacgctgtaccacagctaggcggctttttattcacgagtctattcacgacgaggtggtgaaccgacttaagaaggcttatgctcaaataagagtgggcaacccgtgggatccgaacgtactgtacggcccactacataccaagcaggcagtgagcatgtttttgggggctgtagaggaagccaagaaagaagggggtacagtggtatacggcggaaaagtgatggatcggccagggaattacgtggagccaaccattgtgactggcctcggacatgatgcctccatagcccacactgaaactttcgcaccaattttgtatgtgtttaaattcaagaacgaagaagaggtgttcgcatggaataacgaggttaaacagggactgagttcttccatcttcacgaaagaccttggtcggatctttaggtggctcggacccaaagggagcgattgtgggatcgtgaacgttaatatacccacctccggcgctgaaatcggcggcgctttcggtggagaaaaacataccggcggaggacgagagtccggaagcgatgcgtggaaacagtatatgaggagaagtacgtgcactattaattacagcaaggaccttcccctggcacaaggcattaaattccagtag

SEQ ID NO: 178639 - DNA, 1509 bp, synthetic construct
  misc_feature 1..1509: note = Description of Artificial Sequence: Synthetic coding sequence
  source 1..1509: mol_type = other DNA
atgggcagccccggccggggcgccggcctgtacttcagcagcagccagggtctcggtctcataccatcgcctggactgagcatgtggagacttccaagagccctctgtgtgcatgccgcaaaaacatccaagctgagcggaccttggagccgtcccgcagcgttcatgtcaacattactgattaatcagccccagtatgcctggttgaaagaactgggcctcagggaggagaatgagggtgtatacaatggcagctggggaggcaggggcgaagtgatcaccacatattgcccggcgaacaacgagcccatcgctcgcgtccgccaagcatccgtcgccgattatgaggagaccgtcaaaaaggctcgcgaagcttggaagatttgggctgacattcccgccccaaaacgaggcgaaatcgtccggcagattggggatgcgctgcgggagaagattcaagttcttggctctcttgtttccttagaaatgggaaaaatattagtggagggggtgggggaggtacaggagtacgtcgacatttgcgattatgccgtaggcctgtcccggatgattggcggccctatccttcctagcgagcgctcaggacacgcactgattgagcagtggaatcccgttgggctcgtggggattattaccgcatttaacttccccgttgccgtgtatggttggaacaacgcaattgcaatgatctgtggcaacgtctgtctgtggaagggagccccaaccacttctttgattagtgtggccgtaacaaagatcatcgctaaggtgctcgaagacaacaaactgcctggcgccatatgtagcctcacatgcgggggcgccgacataggcactgccatggctaaggatgagcgggtgaaccttttaagttttactggctctacgcaggtaggaaagcaagtagggttgatggtccaggagcgctttgggcggtcactgctggagttgggtggaaataatgctatcatagcttttgaggacgccgacctttccttggtggtcccatcagcactgttcgcggccgtcgggacagctggacagaggtgtactaccgctcgacgtttagtaatggatcgccctgggaactacgtcgagcccaccattgtcaccggactaggccatgacgcaagcatagcacatactgagacctttgctccaattctgtacgtcttcaagtttaagaacgaggaggaagtgttcgcttggaacaacgaggtcaagcagggcctgtcgagcagcatcttcaccaaggacctggggcggatttttcgatggttggggccgaagggctccgattgcgggattgtaaacgtcaatatccctacgtccggcgctgagataggcggcgccttcggcggcgaaaaacatacaggcgggggaagggagtcaggttccgacgcttggaaacagtacatgcggcggtctacatgcaccatcaactactctaaggacctgccccttgcccagggaataaaatttcagtag

SEQ ID NO: 178640 - DNA, 1314 bp, synthetic construct
  misc_feature 1..1314: note = Description of Artificial Sequence: Synthetic coding sequence
  source 1..1314: mol_type = other DNA
atggccggcaccaacgccctgctgatgctggagaacttcatcgacggcaagttcctcccttgttcatcatatattgactcttacgaccccagtaccggggaagtctattgtcgtgtccctaattccggaaaggatgagatagaggcagccgtcaaggccgcacgagaagcattccccagttggtcttctcgcagcccacaagaacgcagtagggtgcttaaccaggtcgccgaccttctggaacagtccctggaagagtttgcacaagctgaatcaaaggatcagggaaaaaccctcgcactggctagaacaatggatattccccggtccgtccagaattttaggttctttgccagcagctccctgcaccatactagtgaatgcacgcagatggaccaccttggttgcatgcattataccgtgagagctccagtcggtgtcggcgtcccccctggcgtggtgaatatcgtattcggcactggtcccagagtcggggaggctttagtgtcccatcctgaagtacctctgatcagcttcaccggctcgcaaccgacagcagaaagaatcactcaattaagcgctccacactgcaagaagttatcacttgaacttggcggcaagaatcctgcaatcatctttgaggatgctaaccttgatgaatgcattcctgcaaccgtccggagctccttcgccaaccagggggagatttgtctttgtacaagccggatctttgtgcagaagagcatatattccgaattcttgaagagatttgtggaagctacccggaagtggaaggtggggatcccatcggatcctttggtcagcatcggcgcactaatcagcaaggctcatttagagaaggtgcggagctacgttaaaagggcactggccgaaggagctcagatttggtgcggagagggtgtggacaagctgtccctgccggccagaaaccaggcaggttactttatgctcccgacagtgatcacagatatcaaagacgaatcatgctgcatgacagaggagatatttggaccagtgacctgcgtggtgccgttcgactccgaagaggaggtcatcgagcgggctaacaatgttaagtacggattggcagcaaccgtgtggtcatcaaacgtgggcagggttcaccgcgtggcgaagaaattgcagagtgggctggtgtggaccaactgttggcttatacgggaacttaatcttccctttggaggcatgaaatcgtcagggattggaagggaaggcgctaaggacagttatgattttttcactgagattaagactatcactgttaagcactag

SEQ ID NO: 178641 - DNA, 1464 bp, synthetic construct
  misc_feature 1..1464: note = Description of Artificial Sequence: Synthetic coding sequence
  source 1..1464: mol_type = other DNA
atggccggcaccaacgccctgctgatgctggagaacttcatcgacgggaagttcctgccttgctccagctacatcgacagctacgacccttcaacaggcgaagtatattgcagggttcccaactcaggcaaggacgagatcgaagctgcagtgaaggctgcacgcgaagcgttcccaagttggtcctctaggtccccacaggaaagatcccgcgtgcttaatcaggtggcagatctgctcgagcagagtctagaagagtttgctcaggccgagtcaaaggaccaggggaagactctcgctttggctagaactatggatatcccccgaagcgtgcagaatttccgcttttttgcttcttcttcactgcaccatacatcagaatgtactcagatggaccatctagggtgtatgcactatacggtgagagcccccgtgggtgttgctggtctcatatctccttggaaccttcccctgtacctcttaacatggaaaatcgcccctgccatggcggctggcaacaccgtgattgccaagccaagtgagctgaccagtgtgacagcatggatgctctgcaagctgttggataaggccggagtgcctccaggggtggtgaacattgtttttgggactggtcctagagtaggagaagccttggtttcccacccagaggttccgcttatctccttcactggctcccagccaacagcggagcggattacgcagttgtctgccccccactgtaagaagctgagcctcgaattaggagggaagaaccctgccatcatttttgaggatgccaatctggatgagtgtattcctgccacagtgcgatcctcattcgccaaccaaggcgagatttgcctgtgcacatctcgcatctttgttcaaaagagtatctactccgaattcctcaaacggttcgtggaggcaacacgaaagtggaaggtagggatcccttctgacccactcgtgtccatcggtgccctgattagtaaagcacatttagaaaaggttcggagctacgttaaacgggcactcgcagagggcgcccaaatctggtgcggagagggagtcgacaagctgtctttgcccgcccgtaaccaggccggctattttatgctgccaaccgtgataacggacattaaagatgaatcatgttgtatgaccgaggagatttttgggcccgtgacttgcgtagtgccattcgattcggaggaagaggtgatcgagcgcgcgaataacgtgaaatacggcctggcagccaccgtttggagcagcaatgttggacgcgtccatcgggtggctaagaagctgcagagcgggctggtgtggacaaactgttggctgattcgcgagctgaacttgccctttgggggcatgaagagcagcgggattggccgggagggagctaaggactcatatgacttctttacagagattaaaacaatcacagtgaagcactag

SEQ ID NO: 178642 - DNA, 1302 bp, synthetic construct
  misc_feature 1..1302: note = Description of Artificial Sequence: Synthetic coding sequence
  source 1..1302: mol_type = other DNA
atggccggcaccaacgccctgctgatgctggagaacttcatcgacggcaaattcctgccctgctcctcatacatcgactcctacgatccaagcactggagaggtttactgcagagtgccaaatagtggcaaggacgagattgaggccgccgtgaaggctgcacgagaggcgtttcctagttggtccagtagaagtcctcaagaaaggtctcgagttctgaaccaggtggctgatcttctggagcagtccctcgaggaattcgctcaagccgagtcgaaagatcaggggaaaacactggccctggctagaactatggatattccccggtctgtgcagaattttagattttttgcttctagctctttgcaccatacgagcgagtgtactcagatggatcacctgggttgtatgcactacacggtacgggcccctgtcggcgtcgctggactgataagtccctggaatttacccctctacctcttaacatggaagattgcacccgcaatggcagcagggaacactgtcattgctaagccatctgagctaacatccgtgacagcttggatgctctgtaaactcttggataaagctggagtgcctccaggagtggttaacattgttttcggcaccggaccgcgggtaggagaggccctcgtctctcaccccgaggtgccactcatcagttttaccggatcccagcctaccgcggaacggattacacagctctccgcacctcattgcaaaaaactgagcctggagcttggtggcaagaatccggcgataattttcgaggatgccaaccttgacgagtgcatcccagcaacggtgagatcttcatttgctaaccaagtaagatcatacgtcaaaagggcgctggccgaaggggcccagatttggtgtggagagggagtggataaactttcgttgccagcacggaaccaggcaggatactttatgcttccaaccgtgatcacggacattaaggatgagtcgtgttgcatgaccgaagaaatattcggccctgtcacttgcgtggtgcccttcgattcagaggaagaagttattgaaagagccaacaacgtcaagtacggcctggccgcgactgtgtggtccagtaacgttggaagggtgcacagagtcgcaaaaaagctacaatcaggccttgtgtggacgaattgctggcttatccgcgagctgaatctaccctttgggggaatgaaaagcagtgggatcggtagagagggggccaaggacagctacgactttttcactgagatcaagaccatcaccgttaagcactag

SEQ ID NO: 178643 - DNA, 1557 bp, synthetic construct
  misc_feature 1..1557: note = Description of Artificial Sequence: Synthetic coding sequence
  source 1..1557: mol_type = other DNA
atgttcctgcgggccggcctggccgccctgagccccctgctgcggtcgctgcgtccttctccagtggcggccatgagcacaggaacctttgttgtttcccagcccctgaattatcggggaggcgcccgagtggaaccagctgatgcctcaggcacggaaaaggcttttgagccagccaccggccgtgtgatcgcaactttcacgtgctcgggagagaaagaggtcaatctcgccgttcagaacgcaaaggcagcattcaagatctggtctcagaagtctggcatggaacggtgtagaatattactggaggctgccaggataatcagggagcgagaggatgaaatcgctaccatggaatgtattaataatggcaagtccatctttgaagctcgcctggacatagacatctcatggcagtgcctggagtactacgccggattggccgccagtatggcaggagaacacattcaactgccaggcgggagtttcgggtatacccggcgggaacccttgggcgtttgcgttggcattggagcctggaactatcccttccaaattgcctcttggaagtcagctcctgccctcgcgtgtggaaatgcaatggtcttcaaaccatcccccttcacgcccgtgagcgcactgttactggcagagatctattccgaggctggcgtgcctcctggcctctttaacgtggtccagggaggagctgcgacaggccaatttttatgtcagcatcccgatgtcgccaaggttagcttcaccggctccgttcccacggggatgaaaatcatggagatgagcgctaaagggattaagcccgtcaccctcgagttgggcggaaaatcgcctcttattatcttctccgactgcgacatgaataacgccgtcaagggggccctgatggctaatttcctgacacaaggccaggtttgttgcaatggaacccgagtgtttgttcaaaaggagatcctagataagtttacggaggaagtggttaagcaaacacaacggatcaaaataggggatccccttctggaagatacccgcatgggacctctgattaaccggccacatttagaacgtgtattagggtttgttaaagtagcaaaggagcaaggggccaaagtcctgtgcggaggagacatttatgtccctgaagaccccaaattgaaggatggctactacatgcggccttgtgtgttgactaattgtcgggacgatatgacttgtgttaaagaagagatatttggtcctgttatgtctattctgtcgtttgacacagaagctgaagttcttgagcgcgccaacgacaccacatttgggcttgccgctggcgtttttacacgcgacatacagcgggcgcatcgagtcgttgcagagctccaagcaggcacatgcttcataaataattacaacgtcagcccagtggagctgccgttcggaggctacaagaaaagcgggtttggccgggaaaacggcagggtgacaattgagtattattcccagctcaagaccgtgtgcgttgagatgggagatgtagaaagcgcattctag

SEQ ID NO: 178644 - DNA, 1275 bp, synthetic construct
  misc_feature 1..1275: note = Description of Artificial Sequence: Synthetic coding sequence
  source 1..1275: mol_type = other DNA
atggagcggtgccggatcctgctggaggccgcccggatcatccgggagcgggaggatgagattgccactatggaatgcattaataatgggaagagcatcttcgaggccaggctcgacatcgacatctcctggcagtgcctggagtactatgctggtctcgccgcctcgatggccggagaacacatccaactccccggcggtagtttcggatatacgcgccgtgaaccgttaggagtgtgtgtcggcatcggagcatggaactatccatttcagatcgcctcatggaagagtgccccagcgctggcctgcggaaatgctatggtctttaaaccgtctccttttacccctgtgtcagctcttctcctggctgagatatatagcgaggcaggagttccacccggattatttaacgtggtccagggtggcgccgctactgggcagtttctgtgtcagcatcctgacgtggccaaggtgtcattcaccgggagtgttccaaccggtatgaagattatggagatgagcgccaaagggattaaaccggtcacactcgagttgggtggaaaatcccccctgattatattctcagactgtgatatgaacaacgccgtgaagggggccttaatggccaacttccttactcagggacaggtttgctgtaacgggacaagagtttttgtgcagaaggagatcctcgacaaattcaccgaagaggtggtcaaacaaacccagaggattaagatcggtgacccccttctagaggataccagaatggggcccctcatcaacagacctcacctggagagagtcctgggattcgtaaaggtggccaaagaacagggcgccaaagtgctttgtgggggcgatatctacgtaccagaggacccaaaacttaaagacgggtactatatgcgaccgtgcgtccttactaactgcagagatgacatgacttgtgtaaaggaggagatcttcggacctgtcatgagcattctgtctttcgataccgaagctgaagtgctggagcgggccaacgatacgactttcggactggctgctggcgtctttacgcgcgacattcagagagcacacagagtggtcgcggaacttcaggctgggacttgttttatcaataattataacgtgtctccagtagagttgccttttggtgggtacaagaaaagtggattcgggagagagaatgggcgcgtaactatcgaatactacagtcagctgaaaacggtctgcgttgagatgggcgatgtggagagtgctttttag

SEQ ID NO: 178645 - DNA, 4017 bp, synthetic construct
  misc_feature 1..4017: note = Description of Artificial Sequence: Synthetic coding sequence
  source 1..4017: mol_type = other DNA
atggaccgggccagcgagctgctgttctacgtgaacggccggaaggtcatcgagaagaatgtggaccccgagaccatgttactgccttaccttcgtaagaaactgagactgactggaacgaagtacgggtgcggcggtggcggatgcggtgcatgcactgtaatgatctcccggtataatcctatcaccaaaagaattcgacaccatccagctaacgcctgcctgatccctatctgtagcctgtacggcgctgccgtgacgacagtggaaggtatcggctccacccacacgaggatccacccggtccaggaacggatcgccaaatgccatggaacccagtgcgggttctgtacgcctgggatggtcatgtccatttacacattgctgcggaatcacccagaacccactcttgatcagctcaccgatgctctgggcggcaacctctgccgatgcaccggatatagacctatcatagatgcctgcaagactttctgcaagacgtcaggctgttgccagtccaaagagaatggagtctgctgtctcgaccaggggatcaatggcctccctgagttcgaagagggtagcaaaacatctccaaaactctttgccgaagaggagttcctgcctctcgatcccacccaggagctcattttccccccggagcttatgattatggctgaaaagcagtcacagagaaccagagtattcggctcagagcgaatgatgtggttcagccctgtaactctgaaagagctgctggaatttaaatttaaatatccccaggcccctgtgataatgggtaacacctcggttgggcccgaggtgaagttcaaaggggtctttcaccctgttatcatctctcccgatagaatcgaggaactatccgtcgtcaaccacgcctataatgggctcactttaggtgcagggctttctctggcacaggttaaagatatcctagccgacgtggtgcagaagctgccagaagaaaaaacacagatgtatcatgcgcttctgaagcatcttggaacgctcgcaggttcacagattagaaatatggcatctctcggcggacatattatcagtagacacccagatagcgacctcaaccctatcctggccgttggtaattgtaccctgaatttactgtccaaggaagggaagagacagattcccttaaacgagcagtttctgtcaaagtgtccaaacgccgacctaaagcctcaggagatcctggtctctgtgaacatcccttacagccgcaagtgggagtttgtcagcgcattccgccaggcgcagcgccaagagaatgccctcgccatcgtcaattccggtatgagagtgttctttggcgagggtgatggcataatccgcgagttgtgtataagctatggaggagtcggccccgccacaatatgcgccaaaaattcttgccaaaagctgatcggaaggcattggaacgagcagatgctggatatcgcctgccgtctcattttgaacgaggtgtccctgctgggatccgcccccggaggaaaagtggagtttaagcgaacgctaattattagttttttatttaagttctatctggaagttagtcagatactgaagaaaatggaccccgtgcattacccttcactggccgacaaatacgaatctgcactggaggacttacattccaagcaccactgctcaactctgaagtaccaaaacatagggccgaaacagcatccggaggaccctattggacacccgattatgcacctaagcggcgtcaagcacgcaactggcgaggccatctattgcgacgacatgccattggtggaccaggagttgtttctgacctttgtaacttctagtcgcgcccatgcaaagatcgtcagcattgacctttccgaggccctgagtatgccaggtgtggtcgatatcatgactgccgaacacctgagcgacgttaactctttctgtttcttcacagaggccgagaagtttttagctacagataaggtgttttgcgtgggacaactggtctgcgcagtgctcgctgactcagaggtacaggccaagagagccgcaaaacgggtaaagattgtgtatcaagatctggaaccccttattttaaccattgaagagtccattcagcataattcatcatttaaacctgaacgcaagctggaatatggaaatgtggacgaggcatttaaggtggtcgaccagatccttgagggggagattcacatgggcggtcaggagcacttttacatggaaacccagtcaatgctggtggtccctaaaggagaggaccaggaaatggatgtctacgtgagcacccaatttccaaaatatattcaggatattgtggcgtccacactaaaacttcctgccaataaggtcatgtgtcatgttagacgggttggcggggcattcgggggaaaagttctcaaaacaggcattattgctgccgtcactgctttcgccgccaataagcacggccgggccgtcaggtgcgttctagaaagaggagaagacatgctcattacaggcggaagacacccctatttgggcaaatacaaggccgggttcatgaacgacggccgcattctggctctcgacatggagcactactctaacgccggggcctccctggacgaatccctgtttgtgattgaaatgggtctgctcaaaatggacaacgcctacaagttcccaaacctgaggtgtcgaggttgggcatgtaggacaaacctgccatcaaatactgcctttcgtggattcggcttcccccaggccgccctgatcaccgaaagttgcattactgaggtcgccgctaaatgcggactgtctccagagaaggtgagaatcatcaatatgtataaggaaatcgatcagacaccttataagcaagaaattaacgctaagaatctgattcagtgttggcgagagtgcatggcaatgtcatcatattccttacggaaagtcgccgttgaaaagtttaacgcagagaactactggaaaaaaaaaggcttggcaatggtaccactcaagttcccggttggcctggggtcaagagcagcggggcaggcagcagctcttgttcacatatatctagatggaagtgtgttggtcactcacggcggaatcgagatgggacagggcgtgcataccaaaatgatccaggtagtaagcagagagctccgaatgccgatgtccaacgtgcaccttcgcggaacctccacggaaactgtgccaaatgcaaatataagcggtggaagtgtggtggccgacctcaatggcctggccgtaaaagacgcttgtcaaacactgctaaagcggttagagccaatcattagcaaaaatcctaaaggaacctggaaggactgggcccagaccgccttcgacgagagcattaacttgagcgcagttggctacttcagaggctatgagagtgatatgaactgggagaaaggggaaggacagcccttcgaatatttcgtctatggggcagcctgttcagaggtagagatcgactgcctgacgggcgaccataaaaatatacgcaccgatatcgttatggacgtggggtgttctattaacccagcgatcgacattggccaaatcgagggagctttcattcagggcatgggcttgtatacgatcgaagagctgaattacagccctcagggtattctccacacgagagggcctgaccagtataagatacccgccatatgcgatatgcctaccgaacttcacatcgccttgctccccccaagccagaattccaatactctctactcatcaaagggcctgggtgaatcaggcgtgttcctgggatgctctgtgttctttgcaatccacgatgccgtctccgcagcgaggcaggaacgcgggttacacggccctctcactctcaattctcccctcacgcctgagaagatacggatggcttgcgaggataagtttacgaagatgatccccagagacgagccaggaagctatgtcccttggaatgtgcccatttag

SEQ ID NO: 178646 - DNA, 456 bp, synthetic construct
  misc_feature 1..456: note = Description of Artificial Sequence: Synthetic coding sequence
  source 1..456: mol_type = other DNA
atgctgctgccctacctgcggaagaagctgcggctgaccggcaccaagtacggatgtggcgggggcggttgcggggcttgtacagtcatgatctctcggtacaacccgattacaaaacgtatacggcatcacccagccaacgcttgcctgatccccatctgtagcttgtatggtgcagccgtgacgacagtggaaggcatcggttccacacacacaagaatccaccccgttcaagagcggatcgcaaagtgtcacggaacccaatgtgggttctgcaccccgggaatggtgatgagcatctacactctattacggaaccaccctgaaccaaccctggaccagctgaccgatgcactgggaggcaacctgtgtagatgtaccggctaccggcccattatcgatgcatgtaagactttttgcaagacgtccggatgttgtcagtctaaggaaaactag

SEQ ID NO: 178647 - DNA, 858 bp, synthetic construct
  misc_feature 1..858: note = Description of Artificial Sequence: Synthetic coding sequence
  source 1..858: mol_type = other DNA
atggacctgagcgccgccagccaccggatccccctgagcgacggcaatagcataccaataattggactgggaacttacagcgagccaaagtccacgcccaagggcgcctgtgctacttcagtgaaagtcgcaatcgatacaggctacaggcacattgacggggcgtatatctaccagaacgaacatgaagttggcgaagcaataagagagaagattgcagaggggaaagtgcggcgtgaggacatcttctattgcggtaagctgtgggcaactaaccacgttccggaaatggtccggcctactctggaacgtactttgagagtgctccagctggactatgtggacctgtatatcatagaggttcctatggcgttcaagcctggggatgaaatttatccccgggatgagaacggcaaatggttgtaccataagagcaacctctgcgcgacatgggaggtggagtgccacccttacttcacacagccaaaactgctgaaattttgccaacagcacgatatcgtcattactgcttattctccgctgggtacaagccggaaccctatctgggtaaacgtctcctcccctccccttctgaaagacgctctgctgaactcgctcgggaagagatacaataagactgctgcccagattgtgttacgcttcaacatccagcggggcgtagtggtaattcctaaatccttcaatcttgaacgaattaaggagaattttcagattttcgacttttcactcacagaggaggaaatgaaagatatagaggccttgaataaaaacgtccgattcgtggagctgctgatgtggcgggatcatccggagtatccgttccatgatgagtactag

SEQ ID NO: 178648 - DNA, 873 bp, synthetic construct
  misc_feature 1..873: note = Description of Artificial Sequence: Synthetic coding sequence
  source 1..873: mol_type = other DNA
atggacctgagcgccgccagccaccggatccccctgagcgacggcaactctatcccgattatcggtctgggcacatactccgagccaaaaagtacaccgaagggtgcatgcgcgacaagtgtgaaagtggccatagatactgggtaccgccatatagatggcgcctatatttaccagaacgaacatgaggtgggagaggctatccgcgaaaagatcgctgagggcaaagtgaggagggaggacatcttctactgcggaaagctatgggctacaaaccacgtgccggagatggtgcgccctacactagaaagaacattgcgagtcctccagctcgattatgtcgacctgtacatcatagaggtgcccatggcttttaagcctggcgatgagatctatcccagagacgaaaatggcaaatggttgtatcataagtctaatctgtgcgctacgtgggaggcgatggaagcttgcaaagatgctggactggttaaatcgctcggcgtttctaactttaatcgcagacagcttgagctgatactgaataaacctggcctaaagcacaaaccggtgagcaaccaagtggaatgccatccttattttacccagccgaagttactgaagttttgtcagcagcacgacatcgttatcactgcttactctccactagggacaagtaggaaccctatttgggttaatgttagttcacctcctttgctgaaggatgctctcctcaacagtctggggaagagatacaacaaaaccgctgcccaaattgttcttcgctttaacattcagcgaggggttgttgtgatccctaaaagtttcaaccttgagagaatcaaggagaacttccaagtcgcgcgatcaagctag

SEQ ID NO: 178649 - DNA, 978 bp, synthetic construct
  misc_feature 1..978: note = Description of Artificial Sequence: Synthetic coding sequence
  source 1..978: mol_type = other DNA
atggccgccagctgcgtgctgctgcacaccggccagaagatgcccttgattggtttgggaacgtggaagagcgagccagggcaggtaaaggccgcagtgaagtatgcactcagcgttggatacaggcacattgattgcgccgctatctacggaaacgagccagaaatcggggaggcacttaaagaggacgtaggtccagggaaggccgtcccacgcgaggaactgtttgtcacatccaagttgtggaacacaaaacaccacccagaagatgttgaaccagcattaaggaaaactctcgcagacctgcagctggagtatcttgatctgtacctgatgcattggccttatgcatttgaacggggcgataacccgttccctaagaacgcggatggtaccatctgctacgactcaactcattataaggagacctggaaggctttggaagccctcgtagctaaagggttggtacaggcgttggggctgtccaacttcaactcccgtcagatcgatgacatcctttctgttgccagcgttcgccccgctgttctgcaggtggagtgtcatccctacttggcacaaaatgaactgattgctcactgccaggcaagaggtttagaagttacagcttactcccccctcggctcaagcgaccgggcctggcgggacccagacgagcctgtcctgttggaggagcccgtggtcctcgcactagccgagaaatacggccgatctccggctcaaatcctgcttcggtggcaggtccaacggaaggtcatctgcatccctaagagcattacgccctccaggatcctccagaacattaaggtgttcgattttaccttttcgccagaagaaatgaaacaactgaatgctctgaacaaaaattggaggtacatagttccgatgctgacagtagacgggaagagggtgcccagagatgcaggccatcctctgtacccattcaatgacccctattag

SEQ ID NO: 178650 - DNA, 978 bp, synthetic construct
  misc_feature 1..978: note = Description of Artificial Sequence: Synthetic coding sequence
  source 1..978: mol_type = other DNA
atggccgccagctgcgtgctgctgcacaccggccagaagatgcccctgataggtctgggtacctggaagagcgagcccggccaggtcaaggctgctgttaaatacgctctgagcgtggggtaccggcatatagactgtgctgccatctatggcaacgagcccgaaatcggcgaagctctcaaagaggacgtaggccctggcaaggccgtccctagggaggaattgttcgtgacttccaaactgtggaacaccaagcatcacccagaggacgtggagccggcattgcggaagacactggccgacctccaacttgaataccttgatctctatcttatgcactggccgtacgcctttgagcgcggtgacaatccattcccaaaaaatgcggacgggacaatctgctatgattctacgcactacaaagagacctggaaagcactggaggccctggtggccaaaggcttggttcaggccctggggctctccaacttcaactcccgccagatcgatgacattctgagtgtagctagtgtgagaccagcagtgctgcaagtcgagtgccatccttatctcgcacagaacgagctgattgcccactgccaggctcgcggtttggaggttactgcctattcacctcttggaagcagcgaccgggcctggagagaccccgatgagcctgtgctcttggaagagcctgtagtcctggcactggctgagaagtacgggcgctcccctgctcagattctgcttagatggcaggtacagcgcaaggtgatctgtatccctaagtctataacaccttcacgaatacttcagaatataaaagttttcgatttcactttttctccagaggagatgaagcagcttaatgccttgaataagaactggcgctatattgtgcctatgctgacggtggatgggaagagagtgccaagagacgccggccatcccctttaccccttcaatgacccttactag

SEQ ID NO: 178651 - DNA, 444 bp, synthetic construct
  misc_feature 1..444: note = Description of Artificial Sequence: Synthetic coding sequence
  source 1..444: mol_type = other DNA
atggccgccagctgcgtgctgctgcacaccggccagaagatgcccttaatcggtctgggcacttggaaaagtgagcccggacaagtgaaggccgccgtgaagtatgctttgtcggtggggtatcgtcacattgactgtgccgcaatctacggaaacgagccagagatcggcgaggccctgaaggaagacgtcggacctggaaaggcggtaccccgggaagaactatttgtaacaagcaaattgtggaataccaagcaccatcccgaggacgtggagcccgcgttgaggaaaaccctcgcagacttgcagttagagtatttagatttgtatttgatgcattggccatatgcctttgagcggggggacaacccattcccgaagaacgcagacgggactatctgctatgattccacccattacaaggagacttggaaagcgctctag

SEQ ID NO: 178652 - DNA, 951 bp, synthetic construct
  misc_feature 1..951: note = Description of Artificial Sequence: Synthetic coding sequence
  source 1..951: mol_type = other DNA
atggccagccggctgctgctgaacaacggcgccaagatgcccatccttggattaggaacttggaagtccccgcctgggcaggtgacggaagccgtcaaggtggctatcgatgtcggataccggcacatcgactgcgcccatgtgtaccaaaatgaaaacgaggtcggggttgcgatccaggaaaaactgcgggaacaggtagttaagagagaagaactgtttattgtatccaaactttggtgcacgtaccacgagaaaggccttgtgaaaggggcctgccagaagacattatcagatctcaaacttgattatttggatctgtaccttatccactggccaaccggctttaagccaggcaaggagttttttcctctggatgaatccggaaacgttgttccttctgacaccaacatactggatacctgggcagccatggaagagttggtcgacgagggcctagtgaaggctattggaatctccaattttaaccatctacaagtggagatgattctgaacaaaccaggcttgaaatacaagcccgctgtcaatcagattgagtgtcacccgtacctcacccaggagaagctcatacagtattgtcagagcaaaggcatagtggtgactgcctattccccattaggatccccagatcgaccttgggccaagcccgaggacccatcactgctggaagatccacgcatcaaggctattgccgccaaacataacaagaccaccgcccaggtgctgatcagatttcccatgcagcggaacctggtggttatccccaagtccgtgacccctgaaagaatcgcagaaaatttcaaagtttttgacttcgagctgtccagccaggacatgaccactcttctgagctacaaccggaactggagggtctgtgctctactctcatgcacctctcataaggactacccttttcacgaggagttctag

SEQ ID NO: 178653 - DNA, 618 bp, synthetic construct
  misc_feature 1..618: note = Description of Artificial Sequence: Synthetic coding sequence
  source 1..618: mol_type = other DNA
atgggcgtggtgagcctgttcctgtgcatcgtggagcagatcttcaccagcagtaagaagattcagtttcggggaatcttcatggcaaaggtccctaaatctaaggctctggaggcgacgaagctggcaatcgaagctggtttccggcacatcgattccgcgcacctgtacaacaacgaggaacaggtcgggctcgcaattaggtccaagatcgcggatgggtccgtcaaaagggaggacatattttacacttccaaactgtggtgtaacagccatcggcccgagcttgttaggccggccctggaacggagtctaaaaaacttgcagttagactacgtcgacttgtacctgattcattttcctgtcagtgttaaacctggcgaggaggtgatacccaaggacgaaaatgggaagattttgtttgacaccgtggacctctgtgcgacctgggaggctgtggaaaagtgcaaggacgccgggctagccaaaagcataggggtctctaactttaaccgccgtcagctagagatgatcctcaacaaaccagggctcaagtacaagcccgtttgcaaccagccgagggataattcgatcttttcattgagcccagattggtag

SEQ ID NO: 178654 - DNA, 972 bp, synthetic construct
  misc_feature 1..972: note = Description of Artificial Sequence: Synthetic coding sequence
  source 1..972: mol_type = other DNA
atggacagcaagtaccagtgcgtgaagctgaacgacggccacttcatgccagtgctaggttttggaacatatgcacctgccgaggtacccaaatccaaggcactagaggccaccaagttggccatcgaagccggcttccgccacattgattctgcccacctgtacaataacgaggaacaagttggactggctatcagaagtaagatcgccgacggctcagtcaagagggaagatatcttctatacatcaaaactgtggtgcaactctcaccggccagagctggtccggcccgccctggagcgtagccttaaaaacctgcagttagattatgttgatctgtacctgatccacttcccggtttccgtgaagcctggtgaggaagtgatccccaaggacgaaaacggcaaaatcctcttcgataccgtggatctttgtgcgacctgggaggctgttgaaaagtgcaaggatgccggactggcaaaaagcattggggtaagcaattttaacagaaggcaattagaaatgatccttaacaaacccggacttaagtacaaacccgtatgtaaccaggtcgaatgccacccctactttaatcagcggaaacttttagatttctgcaaaagtaaggacatagttctagtagcttattccgccctcggaagtcaccgggaagagccttgggtagaccccaatagccccgtgctcctggaggaccctgtgctgtgcgctctggccaagaagcataagcgtactcccgctctcatcgccttacggtaccagctgcagagaggagtggtcgtacttgctaaaagctacaacgagcagcgcattagacagaatgtccaagtctttgaatttcagctgacatcggaagagatgaaggccattgatggcctcaaccgcaacgtgaggtacctgaccctggacatctttgccgggccccctaattatccgttctccgacgaatactag

SEQ ID NO: 178655 - DNA, 972 bp, synthetic construct
  misc_feature 1..972: note = Description of Artificial Sequence: Synthetic coding sequence
  source 1..972: mol_type = other DNA
atggacagcaagtaccagtgcgtgaagctgaacgacggccacttcatgccggtgctcggcttcggcacctacgcaccagccgaggttcctaagtctaaggccctggaggcaactaagctcgcaattgaggccggtttccggcacatcgattctgcccacctatataataacgaggagcaggtggggctggccatcagatcaaaaatcgccgacggttcagtgaagagagaggatatcttttacacttccaaactttggtgcaactcccatcggccagagctggttcggccagccctggagaggtccctcaaaaacctgcagcttgactacgttgatctttaccttatccacttcccagtgtctgtgaaacctggggaggaggtcattcctaaggatgaaaacgggaaaattttatttgacacggtcgatctgtgcgctacttgggaggctgtcgagaaatgtaaagacgcgggtctggcaaagagtatcggcgtatcgaacttcaatcggcgacagctggagatgattcttaacaagcccggcctgaagtacaaacccgtgtgtaatcaggtcgaatgccatccttacttcaatcagcggaaactgctggacttttgtaaatccaaagacatcgtgctggtagcttattctgcactgggcagccacagggaggagccctgggtggatcccaattctcctgttctgctggaggatccagttctttgtgcgttagctaagaagcacaagcgtacccctgccttgatagctctgcgttatcagctgcagcggggcgtggtggtgctggcaaaatcctacaacgagcagagaattagacagaatgtgcaggtctttgaatttcagcttacatccgaagagatgaaggctatagatggactcaatcggaatgtccgctatttgactctcgatattttcgctggccctcctaattacccattctccgacgagtattag

SEQ ID NO: 178656 - DNA, 747 bp, synthetic construct
  misc_feature 1..747: note = Description of Artificial Sequence: Synthetic coding sequence
  source 1..747: mol_type = other DNA
tgaagcaagtaccagtgcgtgaagctgaacgacggccacttcatgccagtgctgggcttcgggacttacgcccctgccgaggtgggtctggccattagaagcaagatcgcagacggaagcgtaaaaagggaagacatcttttatacaagtaaactatggtgcaattctcatcggcctgagctagtgaggccagctctggagaggtctttaaagaacctccagttggactatgtggacttatacctcattcattttcctgtcagcgttaagcctggtgaggaggtgattccaaaggacgaaaacgggaagattctctttgacaccgttgacctatgtgctacatgggaagctgtcgaaaagtgcaaagacgccggtctcgccaaatccatcggtgtctctaatttcaatcgccggcaactcgaaatgatattaaacaaacctgggctcaagtataagccagtgtgcaatcaagtcgagtgtcatccttatttcaaccagagaaagcttttggatttttgtaaatctaaggatatcgtcctggttgcctattcagccttggggagccaccgggaagagccgtgggtggacccaaatagtcccgtgttgctggaggaccccgtcctgtgtgctctcgccaagaagcacaaacgtacccctgccctgatcgcgctacgctaccagctgcagaggggagtcgttgttctggctaaatcttataatgaacagcgcatccggcaaaatgtgtag

SEQ ID NO: 178657 - DNA, 972 bp, synthetic construct
  misc_feature 1..972: note = Description of Artificial Sequence: Synthetic coding sequence
  source 1..972: mol_type = other DNA
atggacagcaagtaccagtgcgtgaagctgaacgacggccacttcatgcctgtgctgggtttcggcacctatgcccctgccgaagtgccaaaaagcaaggccctggaagcagtgaagctggcaatcgaggctggattccatcacatcgactccgcacatgtctataacaatgaggagcaggtgggactggccattagaagcaaaatcgccgatggatcagtgaagcgggaggacattttttatacatcaaaattgtggtcaaatagtcataggcccgagctggtcaggccagcacttgaacgctctctcaagaacttgcagttggattacgtagacctgtatctgattcactttcctgtgtcagtgaagccaggcgaggaagtgatcccaaaagacgaaaatggaaaaatcctcttcgacaccgtggacttatgcgcaacttgggaggcaatggagaagtgtaaggatgctggtctcgcaaagtccatcggcgtgtccaactttaaccatcggttgctcgagatgattctgaacaagcccggactcaaatacaagccggtgtgcaaccaagtagagtgccatccctatttcaaccagcgtaagttattagacttttgtaagagcaaagatatcgtgctcgtcgcgtattctgcccttgggagtcatcgagaagaaccatgggttgatccaaactcaccagtgctattggaggatcctgtgctgtgcgcactggcaaagaagcacaaacgcactcccgccctgatcgcactgcgctaccagctgcagcggggcgtggtggtgcttgcaaagagctacaacgagcagaggattaggcagaacgtgcaggtcttcgagttccagctgacaagtgaggaaatgaaggccatcgacggcttgaacagaaatgtgagatacttgacgctggacatcttcgccgggccacccaattatcctttttccgatgagtactag

SEQ ID NO: 178658 - DNA, 972 bp, synthetic construct
  misc_feature 1..972: note = Description of Artificial Sequence: Synthetic coding sequence
  source 1..972: mol_type = other DNA
atggacagcaagtaccagtgcgtgaagctgaacgacggccacttcatgcctgtgttaggcttcggtacgtacgccccggctgaggtaccgaaaagcaaagctctggaggccgttaaacttgcgattgaggcaggatttcaccatatcgattccgcccatgtctataacaatgaggaacaggttggccttgctatccgctcaaaaattgctgacggcagcgtgaagcgggaagatattttttatacaagcaagctatggtccaactctcacagaccagagttggtgagaccagccctagagcggagtctgaaaaacctgcagcttgattacgttgatctgtacctgatacacttccctgtgtcagtgaagcctggggaagaagttatacctaaagatgaaaatggaaagatccttttcgacaccgtggatctgtgcgccacgtgggaggccatggagaagtgtaaggacgctggactcgcaaagagcattggcgtgtcaaacttcaaccatcgcctactggagatgattttgaacaaacctggacttaagtacaaaccagtgtgcaaccaagtcgaatgccatccatatttcaatcaacgcaaactcctggatttctgtaagtccaaggatatagtcctggtggcctacagcgctctgggctcccaccgtgaagaaccctgggtggaccctaattctccagtgttattggaggatcctgtactctgcgccctggctaaaaagcataagcgcacccccgctcttatcgccttacgatatcagctacaacgtggcgtggtggtcctcgcaaagtcgtacaacgagcagagaataagacagaacgtccaggtcttcgagtttcagcttacgagtgaggagatgaaggcaatcgacggcctgaacaggaatgttagatatctgactctggatatttttgcaggacctcctaactatccattcagtgatgagtattag

SEQ ID NO: 178659 - DNA, 894 bp, synthetic construct
  misc_feature 1..894: note = Description of Artificial Sequence: Synthetic coding sequence
  source 1..894: mol_type = other DNA
atggacagcaagtaccagtgcgtgaagctgaacgacggccacttcatgcctgtgctagggttcggaacctatgctcccgccgaggtgccaaaatcaaaggccctggaggcagttaaactcgctatcgaggctggctttcaccatattgatagtgctcatgtctacaataacgaggagcaggtgggtttggccattaggagtaaaattgcagacggaagcgtaaagcgggaggacatcttttacacctcaaagctgtggtccaattcccatcgtcccgagctggtgaggcccgcccttgagagaagtttgaagaatctgcagctggattacgtcgacttgtacttaatacactttccggtttcagtcaaggctatggagaaatgtaaagacgcaggccttgctaagtccataggcgtatcgaactttaatcaccgcttattagaaatgatcctgaataagcccgggctgaaatataagcccgtgtgcaaccaggtggagtgtcatccctactttaatcagcggaagctgctcgacttttgcaagtctaaagacattgtactggttgcctacagcgctctcgggtcgcaccgagaggagccttgggtggaccccaattcccctgttctgttggaagaccccgttctctgcgctctggctaagaagcacaagaggactcccgccctgatcgcactccgataccagcttcagcgcggcgtggttgtactcgccaagtcttataatgagcagaggattcggcaaaatgtgcaggtgtttgaatttcagctcacgtccgaggaaatgaaggcaattgacggactgaatagaaatgtgcgctatctcaccctggacattttcgccggcccacccaattatcccttttccgacgaatattag

SEQ ID NO: 178660 - DNA, 420 bp, synthetic construct
  misc_feature 1..420: note = Description of Artificial Sequence: Synthetic coding sequence
  source 1..420: mol_type = other DNA
atggacagcaagtaccagtgcgtgaagctgaacgacggccacttcatgccagttctcgggttcggtacctatgcgcctgccgaagttccaaaatccaaggcactcgaggccgtaaaacttgcaatcgaagctggatttcatcatattgatagcgcccacgtctacaacaatgaggagcaagtgggtctggcgatccgctccaagatcgctgatgggtctgtgaaaagggaggacatattctacacatccaaactgtggtccaactctcaccgcccagaactggtgcggcccgcactagaaaggtccctgaagaacctgcagcttgactatgtggacctctacctgatccacttccctgtttccgtgaaggaagacatcggcattctgacttggaaaaaatcacccaagcacaactcctag

SEQ ID NO: 178661 - DNA, 972 bp, synthetic construct
  misc_feature 1..972: note = Description of Artificial Sequence: Synthetic coding sequence
  source 1..972: mol_type = other DNA
atggacagcaagcaccagtgcgtgaagctgaacgacggccacttcatgcccgtactgggctttggtacgtacgctcctccagaagtgccccgtagcaaagctcttgaggtcaccaagctcgcaatcgaagctgggtttaggcacattgactccgcacacctctataacaatgaggaacaggtaggattggccattaggagcaaaatcgccgatggtagcgtaaaacgagaagatatcttttatacatcaaagctatggagcacattccatcgtcccgagctggtgcgtcctgctcttgagaattctcttaagaaagcgcagctggactatgtggacttgtatcttattcattcacccatgagcctgaaacctggggaggagctaagccccactgacgagaacggaaaagttatatttgacattgtggacctgtgcacaacgtgggaggctatggagaagtgcaaagatgcaggtcttgcaaagagcattggggtctctaactttaaccgaaggcagctggagatgatcctgaacaagccaggtttgaaatacaaacctgtctgcaatcaggtggagtgtcacccgtatttcaatcgcagcaaactgctcgatttctgcaagagtaaggacatagtgttggtggcttactctgccctcggctctcagagagacaagcgctgggtggatccaaattctcccgttttactagaagaccctgtgctctgcgcgcttgctaaaaagcacaagcgcacgcccgcattgatcgccctgaggtaccagctgcagaggggcgtcgtcgtcctcgcgaaatcttacaatgagcagcgaattcgccagaacgtgcaggtatttgaatttcagctgaccgctgaagatatgaaagccatagatggcctcgacagaaatcttcactattttaattcggattcatttgccagccaccctaactacccttacagcgacgaatattag

SEQ ID NO: 178662 - DNA, 615 bp, synthetic construct
  misc_feature 1..615: note = Description of Artificial Sequence: Synthetic coding sequence
  source 1..615: mol_type = other DNA
atgagcctgaagcccggcgaggagctgagccccaccgacgagaacgggaaggtcatttttgatatcgtggacttgtgtaccacatgggaggccatggagaaatgtaaagatgctggcctggctaaatccattggggtgtccaattttaacagaagacagctggagatgattctcaacaagcccggcctgaagtataaacccgtctgtaatcaggtggagtgccatccttactttaacaggagtaagctcttggatttttgcaagagcaaggatatcgtactcgtggcatatagtgctctcggcagccagcgcgacaagcgctgggtcgaccccaactcacccgtcctattggaggatcccgtactttgtgctctggccaagaagcacaagcgaacaccagcactgatcgcacttcgctaccagctccagcgaggcgttgtggtactagccaagtcctacaatgaacaacgaattcgccaaaatgtccaggtgtttgagtttcagctcacagctgaagacatgaaggctatcgacggcctcgatagaaacctccactacttcaattctgactcattcgcctcccaccccaattatccttacagcgatgagtactag

SEQ ID NO: 178663 - DNA, 972 bp, synthetic construct
  misc_feature 1..972: note = Description of Artificial Sequence: Synthetic coding sequence
  source 1..972: mol_type = other DNA
atggaccccaagtaccagcgggtggagctgaacgacggccacttcatgccggtgcttgggttcgggacttacgcacccccagaagttccgcgtaatcgggccgtcgaagtgacgaagcttgcaatagaagccgggttcaggcatatcgattcggcgtacttatacaacaacgaggagcaggttggcctggctatccgttctaagattgccgacgggtccgttaagcgtgaagatatcttctacacgtcaaaattatggtgcaccttctttcagccccagatggttcagcctgcattggagagctcactcaagaagctgcagctcgattatgtggatctctacctgttgcacttcccaatggctcttaagccgggggaaaccccgcttccgaaggacgagaacgggaaagtgatcttcgatacagttgacctctcagccacgtgggaggtcatggagaaatgcaaggacgccggcctcgcaaaatcaatcggtgtgagcaactttaactgccggcagctcgaaatgatcctgaataagcccggcttgaaatataaaccagtgtgcaatcaagtcgagtgccatccctacctgaatcagagcaagttgttagatttttgcaagtctaaggacattgtccttgtcgcccattctgcactcgggacccagcggcacaaactctgggtagatcctaacagcccagtcttgcttgaagatcctgtgctctgtgcactggccaaaaaacacaaacagacccccgcactaatagctctaaggtaccagctgcaaagaggtgtagtggtgttggcgaaaagctataacgaacaaaggataagggaaaacatccaggtgttcgaattccagctcacttcagaggatatgaaagttctggatgggctgaatcgtaattacaggtacgtcgtgatggattttctgatggaccaccccgattacccattttcggacgaatactag

SEQ ID NO: 178664 - DNA, 972 bp, synthetic construct
  misc_feature 1..972: note = Description of Artificial Sequence: Synthetic coding sequence
  source 1..972: mol_type = other DNA
atggaccccaagtaccagcgggtggagctgaacgacggccacttcatgcctgtcctcggctttgggacctacgctccccccgaggtgcctcggaatagggccgttgaagtgactaagctggcaattgaagctggctttagacacattgacagcgcatatctgtacaacaatgaagagcaagtgggtctggccatcaggtcaaagatcgccgacggtagcgtgaagcgggaagatattttttatacatccaaactctggtgcacattcttccagcctcaaatggttcaacccgcgttggagagctcactgaagaagcttcagcttgattacgtcgatctttacctcttgcattttcctatggccctgaagcctggtgagacccctctacccaaggacgaaaacggaaaggtaatattcgacacagtcgatctcagcgctacttgggaggtcatggaaaaatgtaaagatgctgggcttgcaaagtcaattggggttagcaactttaactgtcgccagctggaaatgattctgaacaagccgggactaaaatataagcctgtctgtaaccaggtcgagtgtcacccttatctgaatcaaagcaagctccttgatttttgtaaatccaaagacattgtgttagtagctcatagtgccctcggaacacagagacacaaactctgggtagacccgaattccccagttctgcttgaggatcctgttctgtgcgcactcgccaagaagcataaacagactcccgcactgatcgccctccggtaccagctgcagaggggagtggtggtgctggccaaaagctacaacgagcagcgtatccgcgagaatattcaggtgtttgagtttcagcttaccagcgaggacatgaaagtgcttgacggcctcaatcgcaactaccggtacgtggtgatggatttccttatggatcacccagactaccccttctccgacgaatactag

SEQ ID NO: 178665 - DNA, 381 bp, synthetic construct
  misc_feature 1..381: note = Description of Artificial Sequence: Synthetic coding sequence
  source 1..381: mol_type = other DNA
atggaccccaagtaccagcgggtggagctgaacgacggccacttcatgcccgtgttggggttcggcacatatgcccctcctgaggtgccgcgcaaccgtgccgttgaagtcacgaaactggccatagaagccggcttccgccacatcgactccgcttatctctataataacgaggagcaggttgggctggctattcgcagcaagattgcagacggctccgttaagcgcgaggacatcttctatacctccaagctgtggtgcactttcttccagccccaaatggtgcagccagcactcgagagcagtctcaagaagttgcagctggattacgtcgacctgtacctgctgcatttccccatggctttgaaaagtacaacgtag

SEQ ID NO: 178666 - DNA, 981 bp, synthetic construct
  misc_feature 1..981: note = Description of Artificial Sequence: Synthetic coding sequence
  source 1..981: mol_type = other DNA
atggacctgagcgccgccagccaccggatccccctgagcgacggcaactccattccaattatcggtcttggcacctacagtgagcccaaaagcacgcctaagggtgcctgtgccacatccgtgaaagttgcaatcgatacagggtatagacatatagatggtgcctatatctaccagaacgagcacgaagtcggcgaagcaatcagagagaagattgcagaaggtaaagtgcgccgggaagatatattctactgcggaaaactttgggccacgaatcacgtgcccgaaatggtgagacccacattagaaagaacccttcgagtgctacaactggactacgtcgatttgtatattatagaggtgcctatggctttcaaacccggtgacgagatataccccagagatgaaaatggaaaatggctgtaccataagtcaaacctgtgcgctacctgggaggccatggaggcttgcaaggacgccggccttgttaaatcactgggcgtatcaaattttaaccgtcggcagctcgagctgattctcaacaaaccaggactgaaacataagccggtttcaaatcaggttgagtgccatccctacttcactcagcccaagctgctcaaattctgtcagcagcacgacatcgtgattacggcttactctccgctcggaactagtagaaacccgatctgggttaacgtgtcttccccacctctgctcaaagatgccttgcttaatagcttggggaaacgctacaataagactgctgcccagattgtcctgcgcttcaacatccagcgaggagtcgtggttattcccaagtcttttaacctggaacggatcaaagagaactttcagatctttgatttcagtttgaccgaagaagagatgaaagatattgaggcactgaacaagaatgtgcgatttgttgagttattgatgtggcgtgaccaccctgaatatcccttccacgacgaatattag

SEQ ID NO: 178667 - DNA, 441 bp, synthetic construct
  misc_feature 1..441: note = Description of Artificial Sequence: Synthetic coding sequence
  source 1..441: mol_type = other DNA
atggccttcaagcccggcgacgagatctacccccgggacgagaacgggaaatggctgtaccataagtctaacttgtgcgccacgtgggaggccatggaagcttgcaaggatgcaggcctcgtcaagagtttgggggtttccaactttaaccgacggcagctggaattaattctgaataagcccggcctcaaacataaacctgtcagcaatcaggtcgaatgccacccgtatttcacacagcctaaacttttgaagttctgtcagcagcacgacattgtcattactgcctattctcctctgggcacttcaaggaatccaatttggaggcagttgcacaaactggccctgcttgatctacctatactgcgcgtgacgctccattcagtgcacacacttcactcggaaaagcttgtgacgggtgacttgcagtgcccgggttag

SEQ ID NO: 178668 - DNA, 672 bp, synthetic construct
  misc_feature 1..672: note = Description of Artificial Sequence: Synthetic coding sequence
  source 1..672: mol_type = other DNA
atggcccaccggttccccgccctgacccaggagcagaagaaggactcgcagggtaaactgttcaggaacatactcaaagaaaagggtatagtggtaggaatcaagttagatcaagggggggcaccattagcaggtacaaacaaagagactaccatacagggactggacgggctgtctgagaggtgtgcccaatataagaaagacggagtggacttcggaaagtggcgggctgttttgcggatcgccgaccagtgccccagctccctggccattcaagagaatgcaaatgcacttgcaaggtatgccagcatctgtcagcaaaacgggctcgttcctatagttgagccagaagtgattccggacggcgatcacgatctcgagcactgtcaatacgtaactgagaaggtcttagcagccgtgtacaaggccctgaatgaccatcatgtctaccttgaaggaacactgctcaagcctaacatggtgaccgcgggccacgcctgcacaaagaagtataccccagagcaggtggccatggccactgttaccgccctgcaccggacagtgccagccgcggttcctgggatatgcttcctctcagggggcatgtctgaggaggatgccaccctcaacctgaacgccataccaacgagagtgcaatgccccccagcatag

SEQ ID NO: 178669 - DNA, 1095 bp, synthetic construct
  misc_feature 1..1095: note = Description of Artificial Sequence: Synthetic coding sequence
  source 1..1095: mol_type = other DNA
atggcccaccggttccccgccctgacccaggagcagaagaaggagctgagcgagatcgctcagtccatcgtggcaaatgggaaaggtatccttgctgcggatgagagcgttggcaccatgggcaaccgtttgcagcgcattaaggtggagaatacagaagaaaatcggcgccagtttcgtgaaattctcttctctgtcgactccagcattaatcagtcaattggtggggtaatcctttttcatgaaactttgtaccaaaaggatagccaaggtaaactgttccgcaacattttgaaggagaagggaatcgtggtcggaatcaaactggatcagggtggcgccccactagcggggaccaacaaagagactacgatccaggggttagacggtctgagcgagcgatgcgctcagtacaagaaagatggagtggactttggaaagtggcgcgccgtactccgcattgcagaccaatgcccctcttcccttgcaatccaggagaacgccaatgcgctcgctagatacgcctccatctgccagcagaatggtcttgtacccattgttgaaccagaggtgattcctgatggcgatcatgacctggaacactgtcagtatgtcacggagaaagttttggccgctgtgtataaggcgctgaacgatcaccacgtgtacctggaaggaaccctactaaagcctaatatggtgaccgcgggccatgcatgtacaaaaaagtacacaccggagcaggtggcaatggccaccgttacagcactgcacagaacggtcccggctgctgtcccagggatatgttttttgtcaggcgggatgtctgaagaggatgcaaccctcaatctgaacgctattaatctttgcccgctcccaaagccatggaagctctcatttagctacggtcgggcccttcaggccagtgcgctcgctgcttggggtggaaaggcagctaacaaggaggcaactcaggaagcattcatgaagagggctatggcaaattgccaggccgccaaaggccagtacgtgcacaccgggagcagtggagcagcctctactcagtccctgttcaccgcttgctatacttactag

SEQ ID NO: 178670 - DNA, 951 bp, synthetic construct
  misc_feature 1..951: note = Description of Artificial Sequence: Synthetic coding sequence
  source 1..951: mol_type = other DNA
atggcccaccggttccccgccctgacccaggagcagaagaaggagctttccgaaattgctcagagtatcgtagccaatggaaaaggcattctcgccgccgacgagagcgtcggtacaatgggaaatcgactgcaacgaattaaggttgagaatacagaggagaaccggcgacaattccgggagatcttgttcagcgttgatagctccataaatcaatcaattggcggcgttattctgttccatgaaactctctatcagaaggatagtcagggcaagctgttcaggaatatcctcaaagagaaggggatcgtggtgggaatcaagctggaccagggaggcgctcccctggccgggaccaacaaggagacaactatccagggcctcgacggtctgtccgagaggtgcgcgcaatataagaaggatggcgtagattttggaaaatggagggctgtgctccgcattgccgatcagtgcccatcatctctggccatccaggagaatgccaatgctctcgcccgatacgccagcatttgccagcaaaatggcctagtgcctattgtcgaacccgaagtcattcccgatggggaccatgacctggaacactgtcagtatgtcactgaaaaggtactggctgctgtctataaggcactaaacgaccaccacgtctacctggaaggcactttattaaagcccaacatggtgaccgcaggacatgcctgcacgaaaaaatataccccagagcaggtggccatggctactgtgactgcactccaccggaccgtccccgctgccgtaccaggcatctgttttctgagcggtgggatgtctgaagaggatgccaccttaaacttgaatgccatcaacttgtgcccgctgcctaagccttggaagctctctttctccggtgtggctcgactgcagacaagacgacagccccgtagactgctttag

SEQ ID NO: 178671 - DNA, 1947 bp, synthetic construct
  misc_feature 1..1947: note = Description of Artificial Sequence: Synthetic coding sequence
  source 1..1947: mol_type = other DNA
atggtgagcctgccccccccccagagcgacgtgaccctgcccggccctacccgattagagggtgagaggcaaggcgatctcatgcaagctccagggcttcccggcagccctgcccctcagagcaaacacgccggattttcatgctctagcttcgtgagtgatgggccaccagaacgcacaccctctctgccaccacactcccctcgcattgcgagccctggcccagaacaggtgcaggggcactgtcctgccggtcctggtccaggtcccttcagattatcccccagcgacaagtacccagggtttggtttcgaggaagccgctgcaagttcaccaggtagattcttaaaaggatcccatgcccctttccacccgtacaagaggccatttcacgaggacgtctttccggaagccgagaccactttagcactaaaaggacatagtttcaagaccccaggaccactggaggcttttgaagaaatccccgttgatgtcgccgaggcagaggctttcctcccaggattttcggctgaagcctggtgtaacgggctgccctacccttctcaggagcacgggccccaggttcttggcagcgaagtaaaggtgaagcctcctgtgttagaatcaggagccggtatgttctgctaccaacctccactgcagcacatgtattgctcatcccagccaccctttcaccagtattcccctggaggcggctcctatccaatcccttacttaggctcctcccattatcaataccagcggatggctccccaggcatccaccgatggacaccaacccctctttccaaaacccatttacagctacagtatcctcatcttcatggccttgaagaattccaaaactgggtccttgccagtaagcgaaatttacaacttcatgaccgagcacttcccttatttcaaaactgcccctgatggctggaagaattcggtgcgccacaaccttagcctgaataagtgctttgagaaggttgagaacaagagcggatcaagcagcagaaaaggatgcttgtgggctctgaaccctgcaaaaattgataagatgcaggaggaactacagaagtggaaacgtaaagaccctatagctgtaagaaagtcaatggccaagcccgaggagttagatagtctgattggtgacaagcgagaaaagctcggcagcccgctcctcggctgcccgccacccggactctccgggtctggcccaatccgaccacttgcacccccggcaggcctttccccaccacttcactccttgcaccctgcacccggcccaatcccgggcaagaatcccctgcaggacttgctgatgggccataccccatcgtgctatggtcagacctacctgcatctgagcccgggtctggcccccccagggcctccccagccattgttccctcagcccgatgggcatttagaattgcgggcccagcccggcactccccaagactctccccttccagcacacacacccccatcacacagcgccaaactgctcgccgagccctcacctgccagaactatgcatgacacattgttacctgacggcgatctcggcaccgacctcgacgccataaatccaagcctgactgactttgatttccaagggaacctttgggaacagctgaaggacgacagtcttgccctagatccgctggtgcttgttacatctagtcctacctcttcctctatgcctcctccacagccacccccacattgctttcctcctggcccttgcttgaccgaaacaggatccggggccggagatctagcggcacctggttctggcggctccggggccttgggcgaccttcatctgaccacgctgtatagcgccttcatggagctcgagcctacaccccccacggcccccgcagggcccagcgtatatctcagcccatcttccaaaccggtcgccttggcgtag

SEQ ID NO: 178672 - DNA, 1095 bp, synthetic construct
  misc_feature 1..1095: note = Description of Artificial Sequence: Synthetic coding sequence
  source 1..1095: mol_type = other DNA
atgccccacagctaccccgccctgagcgccgagcagaagaaggagctgagcgacattgcactcaggattgtggcacccggcaagggcattctggctgcggacgaatccgtcgggtccatggccaagaggctgtcacagataggcgttgagaacactgaggagaaccgaagactgtatagacaggtgctgttttccgctgatgaccgtgtgaaaaaatgcattgggggcgtgatttttttccatgagaccctgtatcagaaagacgacaatggagtgcctttcgtgcgcaccatacaggacaaaggcatcgttgttggaatcaaggtagataaaggagttgtgccactggctggtacggacggcgaaactactacacaaggcctggacgggctctcagaacgatgtgcacagtacaagaaagatggcgctgactttgcgaagtggaggtgtgtcctcaaaatctctgaaaggaccccttctgccctggctatccttgagaatgcaaacgtgctcgctaggtatgcctccatatgtcagcagaacggcatagttcccatcgtggaaccagaaatcctgccagacggagaccacgatctgaagcggtgccagtatgtgaccgaaaaagtgcttgccgcagtgtacaaagccttgtccgaccaccatgtatatctggaggggactcttttaaaaccgaatatggtgactcccggtcacgcatgcccgataaagtacaccccagaggaaatcgctatggccacggtgactgccctacgccgcaccgtgcccccggcagtaccaggggttaccttcttatctgggggacaatcggaggaggaggcctcttttaatctgaacgctattaatcgctgccctctgccccgcccttgggcactgaccttcagttacggcagagccctccaggcttctgctctcaacgcttggcgaggtcagcgggataatgccggagcagccactgaagagttcatcaagcgggcagaggtgaatggcctggcagcacaggggaagtacgagggctccggagaggatggaggagcggcagcgcaatctctgtacatcgctaatcatgcttactag

SEQ ID NO: 178673 - DNA, 450 bp, synthetic construct
  misc_feature 1..450: note = Description of Artificial Sequence: Synthetic coding sequence
  source 1..450: mol_type = other DNA
atgccccacagctaccccgccctgagcgccgagcagaagaaggagttatcagatatcgccctgcgtattgtcgcgcccggcaagggaatactggctgcagacgaatccgtaggttccatggctaagaggctttctcaaatcggggtcgaaaacaccgaggaaaacagaagattgtacaggcaagtgctgttcagtgccgacgacagagtcaaaaagtgtattggtggcgttatctttttccacgagacgctataccagaaggatgataatggtgtgcctttcgtgcggacgatccaggacaaaggcatcgtggtaggcatcaaagtagataagggagtggtcccactggccggcactgacggagaaaccactacacagggcttagatggactgtctgaaaggtgtgctcagtacaagaaggatggtgcggatttcgcaaaatggcgctag

SEQ ID NO: 178674 - DNA, 795 bp, synthetic construct
  misc_feature 1..795: note = Description of Artificial Sequence: Synthetic coding sequence
  source 1..795: mol_type = other DNA
atgcccagcatcttcgcctaccagagcagcgaggtggactggtgcgagtctaacttccagtacagtgaattggtggctgagttttataacactttttccaatattccttttttcatcttcgggcccctcatgatgttgctgatgcacccatatgctcaaaagagatcccgttacatctacgtggtgtgggtcctctttatgattatcggcttgttctctatgtatttccacatgacactttctttcctgggtcagctgctcgatgaaattgcaatactttggctgctcgggtccggctacagcatctggatgccacgatgctattttccatcctttctgggtggtaaccgatcacagttcatacgactggtctttatcacgactgtagtgtcgacactcctttctttcttgaggccaacggtgaatgcttacgccctgaattctattgcgcttcatattctgtacattgtgtgtcaggaatataggaagaccagcaataaagaacttcggcacctgatagaagtgagcgtggtgctgtgggcagtcgccctgacaagctggataagcgatagattactgtgcagcttctggcagcgcattcacttcttttaccttcactctatctggcacgttctgatctccatcacctttccatacggaatggtcaccatggctctggtggatgccaactacgaaatgcccggagagactctcaaagttcggtattggccccgtgatagttggcctgtgggtcttccatacgttgagataagaggagatgacaaagattgttag

SEQ ID NO: 178675 - DNA, 828 bp, synthetic construct
  misc_feature 1..828: note = Description of Artificial Sequence: Synthetic coding sequence
  source 1..828: mol_type = other DNA
atgggcgccccccactggtgggaccagctgcaggccggcagcagcgaggtcgactggtgcgaagataactataccattgtcccagctatcgccgagttttataataccatttctaacgtcctgttcttcatcttgccgcccatctgcatgtgcctgtttcgtcagtacgcgacctgcttcaacagtgggatttacttgatctggacccttctggtggtggtgggaatcggatcagtgtatttccacgctacactgtcattccttggtcaaatgctggacgaactagccgttctgtgggtgttgatgtgtgcgctggctatgtggtttccccggcgctacctgcccaagatcttccgtaacgatcggggacgcttcaaggtggtggtgtccgtgctgagcgctgtgactacatgtctggccttcgtgaagcccgccattaacaacatctccctcatgaccttgggagttccctgcactgccctgctgattgctgagctgaagcggtgtgacaacatgcgggtgttcaagctggggctattcagcggcttgtggtggacgctggccctattctgctggatttcagaccgagccttttgcgagttgctctcaagctttaattttccttacttgcactgtatgtggcatatcttaatatgcctggcggcatatctcggttgcgtctgtttcgcatatttcgatgcggcgtcagaaatacctgagcagggacctgtcattaagttctggcccaatgagaagtgggcctttattggggtcccatatgtgagcctattgtgtgcgaataagaaatcctctgtaaaaattacttag

SEQ ID NO: 178676 - DNA, 423 bp, synthetic construct
  misc_feature 1..423: note = Description of Artificial Sequence: Synthetic coding sequence
  source 1..423: mol_type = other DNA
atgtgcctgttccggcagtacgccacctgcttcaacagcggcatctaccttatctggacgctgctggttgtggtggggattggctctgtttacttccacgcaactctatcatttctggggcagatgctagacgagttggccgtgctctgggtgcttatgtgtgctcttgccatgtggtttcctaggaggtacctcccaaagatttttagaaacgaccgcggtagattcaaagtagttgtcagcgtgctcagcgcagttaccacatgtctggcttttgtgaaacccgccattaacaacattagcctgatgacactcggtgtgccctgtacagccctgctcattgcagagctcaagagacatgagcgcaaccaaagacggcgacaccgaaaagggggtcaacagggtggcggggataaggtgtag

SEQ ID NO: 178677 - DNA, 1587 bp, synthetic construct
  misc_feature 1..1587: note = Description of Artificial Sequence: Synthetic coding sequence
  source 1..1587: mol_type = other DNA
atgcagggcccctgggtgctgctgctgctgggcctgcggctgcagctttccctgggcgtcattccggccgaggaagagaatccagcattttggaatagacaggctgctgaagcactggatgcagccaaaaaattgcagccaattcagaaggtggcaaagaacctgattctgttcctgggcgacggtctgggggttcccacagtcacagcaacaagaatccttaagggacaaaagaatgggaaactggggcccgagacaccactagcaatggaccgcttcccttacctggccctgagcaagacttataatgtggataggcaggttccagattcagctgcaacagccactgcatacctctgtggtgttaaggctaattttcagaccatcgggctgagcgcagccgcacgtttcaatcagtgtaataccacacgtggcaacgaagtcatctccgtaatgaacagagcgaagcaagcaggtaagtcagtcggcgtggttaccacaacgagggtccagcatgccagtcctgccggcacctatgcccacactgtgaaccgcaactggtacagcgacgctgacatgcccgccagcgcccgccaagaaggatgccaggacattgcaactcagctaatcagcaacatggacatcgatgtcatcctgggaggcggccggaagtatatgttccccatgggtacccctgacccagagtatcctgccgacgcctcccagaatggcatcagacttgatggcaagaatctggtccaggaatggctagccaaacaccaaggcgcttggtacgtgtggaacagaaccgaactgatgcaagcatcgcttgatcagtccgtcacccacctgatgggtttgtttgagcctggagacaccaagtatgagattcatcgagatcccacgcttgatccatctcttatggagatgacagaggctgcactcagattgttgtctcgtaatcctcgcggcttctacctgttcgtcgaaggcgggagaattgatcacggtcaccacgagggcgtggcataccaggccttaactgaggccgtgatgtttgacgatgcaatcgaacgggctgggcagctcacgtccgaggaggacacactgactctggtcacggccgaccatagccatgttttctcttttgggggttacactctgaggggatcttcaatcttcggtctggctccctctaaagcccaggacagtaaagcctatacatccatcctttacgggaacgggcccggctatgtgtttaattcaggcgttagacccgacgtgaatgagtccgagagcggttcaccagactatcaacagcaggctgctgtcccactgtctagcgagacgcacgggggtgaagacgttgcagtcttcgcccggggaccgcaggcccacctcgtccacggagttcaggaacaaagttttgtggcacacgtgatggcctttgcggcctgcctggagccatacactgcttgtgaccttgctcctcccgcatgtaccactgacgcagctcaccccgtggctgcatctttgcctcttttggcaggcaccttactgctgctgggcgcctccgccgctccctag

SEQ ID NO: 178678 - DNA, 513 bp, synthetic construct
  misc_feature 1..513: note = Description of Artificial Sequence: Synthetic coding sequence
  source 1..513: mol_type = other DNA
atggaccgggccatcggccaggccggcagcctgaccagcagcgaggacacgctgacagtcgtaacggccgaccactcccacgtcttcacctttggcggttacactcctcgtggcaactctatattcggtcttgccccaatgctctctgacacagataaaaagccatttacggccattctctacgggaatgggcctgggtataaggtggtggggggggagcgggaaaacgtctccatggtagactacgcccataataattatcaggcccaatctgctgttcccctgcgccacgagacacacggcggagaggatgtcgcagtattctctaagggaccgatggcccacttgcttcacggagtacatgagcagaactacgtgccccatgtcatggcatacgccgcatgcatcggggccaatcttggacattgcgcccccgctagtagtgctggttcattggccgctggaccacttttgcttgcattagcactctaccccctgtcagtcttgttttag

SEQ ID NO: 178679 - DNA, 513 bp, synthetic construct
  misc_feature 1..513: note = Description of Artificial Sequence: Synthetic coding sequence
  source 1..513: mol_type = other DNA
atggaccgggccatcggccaggccggcagcctgaccagcagcgaggacacgctgactgtggttacagccgaccacagccatgtgtttacttttggggggtataccccgcgtggtaatagcattttcggtttggcccccatgcttagtgacaccgataaaaaaccttttactgccattttgtatggcaacggccctggctacaaggttgtgggcggggaacgagagaatgtgagtatggtggactatgcccataataattatcaggcccagagcgcggttcctctgaggcacgaaacacatggaggtgaggatgtggctgtgttcagcaaggggccgatggcacatttactccacggggtgcatgaacagaattacgtgccccacgtcatggcctatgctgcttgcatcggggccaacctcgggcattgtgcccctgcgtcctcagccggcagccttgccgctggacctctgttgttggcattggctctctatccactatctgtcctcttctag

SEQ ID NO: 178680 - DNA, 1575 bp, synthetic construct
  misc_feature 1..1575: note = Description of Artificial Sequence: Synthetic coding sequence
  source 1..1575: mol_type = other DNA
atgatcagccccttcctggtgctggccatcggcacctgcctgaccaactcattggtgccagaaaaggagaaggacccaaaatattggagagatcaggcccaagagactcttaagtacgcactggaactacagaagcttaacacgaacgtggctaaaaacgtgattatgtttctgggagatgggatgggcgtcagtaccgtgacagccgcacggattttaaaaggacaactccaccataacccaggcgaggagacacgcctggaaatggacaagtttccttttgtggccctgagcaaaacatataacaccaacgcccaggtccccgatagcgctggcacagcaactgcatacctttgcggggttaaagcaaacgaggggaccgtgggggtctccgccgccacagagagaagtaggtgcaataccacacagggcaatgaggttacttctatattaagatgggccaaagatgcaggtaaaagtgttgggattgtcacaaccactagagttaaccatgcgacaccctccgcggcatacgcccactcggctgatcgggattggtactcagacaatgagatgcctcctgaggctctgagccaagggtgtaaggacatcgcatatcagctgatgcacaatattcgcgatattgacgtaatcatgggcggcggccgcaagtatatgtaccccaaaaataaaacagatgtggagtacgagagcgacgagaaagcacgcggaacccgtctcgatggcttggacctggtggatacatggaagtccttcaaaccaagatataagcattcccacttcatatggaaccgtactgagctgttgacgttagaccctcacaacgttgactaccttctgggcctctttgagcccggagatatgcagtatgagctcaatcggaacaatgtgacggatccttccctctctgaaatggttgtggttgctattcaaatcctccgcaagaatccgaagggttttttcctcttggtggagggtggcagaatcgatcatggtcatcatgaaggcaaagctaagcaagcgcttcatgaagcggtcgagatggacagagctattgggcaggccgggagcctgacaagcagcgaagatactctaaccgtggtgacagctgatcatagccacgtgtttaccttcggtggctacacacctcgaggcaattccatattcggtctggctcccatgttgtccgacactgacaagaaacctttcaccgccatcctctacggcaatggacccggatacaaagttgttggaggcgaaagggaaaatgtctcaatggtggattacgcacataacaactatcaagcccagagcgcggtacccctgcgacatgagacgcatggaggcgaagacgtggcagtcttctcaaagggacccatggctcatctgttacacggggtgcatgaacagaactacgtgccccacgtgatggcctacgcagcttgcataggcgcaaatctagggcattgcgctccggcctcttctgctgggtctctggcagccggaccgctgctgttagccctcgccctgtatcccctgagcgtactgttttag

SEQ ID NO: 178681 - DNA, 1575 bp, synthetic construct
  misc_feature 1..1575: note = Description of Artificial Sequence: Synthetic coding sequence
  source 1..1575: mol_type = other DNA
atgatcagccccttcctggtgctggccatcggcacctgcctgaccaactcactggtacctgaaaaagaaaaggaccctaaatactggcgcgaccaggcccaggaaacgctaaagtacgcactggaacttcaaaagctcaatactaacgtggccaaaaacgtgataatgttcctaggagatggaatgggggtcagcacagtgaccgcagctcgaattttaaaaggtcaattgcaccataaccccggcgaagaaactcgtttagagatggataaattcccttttgtggcattgtctaaaacatataacaccaatgctcaagttccggactcagccgggactgcaaccgcctacctttgcggggtgaaagccaatgagggcactgtgggggtgtctgcagccaccgagcggagcaggtgcaatacgacgcaaggtaacgaggtgacctcaatcctgcgatgggcgaaggacgcagggaagagcgtcggaatcgttacgactacgcgtgtaaatcatgccacaccttccgccgcctacgcccattcagcagaccgggattggtacagcgataacgaaatgccaccagaggccctgtcccagggatgtaaagacatcgcttaccagctgatgcacaacatcagggacatagacgtcataatgggaggcggcaggaagtacatgtatccgaagaacaagacggatgtggagtacgaaagtgatgaaaaggccaggggaactcgattggatggcttggacctcgtcgacacatggaagagcttcaagcctcgctacaagcacagccacttcatatggaacaggaccgagctgctgaccctggatccccacaatgtcgattacctcctcgggttgtttgagccaggagacatgcagtatgagctcaatcgcaataacgtgactgatccatcactgagtgaaatggtcgtcgtagccatacagattctgcgcaaaaaccctaagggatttttcctgctggtggagggcggtagaatcgaccatggccaccatgagggcaaggccaagcaggctctgcatgaagctgtggagatggaccgggcgatcggacaggccgggtccctgacgtcgagcgaggacacactgactgtggttactgccgaccattcacacgtctttacctttgggggctacacaccgcgtgggaacagtatctttggtctggcacctatgctgagtgacacggacaagaagccgttcactgctatcctttacggaaacggccctggctacaaggtggtgggaggagagcgagaaaacgtatctatggtggattatgctcataacaattaccaagcgcaatcagccgttcctctgcggcacgaaacccacggcggagaagacgttgccgtgttcagtaaggggccgatggctcatctgcttcacggagtgcatgagcagaattatgtccctcatgtaatggcgtatgctgcctgcataggtgccaatctcgggcattgcgcacccgcaagcagcgcgggctcgttggcggcaggaccactactgctggctctcgccctttaccctctgagtgttctcttctag

SEQ ID NO: 178682 - DNA, 1575 bp, synthetic construct
  misc_feature 1..1575: note = Description of Artificial Sequence: Synthetic coding sequence
  source 1..1575: mol_type = other DNA
atgatcagccccttcctggtgctggccatcggcacctgcctgaccaattctctcgtgcccgagaaggagaaggacccaaagtactggcgagaccaagcccaagaaaccctcaagtatgctttggagctgcagaaacttaacacgaacgtggctaagaacgtaataatgtttctgggtgacggaatgggcgtcagtactgttactgccgcaaggattcttaaaggtcaactgcatcacaatccgggtgaggaaactcgattggaaatggataagttccccttcgtagccctgtccaagacatacaatactaatgcacaagttccggatagcgccgggactgccaccgcttacctttgtggcgtgaaggccaatgaggggaccgttggcgtttccgcggcgaccgagcggtcccgctgtaacaccacacagggcaatgaagtgaccagtattcttaggtgggctaaggacgccggtaagagtgtggggatagttaccacgactcgggtgaaccatgccactccctcagcagcctatgcccactctgctgatagagattggtatagcgacaacgaaatgcctccggaggctctgagccaaggatgcaaagacattgcttatcagctgatgcataacatccgggacattgacgtgatcatggggggtgggagaaagtacatgtaccctaaaaacaagacagacgtggagtacgaaagcgatgagaaggctaggggcacacggctggacgggctggatctggttgatacatggaagtctttcaagcccagatacaaacactcacacttcatctggaaccggacagaactactgacattggatccgcacaatgtcgactatctattgggactcttcgagccaggtgacatgcagtatgagctgaaccggaacaacgtgacagacccctccctgtccgaaatggtcgtcgtggccatccaaatcctgaggaagaatccgaagggattcttcctactggtcgaggggggacggatcgatcacggccaccacgaaggcaaggccaagcaggcactgcacgaagctgtggaaatggatagagccattgggcaagctggatctttgacttcctccgaggataccctgactgtggtgactgccgatcattcacatgttttcacattcggggggtacaccccaaggggcaacagcattttcggactggctcccatgctgtctgatactgataaaaagccatttacagcaatactgtatgggaatggacccgggtataaagtggtcggcggagagagggagaatgtttcaatggttgattacgcccataataactaccaggctcagtcggctgttcccttgaggcacgagactcacggaggagaggatgtggctgtgttttcaaaggggccaatggcacacctactgcatggtgtgcacgagcagaactacgtccctcacgtgatggcatacgccgcttgtattggtgctaacctgggacattgcgcccccgcctccagcgccgggagcctggccgccggccctcttcttctcgcgttggccctgtaccccctgagcgttctcttctag

SEQ ID NO: 178683 - DNA, 1344 bp, synthetic construct
  misc_feature 1..1344: note = Description of Artificial Sequence: Synthetic coding sequence
  source 1..1344: mol_type = other DNA
atgccctggagcttccggagcagcacccccacctggctgcggatgagctcctgctcttgggagatgacctataataccaacgcacaagtccctgattccgctgggactgccaccgcgtacctgtgcggcgttaaggcaaatgaaggtactgtcggagtatcagccgccaccgaaaggtcaaggtgtaacaccacgcaggggaacgaggtgaccagcatcctcagatgggctaaggatgccggcaaaagtgtggggatcgtgacaacaaccagagttaaccacgcaactccaagtgccgcctacgctcacagcgctgaccgggactggtactcagacaacgaaatgccccccgaggctctgagtcaggggtgcaaggacatcgcctatcagctgatgcataacattagggacattgatgtgattatgggcggtggtaggaagtacatgtatccaaaaaacaaaaccgatgttgaatatgagtccgacgaaaaggcccgaggaaccagattggatgggctggacctggttgacacatggaagtctttcaagccaaggtacaagcacagccatttcatatggaaccgaacagaactcctgactctcgacccccacaatgtcgactatcttctagggctgtttgaaccaggggatatgcagtatgaacttaaccggaacaatgtcacagatcctagtctgtcggaaatggtcgtcgtggctatccaaattctacgaaagaacccaaagggcttctttttactggttgagggcggccgcattgaccatgggcaccacgaagggaaggccaagcaggcgttacacgaggctgtggagatggaccgcgccattggccaagcggggtccctgacaagcagcgaggataccctgacagtcgtgaccgcagatcattcacacgtcttcaccttcgggggttatacccctaggggcaattcaatttttggactagcccccatgctgtcagatacggacaagaagccatttacagccatcctgtacgggaatggccctggatataaggtggtggggggggagcgggaaaacgtgtccatggtggactacgcccacaacaactatcaagctcagagtgcggttcccttgaggcacgagacacatggaggggaagacgtcgccgtctttagcaaaggaccgatggctcacctgctccacggcgtacatgaacagaactatgtaccacatgtcatggcatacgccgcgtgtatcggcgccaacctcggacactgcgcacctgccagctccgccggctccctcgccgctgggccgcttcttctggctttagccctttatccgctgagcgtgttgttctag

SEQ ID NO: 178684 - DNA, 1410 bp, synthetic construct
  misc_feature 1..1410: note = Description of Artificial Sequence: Synthetic coding sequence
  source 1..1410: mol_type = other DNA
atgttcctgggcgacggcatgggcgtgagcaccgtgaccgccgccaggatcctcaagggccagctgcaccataacccaggggaggagaccaggctcgagatggacaaattcccattcgtggccctttccaagacatataatacaaacgctcaggtcccggactcagccgggacggcgaccgcatacctttgtggcgtcaaggccaacgagggaactgtgggtgtttcggccgcaaccgagagatctagatgcaatacaacacagggaaacgaggtgacttccatcttaaggtgggccaaagacgccgggaagtctgtgggtatcgtgaccaccacccgggtcaaccatgcaacccctagtgccgcttatgcccattccgccgaccgcgactggtatagcgacaatgagatgcctcctgaggccctgtcacagggttgtaaggacatcgcctaccagctgatgcataacatccgtgacattgacgtcattatgggaggtgggcgtaaatacatgtatcccaaaaataagacggacgtcgagtatgagtccgacgaaaaggctagaggcaccaggctggatgggctcgacctggtggatacttggaaatcatttaagccaagatataagcatagtcacttcatctggaaccgaactgagctactgactctggatcctcataacgttgactacctcctgggcctctttgaaccaggggacatgcaatacgaactcaatcgcaacaacgtgacagacccctccctctcagagatggttgtcgtcgctattcaaatattgagaaagaatcccaaagggttctttctgctggttgaagggggcaggatcgaccacgggcaccacgaggggaaggcgaagcaggcgcttcacgaagcagtagaaatggaccgggcaattggacaggcgggatcgctgaccagttcagaagatacactcacggtggtgaccgctgaccatagccatgtgtttacatttggtggatacactcccagaggaaacagtatctttggtctcgccccaatgctgtcagatacagacaagaaacctttcacagcaattctctacgggaatggccctggttacaaagttgtgggtggcgaacgagagaacgtgtctatggtcgactatgcgcataataattaccaggcccagtccgcagtgcccctgcgacacgagacacacggcggcgaagacgtggcggtcttttcgaaggggcctatggcacatctgctgcatggggttcacgaacagaattatgtgccgcacgtcatggcctacgccgcttgtattggcgcgaacctgggccattgtgcccctgcctcctctgcgggctcgctggccgcagggccgttactattggcgctagcactgtatccgttgtcggtactcttttag

SEQ ID NO: 178685 - DNA, 1608 bp, synthetic construct
  misc_feature 1..1608: note = Description of Artificial Sequence: Synthetic coding sequence
  source 1..1608: mol_type = other DNA
atgctgggcccctgcatgctgctgctgctgctgctgctgggcctgcggctccaactctccctggggattattccggtggaagaggaaaaccctgacttctggaatagagaagccgcagaagccttgggcgccgctaagaaactgcagccagcgcagaccgcggctaagaatctcatcatttttcttggagacggaatgggagtatccactgtcactgcagcacgaatcctgaagggacagaagaaagataaactcgggccagagattcctctggcaatggatcgcttcccttatgttgccctttcaaaaacatataatgtggataaacatgtccccgactctggcgcaaccgccacagcatacctatgtggtgttaaaggcaattttcaaacaattgggctgtccgccgctgcgagatttaaccagtgtaataccacccgtggaaacgaggtcatttctgttatgaatcgtgcgaagaaggccggcaaatcggtgggtgtggtgactaccactcgggtgcagcatgcatcgcccgcggggacatatgctcacacagttaaccgcaactggtatagcgatgcagacgtgcctgcgtcagccaggcaggagggctgtcaggacatcgccactcagctgattagcaacatggatatcgacgtgatcctgggtggtggccggaaatatatgtttcggatgggtacacccgatcccgagtatcctgacgattacagccaaggcggaacccgactggatggaaagaatctagtccaggagtggctggcaaagaggcagggcgccagatacgtgtggaatcggaccgaactgatgcaggcctccctggaccctagcgtcacacatcttatgggcctctttgaaccaggcgacatgaagtacgaaatccatagagacagcacattggaccccagcctaatggagatgactgaggccgctctgcgccttctgtcacgaaatcctcgagggttttttctgttcgtggaggggggacgcatcgatcatggccaccacgagtcccgtgcctacagagcgctgacggaaaccatcatgttcgatgacgctattgaaagggctggacagctcacatccgaggaagataccttgagcctggtaaccgcggatcactcccatgtcttcagcttcggaggatatcccttgcgtggctcaagcatcttcgggctggcacctggaaaggctagagatcggaaagcctacaccgtgctgctatacggaaatggtccaggctacgtgctgaaagatggagcccgacctgacgtgacagagagcgaatcagggagtcccgagtacaggcaacaatccgcagtgccattagatgaagagacacacgcaggcgaggatgtggctgtcttcgcccgggggccacaggcccacctggttcatggcgtccaggagcagaccttcatcgctcacgtgatggcctttgccgcgtgcctcgaaccgtacaccgcttgcgacctggctccgcccgcaggaacaactgatgctgctcaccctgggcgatcagtggtcccagcattgctgcctcttctggccggtaccttactcttactggaaacagccaccgcaccatag

SEQ ID NO: 178686 - DNA, 1599 bp, synthetic construct
  misc_feature 1..1599: note = Description of Artificial Sequence: Synthetic coding sequence
  source 1..1599: mol_type = other DNA
atgcagggcccctgggtgctgctgctgctgggcctgcggctgcagctctccttgggcataattcccgtcgaagaggagaatccggacttttggaacagacaagccgctgaggcactgggggctgccaagaagttgcagcccgcccagacagccgccaagaatctgattatatttctgggcgatgggatgggggtgtcaaccgtcactgctgctagaatcttaaagggacagaaaaaagacaagttaggaccagaaacatttctggcgatggatagatttccttacgtggccctcagcaaaacctacagcgtggacaagcatgtgccagacagcggcgctactgctacagcctacctctgcggtgttaaggggaatttccaaacaattggtttatctgcagcggctcgttttaatcagtgtaacacgacccgcgggaatgaggtgattagtgtgatgaaccgtgcaaaaaaagcaggtaagtcggtcggcgtggttacaaccactagggtgcagcatgcgagtcctgcaggcgcgtacgcgcatacagtcaacaggaattggtactctgacgccgatgtaccagcgagtgccagacaagaaggctgtcaggatattgccactcagctgatctccaacatggatatagacgtcatactgggggggggacgaaaatacatgttcccgatggggaccccagatcccgaatatccagacgactactcacaaggggggactcggctcgatggaaagaacctcgttcaggaatggctcgccaaacaccagggagcccgttacgtgtggaatcgtacggagcttcttcaggcctcacttgacccaagcgtcacccacctgatgggtttgtttgaacctggagacatgaaatacgagatacatcgcgactctacactggatccatccctgatggaaatgactgaggccgccctgctcctcttgtctaggaacccacggggtttttttctcttcgtagagggagggcggatcgaccacgggcaccatgaaagcagagcttaccgggcattgacagagaccataatgttcgacgacgccatagaaagggcaggccagctgacctcagaagaagacaccctctcattggtcactgcagatcatagtcacgttttttcatttggaggctatccgcttcgtggctcctctatttttggcctcgccccaggcaaggcgcgtgatagaaaggcgtacacagtcctgctgtatggaaacgggccagggtacgtgctgaaagacggcgcccggcctgacgtaaccgagtcggagtctgggtccccagaatatcggcagcagtcggctgttcctctggacggcgaaacacacgcgggagaagatgtggcggtttttgcccgagggccacaggcacacctggtacacggtgtacaggagcagacgttcatcgcccacgtgatggcttttgctgcttgtctcgagccttacaccgcatgtgacctagcacctagagcaggcaccacggatgccgctcatcccggcccttccgttgtccccgcgctgctgcctcttctggcagggaccttgttgctgctcggaacagctaccgccccgtag

SEQ ID NO: 178687 - DNA, 474 bp, synthetic construct
  misc_feature 1..474: note = Description of Artificial Sequence: Synthetic coding sequence
  source 1..474: mol_type = other DNA
atggaccggttcctggtgaagggcgcccagggcggcctgctgcggaagcaggaggaacaggagcccactggggaggagcccgcggtattgggcggagacaaggagagcacacgcaaaagacctagacgtgaagctccgggcaacggaggtcacagcgccggcccaagttggaggcatatcagggccgaaggcctagattgcagttatacggtgttattcggtaaggctgaagcagatgaaattttccaggagctggagaaggaagtggagtactttactggcattaaaatggcagtgacaacttcagggtccaccgagatgatgaaagaaaactggccactgggcgctcctctgcccctctctccatccgtgccagctgaaacgctgagcagtggaataaggataccagtggggaaagccccccccggaggctggcgttggagtggctgtaggtggccaaccggggcttattag

SEQ ID NO: 178688 - DNA, 2958 bp, synthetic construct
  misc_feature 1..2958: note = Description of Artificial Sequence: Synthetic coding sequence
  source 1..2958: mol_type = other DNA
atgatccggcacgccggcgcccccgcccggggcgaccccaccggccctgtgccagtggtagggaaaggcgaggaagaggaggaggaagacggcatgagactgtgtttgcctgccaatcctaaaaattgtctcccacatcgcagaggaatcagcatcctggaaaaactcatcaaaacatgccccgtctggcttcagttatctctgggtcaagctgaggtggcaagaatacttcaccgcgtggttgctggaatgtttcttgttcgccgagacagcagcagtaagcagctggttctctgcgtgcatttcccgtccctgaatgaatccagtgccgaggttctggagtacacgatcaaagaggagaagagcatattatacctggaaggaagcgctctagtgttcgaggatatcttcagactgatagccttttactgcgtgagcagagatttactgcctttcacactaagacttccgcaagccatactcgaggcttcttccttcacagatctggagacgattgcgaacctcgggttagggttctgggacagcagcctcaaccctccacaagaaagggggaagcctgccgagcctcctcgcgatagggcccctgggttcccgctggtgtcttctcttagaccaaccgcccacgacgcaaattgcgcatgcgagatcgagctgtcagtgggaaacgaccgcctgtggttcgtaaatcctattttcatcgaagactgctccagtgccttacccactgatcaacctccgttgggtaattgccccgcacggcctctgcccccaacctccgacgcaacctccccaacttctcggtgggcacctcgccggcctccaccacccccacccgtacttcctctgcaaccctgctcacccgcgcagcccccagtgctacccgcactggccccagcgcccgcatgccccctgcctacatccccaccagtgccggccccgcacgttacaccccacgccccaggcccgcctgaccatccaaaccagccccctatgatgacttgtgaaagactgccatgccccaccgccgggctggggcccctgagggaagaggcaatgaaaccaggcgccgccagcagtcccttgcagcaagtcccagcgcctccactgcctgcaaagaagaacctgcccactgcccctcccaggagacgtgttagcgagcgggtgtcattggaggatcagtccccgggtatggccgcagaaggcgatcagttgtctctaccaccacaaggcacgtctgatggcccagaagacacccccagagagtctactgaacagggccaagacaccgaggtgaaagcttctgacccccatagcatgccagaactgcccagaaccgccaagcaacctcccgttcctccgcccaggaaaaagcgaatcagtcggcaactcgcttcgactctgcctgcccccctcgagaatgctgaactctgcacacaggctatggctctggagacaccgacccccggccctcctagggagggtcagtcaccggcttcacaggcgggtacacagcaccccccagcgcaggctacagcccactcccagagttccccagaatttaagggcagtctcgctagcctctcggactcattgggggtcagtgtgatggcaacagatcaggattcgtactcgacatcaagcacagaggaggagctggagcagttctcttctccgagtgtgaagaagaagcccagtatgatactcgggaaagcaagacatcgtcttagcttcgcatccttctcatcaatgttccacgcgttcctgtccaataatcgcaagctatataaaaaagttgtggagctagctcaggacaaaggctcctatttcggatctttagtacaggattataaggtgtatagtctagaaatgatggctcgccaaacttcttcaacagagatgctgcaggaaatcaggaccatgatgacccagctaaagagctatttactgcagagcacagagctgaaagcgctcgtcgatcccgccctgcacagcgaggaggaacttgaagcgattgtggaatctgccctgtacaaatgtgtgctgaaacccttgaaagaggccattaattcttgcctccatcagattcactctaaagatgggagtctgcagcagctcaaggagaatcagctggtgatcctggccactaccactactgacttgggagtaaccacaagcgtccccgaggttccaatgatggagaagattcttcagaagttcaccagtatgcataaggcctactctcctgaaaagaagatcagtattcttctcaagacgtgtaagttgatctatgacagcatggctcttgggaaccctggcaagccctacggagctgacgacttcttgcccgtcttaatgtatgtgctggcccgcagcaatctcaccgaaatgttactgaatgttgaatatatgatggaactgatggatcccgcccttcagcttggcgagggcagttactacctcacgactacctacggcgcactcgaacatatcaaatcatatgacaagataaccgtgactagacagctctccgtggaagtgcaggacagcatccatagatgggagagaagaagaacactcaacaaagctagagcgtcccgatcaagtgttcaggatttcatctgtgtgtcatatctggaacctgagcaacaagcccgcacccttgcttcgagggcagacactcaggcacaggccctgtgcgcccagtgtgccgagaagttcgccgtggagcggcctcaagcacatagactgttcgttttggtagatggcagatgcttccagttggcagacgatgctcttcctcactgcatcaaaggatatttactgaggtcagaaccgaaacgtgatttccattttgtttacagaccactcgatggagggggcggtgggggcggcggaagcccaccctgtctggtggtgcgagagcccaattttctctag

SEQ ID NO: 178689 - DNA, 786 bp, synthetic construct
  misc_feature 1..786: note = Description of Artificial Sequence: Synthetic coding sequence
  source 1..786: mol_type = other DNA
atggaccggttcctggtgaagggcgcccagggcggcctgctgcggaaacaagaggagcaggagcctactggcgaagaacccgctgtactgggtggcgataaagaatctacacgcaaacgtccacggagagaagctcccggaaacggaggacattcagcagggccgagttggagacacatccgcgccgaggggctggattgcagctatactgtgctcttcgggaaggctgaggctgatgagatcttccaagagctggagaaagaagtggagtattttacaggcgctctggccagggttcaggtttttggcaaatggcatagcgtgccgcgtaagcaagctacctatggggatgccggattgacctacaccttttccggtctaacgctgtcacccaaaccttggataccggtgctggagcggatacgcgatcatgtatcaggggtaaccggacagacgttcaactttgttcttataaacaggtacaaggacggttgcgaccacatcggtgagcacagagacgacgagcgtgaattggcaccaggctctcccatcgcttccgtcagcttcggcgcttgtagagactttgtatttagacataaggactcccgcggcaagagtcctagtcggagagtggccgtggtgcgccttccactggcacacggcagcctgctgatgatgaaccaccctaccaatactcattggtaccactctctgcctgtgagaaagaaagtcttggcgccaagagttaatctcacatttagaaagatcttgctgactaagaagtag

SEQ ID NO: 178690 - DNA, 786 bp, synthetic construct
  misc_feature 1..786: note = Description of Artificial Sequence: Synthetic coding sequence
  source 1..786: mol_type = other DNA
atggaccggttcctggtgaagggcgcccagggcggcctgctgcggaaacaggaggaacaggaaccaactggagaagaaccggccgtgctgggcggagataaggagagcacccggaagcgtcccagacgtgaagcacctggaaacggaggccattcagctggcccctcgtggaggcacatccgcgcagagggcctcgactgctcctatactgtgctgttcggcaaagcggaagcagacgagattttccaggagctggagaaggaggttgagtacttcacaggagccctggcccgtgtccaagtctttggtaaatggcactctgttcctaggaagcaggcgacgtacggcgatgcaggtttgacctacacattttccggcttaaccttgagccctaagccttggataccggtactggaaaggattagagaccatgtctctggggtgactgggcagaccttcaacttcgtcttaataaaccgttacaaggacgggtgtgaccatataggcgagcaccgagatgacgaacgtgagctcgctcccggctcacccatcgcttctgttagcttcggagcctgtcgggactttgtgttcaggcacaaggactcacgcggcaagtcgccttcacggcgtgtggccgtcgtgagactgccgcttgcgcacggatcgctcctgatgatgaatcacccaaccaacacgcattggtaccacagcctgccggtgcgtaagaaagttctggcgccgagagtaaacctcactttcaggaaaatactgctgacgaagaaatag

SEQ ID NO: 178691 - DNA, 786 bp, synthetic construct
  misc_feature 1..786: note = Description of Artificial Sequence: Synthetic coding sequence
  source 1..786: mol_type = other DNA
atggaccggttcctggtgaagggcgcccagggcggcctgctgcggaaacaggaggagcaagagcctactggcgaggagcctgcagtgcttggcggggacaaggaaagtacccgcaagcgtcctagacgcgaagccccaggtaacggcggacattcagcaggacccagctggcggcacatccgggcggagggacttgattgcagctacacagtgctcttcggaaaggctgaagctgacgaaatcttccaggaattggagaaggaggtcgagtattttaccggcgcgcttgctcgagtccaggtttttgggaagtggcattctgttcctcgaaaacaggccacatatggagacgcagggctgacctatacctttagcggactaactcttagtccaaaaccctggatccctgtgcttgaaagaataagggatcacgttagcggcgtcacaggacaaacattcaactttgtgctgatcaataggtataaggacgggtgcgatcatatcggcgaacaccgtgatgacgagagagagctggcgcctgggtccccgatcgcctccgtgtcctttggcgcatgccgggatttcgtctttcggcacaaggattctcgagggaagtccccatctcggagagtggctgtggtgcggctgccgttagcacatggctccctcttgatgatgaaccatcccacaaatacccactggtaccatagtctgcctgtccgtaaaaaagttctggccccacgcgtaaatctgacattccgcaaaatcctgctcacaaaaaaatag

SEQ ID NO: 178692 - DNA, 453 bp, synthetic construct
  misc_feature 1..453: note = Description of Artificial Sequence: Synthetic coding sequence
  source 1..453: mol_type = other DNA
atggaccggttcctggtgaagggcgcccagggcggcctgctgcggaagcaggaagaacaggagcccacgggggaagaacccgctgtgctagggggtgacaaggagtcgaccaggaaaaggccccggcgggaagctcccggtaacggtggacactctgccggcccctcctggcgccatattagggcagaaggactggactgcagttacaccgtcctgttcggaaaagccgaggccgatgagatttttcaggaattagaaaaggaggtggagtacttcactggagccttggcacgtgtccaggtctttggcaaatggcactccgtcccaaggaaacaggccacttatggcgacgccgggctgacctacacattctctggcctgaccttgtctcctaagccctggatacccgtgttagagcgaattcgagatcacgtgagcggcgtgactggatag

SEQ ID NO: 178693 - DNA, 366 bp, synthetic construct
  misc_feature 1..366: note = Description of Artificial Sequence: Synthetic coding sequence
  source 1..366: mol_type = other DNA
atggaccggttcctggtgaagggcgcccagggcggcctgctgcggaagcaggaggagcaggagcctacgggcgaggaaccagccgtgttaggcggcgataaagagagcacaaggaaaaggcctaggagggaggccccagggaatggtggtcactcagcaggaccctcttggcgccacatccgggccgagggactcgattgctcctacacagtgttgtttggtaaggccgaagcagacgaaatatttcaggaactcgaaaaagaggttgaatatttcactggagcccttgccagggtacaggtgttcggcaaatggcacagtgttcctcgcaagcaggctacctatggcgacgctggcttaacctag

SEQ ID NO: 178694 - DNA, 483 bp, synthetic construct
  misc_feature 1..483: note = Description of Artificial Sequence: Synthetic coding sequence
  source 1..483: mol_type = other DNA
atggaccggttcctggtgaagggcgcccagggcggcctgctgcggaagcaagaggagcaggaacccactggcgaggaacctgccgtgcttggcggagataaagagtccactagaaaaagacccagaagggaggccccggggaatggggggcactctgcaggcccaagctggaggcacatcagagctgaggggttagactgctcatataccgttctgttcgggaaggccgaggcagacgagatattccaagaactggagaaagaggtggaatatttcacaggagccctggctagggtgcaggtctttggtaagtggcactccgtgccaagaaagcaggccacatatggagacgctggacttacatataccttctccggtcttactcttagtcccaagccctggatacccgtgttggaaaggatacgggaccacgtgtccggcgtcacaggacagacgttcaacttcgttttgatcaatagatag

SEQ ID NO: 178695 - DNA, 861 bp, synthetic construct
  misc_feature 1..861: note = Description of Artificial Sequence: Synthetic coding sequence
  source 1..861: mol_type = other DNA
atggaggagaagcggcggcgggcccgggtgcagggcgcctgggccgcgcccgtcaaatcacaggcaattgctcaaccggctactactgcaaaaagccatctgcaccagaaacctgggcaaacgtggaagaacaaggagcatcatttgtccgatcgtgaattcgtatttaaagaaccgcagcaggttgttaggagagctccagagccaagagtaatcgatcgggagggggtgtacgagatcagccttagtcctaccggggtctcccgggtttgcttgtacccgggttttgttgatgttaaagaggccgattggatacttgaacagctgtgccaggatgtgccatggaaacaacgcacaggaatccgggaggatatcacctaccagcaacccagattgacagcatggtacggggagctgccttacacgtattcaagaattacaatggaacccaacccacattggcatcctgttctccggacgctcaagaatcgaatcgaggagaatacaggacacaccttcaacagcttgttgtgtaacttgtaccgaaatgagaaggattccgtggattggcattccgacgatgaaccctcattggggcggtgccctatcattgcaagcttgtcttttggagctactagaacatttgagatgaggaaaaaaccaccccccgaagagaatggggactacacctacgtggagcgagtgaagatcccgctagaccatgggacccttctgattatggagggagcaacccaagcggactggcaacatcgcgtgccaaaggaataccactcacgagaaccaagggttaacctgacgttccgcaccgtttaccctgacccccgaggcgctccttggtag

SEQ ID NO: 178696 - DNA, 513 bp, synthetic construct
  misc_feature 1..513: note = Description of Artificial Sequence: Synthetic coding sequence
  source 1..513: mol_type = other DNA
atggaggagaagcggcggcgggcccgggtgcagggcgcctgggccgcaccggttaagtcccaggccatcgctcaacccgctactactgccaaatcccatcttcatcaaaaacccgggcagacctggaaaaacaaggagcatcacttgtcagaccgcgagttcgtatttaaggagccccaacaagtcgtgaggcgggcacctgagccaagagtaatcgaggagggagtgtatgagatttcattgtcacccacgggtgtttccagagtttgtctctaccctggtttcgtggatgtcaaagaggctgactggatcttggagcagttatgccaagacgtgccttggaagcaacggactggcattagggaggactcgatcttgcagctgacgttcaaaaaaagtgcacctgtctctggcacagccacggctccccagtcctgctggtacgagcgaccatcaccaccgcatatccctggccctgccatcttgactcgcacccggctgtgggcaccgtag

SEQ ID NO: 178697 - DNA, 183 bp, synthetic construct
  misc_feature 1..183: note = Description of Artificial Sequence: Synthetic coding sequence
  source 1..183: mol_type = other DNA
atggaggagaagcggcggcgggcccgggtgcagggcgcctgggccgcccccgttaagtcccaagccatcgcccagccggctactacagcgaaatcacacctgcaccagaaaccaggacaaacttggaagaacaaggagcaccatttgtctgacagggaattcgtgttcaaagaaccccagtag

SEQ ID NO: 178698 - DNA, 909 bp, synthetic construct
  misc_feature 1..909: note = Description of Artificial Sequence: Synthetic coding sequence
  source 1..909: mol_type = other DNA
atggccgccgccgccgccgagacccccgaggtgctgcgggagtgcggctgcaagggtatccggacatgtctgatttgcgaacgacagcgtggatcagatccaccatgggagctgcctccagccaagacttaccgctttatttactgcagcgacacggggtgggcagtcgggactgaagagagcgacttcgagggatgggcctttccctttcccggtgtgatgctgatagaggactttgtcacacgggaggaggaggcagaacttgtccgcctgatggaccgggatccctggaaactctcacagtctggccgacgcaagcaggattacggccctaaggtgaactttcgaaaacagaaacttaagaccgaaggcttctgtggcctgccatccttcagccgggaggtggtgagacgaatgggcctctacccgggactcgagggcttccggccagtggagcagtgcaatctggactactgtccagagaggggttcagcgatcgatccccatctggatgatgcttggctctggggagaacgtctggtttctctgaatctgctcagccctacagtcctttccatgtgtcgcgaagcccccgggtccttgctgctgtgtagcgccccttccgccgctcccgaagccctagtggactcagtgattgcaccaagcagatcagtgctgtgccaggaagtggaagtggcaatcccacttcctgcccggtcattgcttgtgttaacaggggctgcgaggcaccaatggaaacatgccatccatcggcggcacatcgaggcccggagggtgtgtgtgacattccgcgaactgagcgcagagttcggtcctggcggaagacaacaagaactgggccaggagttgctcaggatcgccctatccttccaaggacgacccgtctag

SEQ ID NO: 178699 - DNA, 1377 bp, synthetic construct
  misc_feature 1..1377: note = Description of Artificial Sequence: Synthetic coding sequence
  source 1..1377: mol_type = other DNA
atggccgccgccagcggctacaccgacctgcgggagaagctgaagtccatgacatcgcgcgacaattataaagctggtagtagagaggctgcagcagctgccgctgctgccgtagctgctgcagccgcggcggctgccgccgcagaaccgtaccctgtctctggagccaaacggaaatatcaggaggactcagatccggagagaagcgattacgaagagcagcaactccagaaggaggaggaggccagaaaggtgaagtcaggtataaggcagatgcgccttttctcacaagacgaatgcgcaaagatcgaggcacggatcgacgaggtggtatcaagagctgagaagggattgtacaacgaacacaccgttgatcgtgctccgctccggaataagtatttcttcggggaagggtatacttacggagcccagctgcaaaagaggggacctggacaggagcgtctgtacccacccggcgacgtggatgaaatccctgaatgggttcatcagctcgtcatacagaaactggtggaacacagagtgattcccgaggggtttgtgaacagcgccgtgattaatgactatcagcctggtggctgcatcgtgagccatgtggatcccatccacatttttgagcgaccgatcgtgtcagtgtcttttttcagcgactcagccctgtgctttggctgtaagtttcagtttaaaccaattcgggtgtctgagccggtgttatccttacccgtccggcgaggttcagtcacagtgctgagtggctacgctgctgatgaaataactcattgcattcgtccccaggacatcaaagaaagaagagcggttatcatcctgaggaagacgcgacttgatgcaccgaggctagagactaaatccctaagtagcagcgtcctgcccccttcatatgcgtctgaccggttaagcggtaacaacagagatcctgcactaaaaccaaagcggagccacagaaaggccgaccccgacgcagctcaccgaccgcggatactggagatggacaaggaagaaaatcgtcggtcggtactgcttcctacccaccgtaggcgaggatcattcagttctgagaattattggaggaagagttacgagagctccgaggactgtagcgaagcagcgggcagcccgggcaactcagggtccagccttaggtcctgcccttctttttgtttcgaaggtttcgtgtttgttcactggggcgtgtttgtattctgcttcctgttctttctcattctttatatctttccatggttttgttgtctgcttgggctgaagaatcgtatcggtcaagacttgggatcccacatccttggcattccccctggctggaaaggttgttggcaccagtag

SEQ ID NO: 178700 - DNA, 1185 bp, synthetic construct
  misc_feature 1..1185: note = Description of Artificial Sequence: Synthetic coding sequence
  source 1..1185: mol_type = other DNA
atggccgccgccagcggctacaccgacctgcgggagaagctgaagtctatgacgagcagggataactacaaagccggatcacgggaggcagcggccgccgccgccgccgcagttgcagctgctgctgccgcagccgccgcagctgagccctaccctgtttccggcgctaaacgcaaataccaggaggatagcgacccagagagatccgactacgaagaacagcagctgcagaaggaggaagaagcacgcaaggtaaagagcgggatcagacagatgcgactgttttcccaagacgagtgcgctaaaatcgaggcacggattgatgaggtggtctctagggccgaaaagggactctataacgagcacacagtggacagagccccactccgcaataagtatttttttggggaaggctatacgtatggcgcgcaattgcaaaagcgaggccctggccaggaacgcctctacccccccggggacgtggacgagattcccgagtgggtacaccagctcgtaatccagaagctagttgagcaccgggttatccccgaaggcttcgtgaattctgctgttatcaatgattatcagccagggggttgtattgtgtcccacgtggatcccattcatatattcgaaagacccattgtgtcagtatcgttcttctcagacagcgctctgtgcttcggctgcaagttccagtttaagccgatccgcgtgagcgagcctgtgctgtctctgcccgttcggcgtgggagcgtaaccgtcctgtccgggtatgctgccgatgagattacccactgtattcgaccgcaggacatcaaggagcggcgtgcggtgattattctacgtaaaactagattagacgcgcccaggctcgagaccaaaagtctgtccagcagcgtgctaccaccgagctatgcttcagaccggctaagtggtaacaacagggatcctgcccttaagccaaaacgatcgcacaggaaggctgaccccgacgccgctcaccgaccacgaatccttgagatggacaaggaggaaaatcgccggtctgttcttctcccgacacacagaagacgggggtcgttttcttcagaaaactattggcgaaaaagttacgagagtagcgaggactgttccgaggctgctgggagcccagccagaaaggtgaagatgaggcgccactag

SEQ ID NO: 178701 - DNA, 1152 bp, synthetic construct
  misc_feature 1..1152: note = Description of Artificial Sequence: Synthetic coding sequence
  source 1..1152: mol_type = other DNA
atgcggcggtgccggcggccctgccccgccggccggggcgagggcggcggtggacggagccccgccgctgctgcagccgttgcagccgccgcagccgcggcagccgcagctgagccgtaccctgtatccggagctaagagaaaataccaggaagattccgatccagagcgatctgattatgaagagcagcagcttcagaaagaggaagaggcccggaaggtcaagtcagggatcagacagatgaggctgttttcccaggatgagtgtgccaagatcgaagcacggattgatgaagtcgtgtcgagagcagagaaaggtttgtacaatgaacatacagtggaccgggcccccctgcgcaacaagtactttttcggtgaggggtacacctatggcgctcagctccagaaacggggccctggtcaagaacgtttataccctcccggggatgtagacgaaatcccagaatgggttcaccagctggttatccaaaagcttgttgaacaccgagtgatccccgagggtttcgtgaattccgctgtcatcaatgactaccagcccgggggctgtatcgtctcacacgtggatcccatccatatctttgaaaggccaattgtgagcgtgtcttttttcagcgattcagcactgtgctttggatgcaaattccagtttaaacctatcagggtttctgaaccggtcttgagcttgccagtgagaagggggtctgttaccgtcttgtcgggctacgcagctgatgaaatcacacactgcattcgcccacaggacataaaagaaagacgggcagttatcatcctgcggaagacccgactggacgcaccccgactggaaactaaaagcctgtctagttcagtgctgcctcctagctatgcctccgatagactttctggtaataatcgagaccctgccctcaaacctaaacggtctcatcggaaagcagacccagacgccgcacatcgaccacgcattctggaaatggacaaggaggagaatcgtcgatccgtgttgctccccacacatcgcagaaggggaagcttctctagcgagaactactggagaaaatcctatgagagttcagaagattgtagcgaagctgctggcagtcccgccaggaaagtgaagatgcgacggcactag

SEQ ID NO: 178702 - DNA, 717 bp, synthetic construct
  misc_feature 1..717: note = Description of Artificial Sequence: Synthetic coding sequence
  source 1..717: mol_type = other DNA
atggaggagcaggacgcccgggtgcccgccctggagcccttccgggtggagcaggccccaccagtgatttattacgttcctgactttatctccaaggaggaggaggagtatctactgaggcaagtgttcaatgccccaaagccgaaatggacacagctgtccggccgaaaactgcagaattgggggggcctgccccatcctcggggcatggtccccgaacggctgccaccctggctgcaaaggtacgtcgacaaagtgagcaacctttcactgttcgggggtctgccagccaaccacgtgcttgtcaaccaatacctgccaggggagggcataatgccccacgaagacgggccactctactacccaaccgtgagtacaattagcctagggtctcacacagtcctcgacttctacgaacctcggagaccggaagatgatgacccaactgagcaaccacgcccaccaccgaggccaacgacctccttgctgttagaaccccgttccttgctagtgctgcggggtccggcctacactcgccttctgcacggaattgccgctgcgagagttgatgcactggacgccgcaagctctcccccaaatgccgcggcatgcccttcagcccgccccggggcatgtctggttcgtgggacgcgggtttcactgaccatccggagagttcctcgcgtcctcagagccggtctccttcttgggaagtag

SEQ ID NO: 178703 - DNA, 801 bp, synthetic construct
  misc_feature 1..801: note = Description of Artificial Sequence: Synthetic coding sequence
  source 1..801: mol_type = other DNA
atggccggccggggcatgggcatgctgaacctggagatcggcggcgacgctggagggcgtataggatgtaaggaactggttttaatggaagagcaagatgcccgcgttcctgcccttgagcctttcagagtcgagcaggccccacctgtgatctattacgtgcccgatttcatctcaaaagaggaggaggaatatctgctgcgtcaagtgttcaacgctcctaagccaaaatggacccagttgagcggccggaagttgcaaaactggggtgggctgccccatccacgtggcatggtgccagagcggcttcccccctggcttcagcggtatgtcgacaaagtcagtaacttgagtttgtttggcggactcccagctaatcacgttttggttaatcagtacctgcccggagagggaatcatgccacatgaggatggacccctgtactacccaacggtctctaccatcagtctgggaagccatacagtgctggacttctatgaaccacgtagacctgaggacgacgacccgaccgagcaacccagaccccctccccgaccgaccacctccctgctgttggaaccgagaagcctcctcgtgcttcgtggcccagcttacaccaggctcctgcatggaattgcagccgctcgggtcgatgcactggacgcggcctctagccccccaaacgccgccgcctgccccagcgctcgacctggtgcatgtctggtacgcggaacaagagtatcactcactatccgccgagtgccccgtgtgttgagagctggcttactcttgggcaaatag

SEQ ID NO: 178704 - DNA, 717 bp, synthetic construct
  misc_feature 1..717: note = Description of Artificial Sequence: Synthetic coding sequence
  source 1..717: mol_type = other DNA
atggaggagcaggacgcccgggtgcccgccctggagcccttccgggttgagcaggccccgccagtcatttattacgttcccgattttatcagcaaggaggaggaggagtatctgcttcggcaggtttttaatgcccctaagccgaaatggactcagttatctggtaggaaactgcagaactgggggggattgcctcacccccgagggatggtgcctgagagattacccccgtggctgcagcgctatgttgacaaggtctcaaacttgagcctgttcggtggccttcctgccaaccacgtgttggttaatcagtacctgcctggggaaggaatcatgcctcatgaggacgggcctctgtactatcccacggtgtctaccatctctctgggatcacacacagtactggacttttacgagccacgacgtccagaggacgacgaccctacagagcagccccgaccacctcctcgcccgactactagtctgctgttggaacctcgcagtttgttggtgctgcggggcccagcctacacacgtctgttacacggcattgccgctgcgcgggtggatgccctggatgctgcttctagtccaccaaatgctgctgcctgccctagcgcacgcccaggagcttgtctcgtgagggggacacgggtgtcattgacgattcgcagggtgccacgtgtcttacgggccgggttacttctcggcaagtag

SEQ ID NO: 178705 - DNA, 666 bp, synthetic construct
  misc_feature 1..666: note = Description of Artificial Sequence: Synthetic coding sequence
  source 1..666: mol_type = other DNA
atggccggcaccggcctgctggccctgcggaccctgcccggcccctcctgggtgcgcgggagtggaccatctgttctgtccaggctccaggatgcagcggtggtccggccagggttcctgtctaccgctgaggaagaaaccctgtcccgggagcttgaaccggagctgcgccgtagaagatatgaatacgatcattgggatgcagcgattcatggcttccgcgaaaccgagaagtcccgctggagcgaggctagcagggcaattctccagagggttcaggcagcggcattcgggcccggtcaaacactcctgtcgtccgtccacgtccttgatctggaagcgcgcggctatattaagcctcacgtggactctatcaagttttgtggtgctaccattgccgggctctccttgctcagtccgtcagtaatgcggctcgttcatacccaggagcccggagaatggctggagctgctgctggaacccggaagtctctatattctgcgtgggtcggcccgctatgatttctcccacgagatcttacgagatgaagagtcctttttcggcgagcggcgcatccccaggggccgcaggattagtgtcatatgcaggagtttacccgaaggcatgggcccaggggaatcaggccagcctccacccgcctgctag

SEQ ID NO: 178706 - DNA, 1995 bp, synthetic construct
  misc_feature 1..1995: note = Description of Artificial Sequence: Synthetic coding sequence
  source 1..1995: mol_type = other DNA
atggacagcaaccaccagagcaactacaagctgagcaagaccgagaaaaaattccttaggaaacaaatcaaggccaaacacaccctgttgcgccacgagggcatcgagactgtatcctatgcgacgcagtccttggtggtagcaaatggcggtctgggcaacggagtctccagaaaccaactgttacccgtactggaaaaatgtggcctcgtggacgcgcttcttatgcctccaaacaagccatattcttttgctcgctaccgaacaaccgaagagagtaagcgcgcatatgtgacgctcaatggtaaagaagtagtcgacgatctggggcaaaagatcacactctacctgaactttgtcgagaaagtccaatggaaagagctcagacctcaggcactgccacccggcctgatggtggtggaagaaataatcagcagtgaagaagaaaaaatgttgctagagtctgtagattggaccgaggataccgacaatcagaactcccagaagagtctgaagcacaggcgcgtgaagcatttcggttacgagttccactacgaaaataacaacgtcgacaaggataaacctctgtctggcggcctgccagatatctgtgaatccttcctcgagaaatggctgcgtaaaggctacattaagcataaaccggaccagatgacgatcaaccaatacgagccgggtcaaggaattcctgcccacatcgacacgcattccgctttcgaagacgagattgttagcctgtccctgggaagcgagattgtgatggacttcaagcaccctgacggaatagctgttcccgtgatgctcccacgccggtccttgctggttatgacaggagaatctcggtatctctggacccatggcattacttgtcggaagttcgatactgtacaggcctcagaatccctgaaatccggaatcatcaccagtgacgtgggagacttgaccttgtctaaacgggggcttcgcacctcctttacattcagaaaagtgcgccagacgccatgtaattgctcgtatcctctcgtgtgcgatagtcagagaaaggagactccacccagttttccagaatcagacaaagaagccagtcggctggagcaagagtacgttcatcaggtgtatgaggaaatcgccggccatttctcgagcactaggcacactccctggccccacatcgtcgagtttctcaaggcattgccatccggatccatagtggccgatatcggctgtgggaatgggaagtacctgggtatcaataaagagctctatatgattggctgtgaccggagtcaaaacctagtggacatctgcagagagcgtcagtttcaggcattcgtttgtgacgccctggcagtgcccgtgaggtccgggagctgtgacgcttgcatttctattgcggtaatccaccacttcgcaacagctgagagacgcgttgcagccctccaagagattgtgagacttctcaggccaggcggtaaagctctcatctacgtctgggcgatggagcaggagtataataagcagaagtccaagtacttgagaggcaatcgaaattcccagggcaagaaagaagagatgaactccgacacaagtgtccagcggtcgctagtcgagcagatgcgagacatgggcagcagagacagcgccagttccgtgccacggatcaatgacagtcaggagggtgggtgtaattctagacaggtttccaactctaagcttcccgtgcacgtcaaccggacatctttttattcccaggacgttctggtcccatggcacctgaagggcaaccctgacaaaggtaaaccggtggaacccttcgggccgatcggcagccaggacccctccccagtgttccaccggtactaccatgtttttagagaaggagaacttgagggcgcgtgccggaccgtgtccgatgtgagaatcctgcagtcatactacgatcagggaaattggtgcgttatcctgcagaaagcctag

SEQ ID NO: 178707 - DNA, 2004 bp, synthetic construct
  misc_feature 1..2004: note = Description of Artificial Sequence: Synthetic coding sequence
  source 1..2004: mol_type = other DNA
atgttcgccatggacagcaaccaccagagcaactacaagctgagcaagacagaaaaaaagtttctcaggaagcagataaaagcgaaacacaccttactcaggcatgagggtattgaaacagtaagttacgctacgcaaagtctggtcgttgctaacggaggcctcggcaatggcgtgagccgcaaccagctactccccgtgttggagaagtgcggactcgtggacgcgctgctgatgccccccaacaagccatacagtttcgcacgctacaggaccaccgaggagtccaagagagcctatgtgactctgaacgggaaagaggtcgtggatgatctaggacagaaaattacgttgtacttgaatttcgtggaaaaagtgcagtggaaagaacttcggcctcaggcactccctccagggctaatggtggtggaggagataatctctagcgaagaggagaaaatgttgctggaaagcgtcgactggaccgaagacacggataaccagaactctcagaaatccctaaaacaccggcgcgtgaagcacttcggctacgagtttcactatgaaaataacaatgttgataaagacaagcccctcagcgggggcctccccgacatctgtgaaagcttcttggaaaagtggctgcgaaagggctacattaagcacaaacctgaccagatgacaattaaccagtacgagcccggtcaaggcattcccgcacatatagacactcacagtgccttcgaggatgagatcgtgagccttagtctgggaagcgagatcgtaatggacttcaagcatcccgacgggatcgcagtgcctgtgatgttgcctagacgctccttacttgtgatgacaggggagtcaaggtatttatggacccacggaatcacttgtcggaaatttgacactgtacaggcctcggagagtctgaaaagtggaattattacaagtgacgttggtgatctgacactatccaagcggggattgaggacatcttttaccttccggaaggtgcggcagactccatgcaactgtagctatccacttgtctgtgattctcaaagaaaggagacacccccaagcttcccagaatccgacaaggaggcctccaggctcgagcaagaatacgtgcaccaggtgtacgaggagattgccggacattttagttccacacgccacacgccctggccccacatagtggagtttctcaaggccctcccctccgggagcattgtcgccgacatcggctgcggaaatggcaaatacctcggtatcaataaggagctctacatgatcggatgcgacaggagccagaatcttgtcgatatctgtagggaaaggcagtttcaggcttttgtctgtgatgccctggccgtcccagtccgatctgggtcttgcgacgcctgtatctctatcgctgtgattcatcactttgctactgccgagcggagagttgccgccctccaggagattgttcgtctgcttcggcctggcggaaaggcattgatatacgtttgggccatggagcaggagtacaataaacaaaaatccaagtatctccgcgggaaccggaacagccagggcaaaaaggaggagatgaatagtgacacctcagtgcaacgcagcctggtggagcagatgagagatatgggatcccgagatagtgcgtctagcgtcccaagaatcaacgacagccaggaaggtggttgcaattctagacaggtgtccaacagcaaactgccagtgcacgtcaacagaaccagcttttactctcaagacgttctggtcccctggcacctgaagggcaatccggataaaggtaagcctgtggaacctttcgggccaatcggttctcaggacccttctccagtattccatcggtactaccatgtgttccgggaaggggagttagaaggcgcctgtagaacagtctctgatgtgcggatcctgcagtcttactatgatcagggtaattggtgtgtcatcttacagaaggcatag

SEQ ID NO: 178708 - DNA, 1995 bp, synthetic construct
  misc_feature 1..1995: note = Description of Artificial Sequence: Synthetic coding sequence
  source 1..1995: mol_type = other DNA
atggacagcaaccaccagagcaactacaagctgagcaagaccgagaagaagttcctgcgcaagcaaatcaaggcaaagcatactctgcttcgacacgaaggcatcgaaaccgtgtcctacgccacccagtctttggtcgtagctaatggaggcctcggaaatggagtgtccagaaatcagctcctgcctgtgctggaaaagtgcgggctagtcgacgcactcctcatgccccctaataaaccatattcttttgccagataccgtacgaccgaagaaagtaaaagagcctacgtcactcttaacgggaaggaggttgttgacgacctagggcagaaaataactctctatttgaatttcgtggaaaaagttcagtggaaagagctccgaccacaggctcttccacccggcctgatggttgtcgaggaaattatttcctcagaggaggagaagatgcttctcgagagcgtggactggacagaggacaccgataatcagaattcccagaagtccttgaagcataggcgggtgaagcactttgggtacgagttccattatgagaataataacgtggataaggataaacctttgtctggagggctcccagacatctgtgagagcttcctggagaaatggttgcgtaagggctacataaagcacaaaccagaccagatgacaataaatcagtacgagcctggacagggtatccctgctcacatcgacacacattctgcctttgaagatgaaatagtcagcctcagtctgggttctgagattgtcatggattttaaacacccagacggcattgccgttccggtgatgctccctcgtagatcactcctagtcatgacaggggagtctcggtacctttggacccacggaatcacttgtcgaaagttcgacacggtacaagcaagcgaatctctcaagtcaggaatcataacctctgatgtcggcgacctgacgctctcaaaacgggggctgcgaaccagcttcaccttcaggaaggtccggcagaccccctgcaattgctcctaccctctggtatgcgacagtcagagaaaagagactcctccttcctttcctgagtctgataaagaagcctcacggttggaacaggaatacgttcatcaggtgtacgaggagatcgcgggccatttttcgagtacacgccacactccctggccccatatagttgagttcttgaaagcactgccctcagggtcaattgttgcagacatcggatgcgggaacggtaagtatctgggcatcaataaagaactgtatatgattggatgtgacaggagtcagaacctcgttgatatttgtcgcgagcgacagttccaagcctttgtctgtgatgctctggccgtgccagtccgctcaggatcctgtgatgcatgcatctccattgccgtgattcaccatttcgctactgccgaacgcagagtggccgcgcttcaggagatcgtccgactgctgcgtcctggaggcaaggctctgatctacgtttgggctatggagcaggagtataacaaacagaaatctaaatacctgcgaggtaaccgcaacagccaggggaaaaaagaggagatgaactccgacactagtgtgcagagaagcctcgtcgaacaaatgagggacatggggagtcgtgacagtgccagctctgtgccgcgcattaatgattcacaggaggggggctgtaacagcaggcaggtgagtaactccaaattgcctgtccacgtgaatcgaacgagtttttacagccaggatgtcctcgtcccttggcatctgaaggggaacccagataaagggaaaccagtcgagcccttcgggcccattgggtcacaagaccccagccctgtctttcacagatactatcatgtgtttcgggaaggtgaactggagggtgcctgccgaacggtgtctgatgtcaggatcctgcagtcctattatgaccaaggcaactggtgcgtgatcctgcagaaggcatag

SEQ ID NO: 178709 - DNA, 675 bp, synthetic construct
  misc_feature 1..675: note = Description of Artificial Sequence: Synthetic coding sequence
  source 1..675: mol_type = other DNA
atggacagcaaccaccagagcaactacaagctgagcaagaccgagaagaaatttctccgcaagcaaatcaaggccaagcataccttactccgccacgagggcattgagaccgtctcatatgcaacacagagcctggtggtggcgaatggaggactggggaatggggtgtctcggaaccaactcttgcctgttctcgagaagtgtggcctggtagatgcactgctcatgccgcccaacaagccttactcttttgctcggtaccggaccaccgaggaatcgaaacgggcctacgtcactctgaacggcaaagaggtcgtggacgacctggggcaaaagattactctctacctaaatttcgtcgaaaaagtccagtggaaggagctgagacctcaggcgctgcccccagggttgatggttgtggaagaaataattagctcagaggaggagaaaatgctgctggagtctgtagactggaccgaagatacagacaaccagaatagccagaagtctctgaagcaccgtagggtcaagcattttgggtatgagttccactatgaaaataacaacgtggacaaggacaagccactcagtgggggcctgcctgacatctgcgagtcctttctggagaagtggctgcgcaaggccgagaaaaacctggaggtgggaattcactag

SEQ ID NO: 178710 - DNA, 1338 bp, synthetic construct
  misc_feature 1..1338: note = Description of Artificial Sequence: Synthetic coding sequence
  source 1..1338: mol_type = other DNA
atgaagaaccccgaggcccagcaggacgtgagcgtgagccagggctttcgcatgctgttctacacgatgaaaccctctgagacttccttccagaccctcgaagaagtaccagactacgtcaaaaaggcaacgcctttcttcatttcactgatgctgctcgagttggtggtcagctggatccttaagggcaaaccacccggccgcctggacgatgccctaacctccatctctgccggagtgctcagtcgcctgcctagcttgttctttagatcaatcgaattaacatcgtacatatacatttgggagaactatcgcctttttaatctgccttgggacagcccttggacgtggtactcggcttttctgggtgtagatttcggctattactggttccatagaatggcgcatgaggtcaatatcatgtgggccggacatcagacgcaccatagcagcgaagactacaatttgtctactgcccttcgccagtccgttttgcagatttatacgagctggatcttctacagtcccctggcattgttcatccctccctccgtgtacgccgttcatttacagttcaacctgctctaccagttttggatacatactgaggtgataaacaacctgggcccccttgaactgatcctaaatacccctagtcatcatagagttcaccacggtagaaatcggtattgtattgacaaaaactatgccggcgtcctgatcatttgggataaaatatttggtacctttgaggcggaaaatgagaaggtggtatacggcctgactcaccctatcaatacctttgagcctattaaggttcagttccaccatttattttctatctggaccacgttctgggcaacaccgggattctttaataaatttagtgtcatctttaagggaccagggtggggccccggcaagcctcgactagggctaagcgaggaaatccctgaagtgacgggtaaggaagtgccctttagttcctcatcgagtcagctattaaagatctacaccgtagtccaatttgccttgatgctggcattttacgaggaaacctttgctgataccgcagctttgagccaggttacactcctgctgcgtgtgtgttttatcatccttacactgacctccatcgggttcttgttggaccagcgacctaaagcagccataatggagaccttacgctgcctaatgttcttgatgttgtaccgctttgggcatctgaaaccattggtgccaagcctgagtagcgccttcgaaattgtcttctctatttgcatcgcattttggggggttcgctccatgaagcagctgacctcacacccttggaagtag

SEQ ID NO: 178711 - DNA, 1977 bp, synthetic construct
  misc_feature 1..1977: note = Description of Artificial Sequence: Synthetic coding sequence
  source 1..1977: mol_type = other DNA
atggccgaggccgccgccgccgccggcggcaccggcctgggcgccggcgcctcctatggatccgccgcggaccgggaccgggaccctgatccagacagagcgggcaggagattgagagtgcttagcgggcatttactggggcgtccccgggaggcattgtccactaatgaatgcaaggcgaggcgcgctgcttcagcagccaccgccgctcctacagccactcctgcagcccaggagtccgggaccattcctaaaaaaagacaggaagtcatgaaatggaatggctggggctacaacgattctaagttcatcttcaataagaaaggacagatcgagctaacaggaaaacgatatccgcttagcgggatgggcctgcccacttttaaggaatggatccagaacactctgggtgtaaatgtggaacataaaacaacaagcaaggcctctctgaaccccagtgatacaccgccatctgtggtcaatgaggattttttgcatgacctgaaggagaccaacatcagttattcacaagaggcagacgatcgagtgtttcgagctcatggccactgcctgcatgaaatctttctgctcagggaaggtatgttcgagcggattcccgacatagtcttgtggcctacgtgccatgatgatgtcgtcaagattgtcaatctagcctgtaaatataatctgtgtatcatcccaattgggggtggcaccagcgtcagttatggtcttatgtgcccagccgacgaaacgaggactatcatctcacttgacacttcccagatgaacaggatcctgtgggtggatgaaaataatctgacagcacacgtggaggccggcatcactggacaggagcttgagcggcagctcaaagaatccggatactgcaccgggcatgaacccgactcacttgaattttctacagtgggagggtgggtctccactagagctagtggcatgaagaagaacatctatggcaatatcgaagatctggtggtgcacattaagatggtaactcctcggggaattatcgagaagtcatgccagggcccgagaatgtctacgggaccggatatacaccatttcatcatgggcagcgaagggacgctgggggtgattactgaagcgaccattaaaatcagacccgtccctgagtaccagaagtacggatccgtagcctttcccaacttcgagcagggggtagcctgcttgcgggaaattgctaagcagaggtgcgcgcctgcgagcatcagactaatggataataagcaattccaattcggacacgcccttaagcctcaagtttcaagtattttcacttcattcctggacgggcttaagaaattctatatcacaaagtttaaagggtttgacccaaatcaactgtcggtcgccactcttttgtttgaaggcgacagagagaaggtgctacagcacgagaagcaggtctacgatattgccgcgaaattcgggggcctggcagcaggcgaggacaacggccagcgcggctatctcctcacttatgtaatagcatatatccgggatctggctttggaatactacgtgttaggcgaatctttcgagacatccgccccctgggacagggtcgtggatttatgtaggaatgtgaaggagaggatcacaagagagtgtaaggagaaaggggtccagttcgcccccttcagcacctgcagggtaacccagacctacgacgctggcgcatgtatttatttttatttcgcttttaattacagggggatcagcgacccattgaccgttttcgaacaaacggaagcagccgcccgggaagaaatcctagccaatgggggaagtctgagccatcaccacggggtggggaagttgcgcaaacagtggttaaaggaatcaatcagcgacgtgggcttcggcatgcttaaatctgtgaaggagtacgtggatccaaataatattttcgggaatagaaacctgctctag

SEQ ID NO: 178712 - DNA, 966 bp, synthetic construct
  misc_feature 1..966: note = Description of Artificial Sequence: Synthetic coding sequence
  source 1..966: mol_type = other DNA
atggaccccaagtacccctggagcaagtgcggccacaagaccacctccaaagcctctctgaacccttctgatacaccacctagcgtcgtaaatgaggacttcttgcacgatctcaaggaaacaaatattagttactcacaggaagcagatgaccgagtttttcgcgcccacggccactgcctccacgaaatttttctcctgagggaggggatgttcgaaagaatacccgacattgtcttgtggcctacctgtcacgacgatgtggtgaaaatcgtgaatcttgcctgtaaatataacttgtgtatcattcccatcggaggaggcaccagcgtttcttacggcctcatgtgccccgccgatgagactcgtacaattatttcactagacacaagccagatgaatcggattctgtgggtcgacgagaataatctaaccgcacatgtggaagctggcatcacgggtcaagagttagagcggcagcttaaagaaagtggctactgcaccgggcatgagccggatagcctggagttttccactgttggaggatgggtgtctacaagagcgtctggtatgaaaaagaatatttatggtaatatcgaggacctcgtggtgcacatcaaaatggtcactccgaggggaattattgagaagtcatgccagggccctagaatgtcaactggtcctgacattcaccattttatcatggggtctgagggcactctgggagtgatcacggaggcgactatcaaaattaggcccgttcctgagtaccaaaaatacggtagcgttgcctttcctaatttcgaacagggcgtcgcctgcttgcgtgagattgcaaaacagcgatgcgccccggcttctatccgcctgatggataataagcagtttcagtttggacacgcacttaaaccacaggtaagttctatatttaccagctttctggacggcctaaaaaaattttattag

SEQ ID NO: 178713 - DNA, 1176 bp, synthetic construct
  misc_feature 1..1176: note = Description of Artificial Sequence: Synthetic coding sequence
  source 1..1176: mol_type = other DNA
atggacatggccagcgagagcgtgggcggcaagatcctgttcgccaccgatgactttttcgctccagcagaaaatcttatcaagtccgacagtccatgcttcaaagagcacgaatacaccgaatttggaaagtggatggatggatgggagacaagacggaagcgaatccctggacacgactggtgtgtgctgcgtctaggaatccaaggcgttataaggggcttcgacgtcgatgttagttactttacgggagactacgcgcccagggtttctatccaagccgcaaacttagaagaggacaagttgccggagatcccagagcgaggaactcgcacaggtgctgccgcaacaccagaagagtttgaggccattgccgagctgaaatccgatgattggtcatacctggtgcctatgaccgagctaaaacccggaaatccagcaagcgggcacaactacttcctggttaatagccagcagcgctggacccacatcagactgaacatcttcccggatggtggcatcgcccggctccgcgtttttggaaccggacaaaaagattggacagcaactgacccaaaagaacctgcagatctggtggctatcgccttcgggggagtgtgcgttgggttctcaaatgctaaatttggccatcccaacaacataatcggcgtggggggtgctaagtctatggcggatggctgggaaacggctaggcgccttgatcggccacctattctggaaaatgatgagaacggcattcttttggtccctgggtgtgaatgggccgtattccgcttagctcacccgggcgtcataactagaatcgaaatcgacacaaagtatttcgaaggaaatgcacccgattcctgcaaggttgacggctgcattctgactactcaagaggaagaggccgtgatcaggcaaaaatggatactgcctgcccacaagtggaaacccctgttgccagtgaccaagctaagtcccaaccagtcacatctattcgactctctcacacttgagttgcaagacgtgattacacacgcccggctgaccatagtacccgatggtggcgtgtcccgcttgcgactacgcggatttccttctagcatctgcttgctacggcccagggagaaaccaatgctgaagttttctgtgagctttaaggccaacccatag

SEQ ID NO: 178714 - DNA, 486 bp, synthetic construct
  misc_feature 1..486: note = Description of Artificial Sequence: Synthetic coding sequence
  source 1..486: mol_type = other DNA
ggccggaaggccagcgagaagaccggcggccgggagggcgagcccgccgatagaggtttacagctgggaggaaaagcttttgggctcttaaaagctcagcaggaggaaaggctggacgaaattaacaagcagtttttggacgacccaaagtacagcagtgacgaagacctaccttctaaactcgaagggtttaaagagaaatatatggagtttgacctgaacggaaatggcgacatagatattatgagcttgaaacggatgctggaaaagcttggggtacctaaaacacacctcgagctaaagaaactgattggagaagtctcgagcggctccggagagacattctcctatcccgactttctgagaatgatgcttgggaagcgtagtgccatcctgaagatgattttgatgtacgaggagaaagcccgtgagaaagagaagccaacaggaccccccgccaagaaggctatctccgagctgccgtag

SEQ ID NO: 178715 - DNA, 282 bp, synthetic construct
  misc_feature 1..282: note = Description of Artificial Sequence: Synthetic coding sequence
  source 1..282: mol_type = other DNA
atggagttcgacctgaacggcaacggcgacatcgacatcatgagcctcaagcggatgcttgagaagcttggcgtgcctaaaacgcatctggagctgaaaaagcttattggagaagtctcaagcggaagcggggagaccttctcttatcccgacttcctgcgcatgatgctaggcaagcggagcgcaatcctgaagatgatccttatgtacgaggagaaagcaagagaaaaggagaaaccaaccggaccaccagctaaaaaggctatatccgaacttccatag

SEQ ID NO: 178716 - DNA, 444 bp, synthetic construct
  misc_feature 1..444: note = Description of Artificial Sequence: Synthetic coding sequence
  source 1..444: mol_type = other DNA
atgagccagacccgggacctgcagggcggcaaggccttcggcctgctcaaagctcagcaagaggagcgattggatgaaatcaacaagcagtttctcgatgaccccaagtatagcagcgatgaagaccttcccagtaaattggaggggtttaaagagaaatacatggagttcgaccttaatggcaatggggatatagatatcatgagcctcaaacgaatgctggaaaagcttggggtgcctaaaacccatctggagctgaaaaagttaatcggcgaggtctcttctggctcaggagagacttttagctaccctgatttcctgagaatgatgctcggaaaacgctccgctattcttaagatgatccttatgtacgaggagaaagcaagggaaaaggagaagcctactgggccgcccgccaaaaaggcaatcagcgaactcccttag

SEQ ID NO: 178717 - DNA, 282 bp, synthetic construct
  misc_feature 1..282: note = Description of Artificial Sequence: Synthetic coding sequence
  source 1..282: mol_type = other DNA
atggagttcgacctgaacggcaacggcgacatcgacatcatgagcctgaaacgaatgcttgaaaagctgggcgtccctaagactcatctggaactcaaaaagctcattggcgaggtaagttcaggaagcggggagaccttttcctatcctgattttctgcgcatgatgctggggaaaagatccgcgatcctgaagatgatcttaatgtatgaagagaaagctagagagaaagagaaacccactggccccccagccaagaaagccatctcagaactcccgtag

SEQ ID NO: 178718 - DNA, 444 bp, synthetic construct
  misc_feature 1..444: note = Description of Artificial Sequence: Synthetic coding sequence
  source 1..444: mol_type = other DNA
atgagccagacccgggacctgcagggcggcaaggccttcggcctgttaaaagcacagcaggaggaaagactggacgaaatcaataagcaattcctggacgatccaaagtattcctctgatgaggatttgccctctaagctagaaggctttaaggagaagtatatggaatttgaccttaatgggaacggtgatattgatattatgagtcttaaacgcatgctggagaagctgggagtgccgaagacccatctggagctgaagaagctgatcggagaagtctcttctggcagtggggagacgttctcttatccagactttcttcgcatgatgttgggaaagcggagtgccattttaaagatgatcttgatgtacgaagaaaaggctcgggaaaaagagaaaccaaccggcccccccgcaaagaaggccattagcgaactcccatag

SEQ ID NO: 178719 - DNA, 486 bp, synthetic construct
  misc_feature 1..486: note = Description of Artificial Sequence: Synthetic coding sequence
  source 1..486: mol_type = other DNA
ggccggaaggccagcgagaagaccggcggccgggagggcgagcccgcggacagaggtttgcagctaggaggcaaggccttcggactgctgaaagcacaacaggaagaacgccttgacgagatcaacaagcagtttcttgatgaccctaagtacagttcggacgaagacctgccaagtaagttggaaggcttcaaggaaaagtatatggagtttgatctcaacggcaacggcgacatcgatatcatgtcactgaagcggatgctggagaaactgggagtcccgaaaactcacttagagctcaagaagctgatcggcgaagtgtcttccggtagcggagaaacctttagctacccggacttcctgaggatgatgctcggcaagcggagcgcaattcttaaaatgatcctcatgtacgaagagaaagcacgcgagaaagaaaagcctactgggccacccgccaaaaaggccattagcgagctgccatag

SEQ ID NO: 178720 - DNA, 444 bp, synthetic construct
  misc_feature 1..444: note = Description of Artificial Sequence: Synthetic coding sequence
  source 1..444: mol_type = other DNA
atgagccagacccgggacctgcagggcggcaaggccttcggcctgctcaaagctcagcaggaagagagactggatgagatcaacaaacagtttctagatgaccctaaatatagttccgacgaggacctgccctccaagctggaaggcttcaaggaaaagtacatggagttcgaccttaatggaaatggtgatatcgatataatgtcattgaaaaggatgctggaaaagctcggggtgccaaagacccacctggagctgaagaagctcattggcgaggtgagcagcggttctggggagacatttagttatccggactttctgcgaatgatgctgggcaaacggagtgctattctgaaaatgattctgatgtatgaggaaaaggcgagggaaaaggaaaagcctacggggccacctgctaaaaaggcaattagcgagctgccatag

SEQ ID NO: 178721 - DNA, 444 bp, synthetic construct
  misc_feature 1..444: note = Description of Artificial Sequence: Synthetic coding sequence
  source 1..444: mol_type = other DNA
atgagccagacccgggacctgcagggcggcaaggccttcggcctgctgaaggcacaacaggaggagcgcctcgacgagataaataagcagttccttgatgaccccaagtactctagtgatgaggatctgccatccaagttggaggggtttaaggagaagtatatggaattcgaccttaacggtaatggggatattgatatcatgtcattgaaacggatgcttgagaagctgggcgtaccaaagacccaccttgagctaaagaagttgattggagaggtttccagtgggagcggagaaactttctcttatcctgatttcctgagaatgatgttaggaaaaaggagtgctatcctcaagatgatcttaatgtacgaagagaaggcgcgagaaaaggagaaaccgaccgggcccccagcaaaaaaagcaataagtgaactgccttag

SEQ ID NO: 178722 - DNA, 282 bp, synthetic construct
  misc_feature 1..282: note = Description of Artificial Sequence: Synthetic coding sequence
  source 1..282: mol_type = other DNA
atggagttcgacctgaacggcaacggcgacatcgacatcatgagcctgaagcgcatgctcgaaaaactgggcgtcccaaagactcacctcgagttaaagaaactcatcggcgaagtttcgagtggtagtggagagactttttcttatcctgatttcctgcgcatgatgctgggcaaacgctcagcaatcctgaagatgatcctaatgtacgaggaaaaagcacgtgagaaagaaaagcctaccggtccacctgctaagaaagcaatctccgagttgccttag

SEQ ID NO: 178723 - DNA, 282 bp, synthetic construct
  misc_feature 1..282: note = Description of Artificial Sequence: Synthetic coding sequence
  source 1..282: mol_type = other DNA
atggagttcgacctgaacggcaacggcgacatcgacatcatgagcttgaaaagaatgctggagaagcttggagtgccaaagacgcatttggaactaaaaaaattaataggggaggtgtcctctggctccggtgaaactttttcttacccagacttcctccgtatgatgctgggaaaaaggagcgctatccttaaaatgatcttaatgtatgaggaaaaggcccgcgaaaaggagaagcccactggacctcctgctaaaaaagcaatttcagaactaccctag

SEQ ID NO: 178724 - DNA, 486 bp, synthetic construct
  misc_feature 1..486: note = Description of Artificial Sequence: Synthetic coding sequence
  source 1..486: mol_type = other DNA
ggccggaaggccagcgagaagaccggcggccgggagggcgagcccgccgaccgcggactgcagctgggcggtaaggcctttggacttcttaaggctcaacaagaagaacgattggatgaaattaacaagcagtttctggacgaccctaagtatagtagtgacgaggacctcccatccaagcttgagggtttcaaggaaaagtatatggaatttgatctgaacggtaacggagacatcgacatcatgtctctcaagcgcatgctggagaagctgggtgtccccaagacgcacctggaactgaagaaactcattggtgaggtatcttctggctccggcgagaccttttcataccccgattttctaagaatgatgctcgggaagcggtccgccattctgaagatgatacttatgtacgaagaaaaggccagagaaaaagaaaaacccaccgggccacctgcaaagaaggccatttctgagctgccatag

SEQ ID NO: 178725 - DNA, 282 bp, synthetic construct
  misc_feature 1..282: note = Description of Artificial Sequence: Synthetic coding sequence
  source 1..282: mol_type = other DNA
atggagttcgacctgaacggcaacggcgacatcgacatcatgagccttaagcgcatgttggagaagttaggagtgcctaagacccacctcgaactcaagaaactcatcggagaggtctcatctggctcaggggagacattttcctaccccgattttttgaggatgatgctaggaaagcgctcagccatcttgaaaatgatcctcatgtatgaggaaaaggcccgcgagaaagaaaaacctactggccctcctgctaaaaaagccatttctgagctaccatag

SEQ ID NO: 178726 - DNA, 282 bp, synthetic construct
  misc_feature 1..282: note = Description of Artificial Sequence: Synthetic coding sequence
  source 1..282: mol_type = other DNA
atggagttcgacctgaacggcaacggcgacatcgacatcatgagcctcaaaaggatgttagagaagctgggagtgcctaaaacacatctggagctgaagaagctgattggagaggtcagcagtggcagcggagaaacattctcttacccagacttcctcaggatgatgctaggcaagcgatccgccattctaaagatgatcctgatgtacgaagagaaggctagagagaaggaaaagcctaccggcccccctgctaaaaaagcaatctctgaactgccttag

SEQ ID NO: 178727 - DNA, 444 bp, synthetic construct
  misc_feature 1..444: note = Description of Artificial Sequence: Synthetic coding sequence
  source 1..444: mol_type = other DNA
atgagccagacccgggacctgcagggcggcaaggccttcggcctgctcaaggcacagcaggaggagaggctcgatgagataaataagcaattccttgacgacccaaagtattcctctgacgaggaccttcccagtaagctggaaggcttcaaggagaagtacatggaattcgacttgaacggcaacggcgatattgatattatgagtcttaaaagaatgctagagaagctaggagtgcccaagacacacctcgaacttaaaaagctcatcggagaggttagttccgggagcggtgagaccttttcgtaccccgattttctgaggatgatgttgggcaaacggagtgccattctgaaaatgattctgatgtatgaggaaaaagctagggagaaggagaaaccaactggacccccggccaagaaggccataagtgagctcccatag

SEQ ID NO: 178728 - DNA, 486 bp, synthetic construct
  misc_feature 1..486: note = Description of Artificial Sequence: Synthetic coding sequence
  source 1..486: mol_type = other DNA
ggccggaaggccagcgagaagaccggcggccgggagggcgagcccgccgacagaggactccagctcggcggcaaggcattcggacttctcaaagcgcagcaggaggagcgtcttgatgagataaacaaacaatttttagacgatccaaaatattcgagcgatgaggacttgcctagtaagctggagggcttcaaggagaagtacatggaattcgatctaaacggcaatggggacatcgatattatgtcactgaaacgcatgctcgagaaattgggtgttccaaaaacccaccttgaattaaaaaaactgattggtgaggtctcctctggcagcggcgagacttttagttatcctgattttctcaggatgatgctcggaaaaagaagcgccattcttaagatgattctgatgtacgaggaaaaagcaagagaaaaggagaagccaactggcccccccgcgaaaaaggcaatcagcgaattaccatag

SEQ ID NO: 178729 - DNA, 444 bp, synthetic construct
  misc_feature 1..444: note = Description of Artificial Sequence: Synthetic coding sequence
  source 1..444: mol_type = other DNA
atgagccagacccgggacctgcagggcggcaaggccttcggcctgttgaaggctcagcaggaagaaaggcttgacgagatcaacaagcagttcctggacgatccgaaatattcctccgacgaagacctgcctagcaaacttgagggattcaaggagaagtacatggaatttgatctcaatggaaatggagatatagatattatgtcactgaagcgaatgctagaaaaactaggagtgcccaaaactcacctagagctgaaaaagttaattggagaagtatcctccggaagcggtgaaaccttttcatatcccgactttctgagaatgatgttgggcaaacgaagtgcgatcctgaaaatgattctgatgtatgaggaaaaagctagagaaaaggaaaagcctaccggccctcccgccaagaaggccattagtgaactgccatag

SEQ ID NO: 178730 - DNA, 486 bp, synthetic construct
  misc_feature 1..486: note = Description of Artificial Sequence: Synthetic coding sequence
  source 1..486: mol_type = other DNA
ggccggaaggccagcgagaagaccggcggccgggagggcgagcccgccgaccgcggcttacaattgggcggaaaagccttcggtctgctgaaagcccagcaggaagaaagacttgatgagatcaacaagcagttcctggatgatccgaaatatagttcggacgaagacctgccgtccaagctggaggggttcaaggagaagtacatggaattcgatctcaatgggaatggggacattgacattatgagtttgaagcgcatgctggaaaaactcggcgtaccaaagactcatcttgaacttaaaaaactgatcggggaagtctcgtcgggatcaggggaaactttctcatacccagatttcctgagaatgatgctgggtaaacgcagcgccatccttaagatgattctcatgtatgaagagaaagcccgtgagaaagagaaacctacaggtccgcccgctaaaaaggcaatttctgagctcccatag

SEQ ID NO: 178731 - DNA, 486 bp, synthetic construct
  misc_feature 1..486: note = Description of Artificial Sequence: Synthetic coding sequence
  source 1..486: mol_type = other DNA
ggccggaaggccagcgagaagaccggcggccgggagggcgagcccgctgaccgcggactgcagctgggaggtaaggcatttggattacttaaagcacagcaagaagaacgtttggatgagatcaacaaacagttcctagatgaccccaagtacagcagtgatgaagatctgcctagcaagttagaaggattcaaagagaaatacatggagttcgacctaaatggcaacggtgatatcgatattatgtccttgaaacgtatgcttgagaagctcggtgtgcctaaaacccatttggaactgaaaaagctgatcggggaggtgagctctgggtccggcgagacattttcctaccccgatttcctgagaatgatgctgggcaaacgcagcgcaatacttaagatgatcttaatgtacgaggaaaaggccagagaaaaggagaagccaacgggtccaccagccaagaaggctatctccgaactgccatag

SEQ ID NO: 178732 - DNA, 282 bp, synthetic construct
  misc_feature 1..282: note = Description of Artificial Sequence: Synthetic coding sequence
  source 1..282: mol_type = other DNA
atggagttcgacctgaacggcaacggcgacatcgacatcatgagcctgaagaggatgcttgagaagctgggagtgccaaagactcatctggaattaaagaaactgattggcgaggtgagctctgggtcgggcgaaacattcagctatcccgattttttacggatgatgctgggtaagaggtctgcgatcttaaagatgatcctgatgtatgaagagaaggcaagggagaaggagaagcctacgggtccaccagctaagaaggcgatttctgagcttccatag

SEQ ID NO: 178733 - DNA, 1062 bp, synthetic construct
  misc_feature 1..1062: note = Description of Artificial Sequence: Synthetic coding sequence
  source 1..1062: mol_type = other DNA
atgagcaagccccccgacctgctgctgcggctgctgcggggcgccccacgacaacgggtgtgtactcttttcatcatcggctttaagttcacattcttcgtttctattatgatctattggcatgtcgtcggggagcccaaggagaaagggcagctgtacaatcttcccgccgaaataccatgtcctacccttacccccccaacacctcccagccacggacctacacctgggaacatcttcttcctcgaaacatcagatcggacaaatccaaactttctgttcatgtgctctgtggagtccgcggctcgcactcaccccgagtcccacgtactcgttcttatgaaaggcctccctgggggtaatgcttcacttcccaggcacttaggaatctcgctgctttcttgttttcccaatgttcagatgttgcccctcgatctgcgtgaactatttagggacacacccctggccgactggtacgctgccgtccagggacgctgggaaccatacctgctgcctgttctcagcgatgcatctcggatcgctctcatgtggaagtttggcgggatttatctggacacggatttcattgttctaaagaacctgaggaaccttaccaatgtactcggcacacagagtaggtacgtcctcaacggagccttcctggccttcgagcgaaggcatgagtttatggccttgtgtatgcgggattttgtggaccattacaacggttggatttggggccaccaggggcctcagctgctgaccagggtgttcaagaagtggtgttccattcgttcgttggcggagtcccgggcgtgccgcggagtcactactctgccccctgaagcattttatccaataccgtggcaggactggaagaaatactttgaagatatcaatccagaagaactgcccagactcctttcagccacttatgcagtacacgtctggaataaaaaatcacaaggtactcgctttgaagccacctcacgtgcactgctggctcagttgcacgcgcgatattgtcctactactcatgaggcaatgaagatgtatttgtag

SEQ ID NO: 178734 - DNA, 1062 bp, synthetic construct
  misc_feature 1..1062: note = Description of Artificial Sequence: Synthetic coding sequence
  source 1..1062: mol_type = other DNA
atgagcaagccccccgacctgctgctgcggctgctgcggggcgccccaaggcagcgggtgtgtacgttatttatcatcgggttcaaattcaccttcttcgtgagtattatgatctactggcacgtggtgggcgagcccaaggaaaagggacagctgtataatttgcctgcagagataccatgtccaaccctcacacctccaactccaccttcacacggcccgacccctggtaacatcttctttctggagacaagcgataggaccaatcccaattttttgttcatgtgcagcgtggaatccgcagcacgcactcaccccgagtctcatgtgctggtgcttatgaagggcctgcctggcggcaacgccagcctgcccaggcacctggggatatccttgctctcttgctttcctaatgtccagatgcttccacttgaccttcgggaactttttcgcgatactcccctggccgattggtatgccgctgttcagggccggtgggagccttatctgcttccagtgctcagcgacgcgagccgaattgccttaatgtggaaattcgggggtatatacctggataccgattttattgtgcttaagaacttgcgcaatctgactaacgtcctgggtactcaatcgagatacgtgctcaatggtgcgtttcttgcttttgagagacgacacgagtttatggctttgtgtatgcgcgatttcgtcgatcactataatggctggatttggggccaccaaggaccccagctgctgacacgcgtttttaaaaagtggtgcagtattcgctccctggccgagagtcgggcctgtagaggcgtcactacattgcctccagaggctttctaccccattccctggcaggactggaagaaatactttgaggacatcaatccagaagagctgcctcggctgctgagtgccacatacgccgtgcacgtttggaacaagaagagtcaggggaccagatttgaggccacttcacgtgcccttttggcccaacttcacgcgcggtattgtcccacgacacacgaggctatgaagatgtatctgtag

SEQ ID NO: 178735 - DNA, 1062 bp, synthetic construct
  misc_feature 1..1062: note = Description of Artificial Sequence: Synthetic coding sequence
  source 1..1062: mol_type = other DNA
atgagcaagccccccgacctgctgctgcggctgctgcggggcgccccacgacagagggtctgtaccctgttcatcatcggcttcaagttcaccttcttcgtgagcataatgatttactggcacgtggtgggcgaacctaaagaaaaggggcagttgtacaatctccctgcagagattccctgtcccaccctcaccccaccgacacccccctctcacgggcccaccccaggcaacattttctttttggagactagcgacaggacaaaccccaacttcctgtttatgtgctccgtcgagagtgccgccaggacacaccctgaatcccatgtcttagtgctcatgaagggcctgcccgggggcaatgcatccctgccaagacacctgggaatctcattactgtcgtgtttcccgaacgtccagatgctaccacttgatcttagagaactgtttcgcgacactcctctggccgattggtatgcagccgtacagggacggtgggaaccatacctgctccctgttttgagcgacgcttctcggattgcacttatgtggaagttcggtggaatctaccttgacacagactttatagtgcttaagaacctgcgaaatctaacaaatgttctgggtactcagagcaggtacgtgctgaatggcgcatttttggccttcgagcgcagacacgagttcatggccttatgcatgcgagacttcgtggatcactacaatggctggatttggggacaccaaggcccacaactgttgacgcgtgtctttaaaaaatggtgttctatccggtctctcgcagagtctcgcgcctgccggggggtcacaaccctgcccccagaggccttctatcccatcccctggcaggactggaaaaaatacttcgaagacatcaaccccgaagaacttcccaggctactgagcgccacttacgctgttcatgtgtggaataagaaaagtcagggaactcgcttcgaagccacaagccgcgctctacttgcacagctgcatgcccggtattgcccaacaacgcacgaagcaatgaagatgtatctgtag

SEQ ID NO: 178736 - DNA, 1311 bp, synthetic construct
  misc_feature 1..1311: note = Description of Artificial Sequence: Synthetic coding sequence
  source 1..1311: mol_type = other DNA
atgagcaagccccccgacctgctgctgcggctgctgcggggcgcccccagacagcgggtgtgtacactgttcattattggattcaagtttacctttttcgtctccataatgatttactggcatgtcgtgggggaacctaaagagaagggccaactttataacctacccgcagagataccttgtcctaccctgactccaccaacaccacctagccatggccccacaccgggcaacattttcttcctagagacctccgatagaaccaatccaaatttcttgttcatgtgcagcgtcgagtcagcggctcggacgcatcccgaaagccatgtgttagtgctgatgaaaggacttcctgggggaaatgctagtcttccacgtcacctaggtattagtctgctgtcctgctttcccaacgttcaaatgttgccactggacctgcgggaactgtttcgggatacccctcttgctgactggtacgccgccgtccaggggaggtgggagccttatctgctgccagtgctgtccgacgccagtcgcattgctctcatgtggaagtttggcggcatatacctcgacactgacttcattgtgctcaagaacttgcggaatttgactaatgtcctcggcacccagtcccgatacgtgctgaatggcgccttcctggcatttgaaaggaggcatgaattcatggcactctgtatgcgcgacttcgttgatcactacaatggctggatttggggacaccaaggaccacaactgctcaccagggtctttaaaaaatggtgctctataagatccctagccgaatctagagcctgccggggcgttaccaccttgccacccgaggccttttaccccataccatggcaggattggaaaaagtactttgaagacatcaaccctgaggagctgcctaggttgctctctgccacatatgctgtgcacgtttggaataagaaaagtcagggtacagctggccctgctgcgtgtcctctgttaccccatgacgcaagaggacacgaaaacgttttggtacgcgggcctccgggccatcttccaaacctactgctcatggggcactgggcagctctgcccggagaggcgaggcttagagctagggagcgcgaagcacgtgcggccacaggactgaggcaggccgttgaggagctctgggagcaggcccagtgggaggccgttgatacccctcgaactgtatcctgcctggaagccggcctgacacacggagccattgcctccggtgggcgaagcgtgtctgcccctggcctgctcgacaatagacaggagggctag

SEQ ID NO: 178737 - DNA, 309 bp, synthetic construct
  misc_feature 1..309: note = Description of Artificial Sequence: Synthetic coding sequence
  source 1..309: mol_type = other DNA
atggccctgctgaaggccaacaaggacctgatcagcgccggcctgaaagagttctctgtgctgttaaatcagcaggtgtttaacgacccacttgtttcggaggaagatatggtgactgttgttgaagactggatgaatttctatataaactattatagacagcaggtcactggagagcctcaggaaagggacaaggctctgcaggagcttcgtcaagagctcaacacactggctaatcctttccttgccaaatacagagactttctcaagtcgcacgagcttccgagccaccctcctcccagttcctag

SEQ ID NO: 178738 - DNA, 1488 bp, synthetic construct
  misc_feature 1..1488: note = Description of Artificial Sequence: Synthetic coding sequence
  source 1..1488: mol_type = other DNA
atgagcatgctggtggtgttcctgctgctgtggggcgtgacctggggacccgtgaccgaagccgcaatcttctatgagactcagcccagcctttgggcagagagtgagagtttattgaaacctttggccaacgtcaccctgacttgtcaggctcatctggagaccccagacttccagctcttcaaaaatggagtcgcacaggagccagttcacctggattccccggctatcaagcaccagttccttctgaccggcgacacacagggccgctatcgatgtcgcagcggcctctcaacgggctggactcagcttagcaagcttctcgaactgaccggcccgaagtccctccccgcaccttggctgagcatggcgccagtctcctggattactccggggctaaagacgaccgccgtttgcagaggtgtgttgagaggcgtgacatttctcctaaggagggagggagaccatgaattcctagaggtgccagaggcccaagaggatgtagaagctactttccccgtccaccagccgggaaactatagctgctcctataggacagacggagagggcgctctgtccgaaccatccgcaaccgttaccattgaagagctggcagctccaccccctcccgtattgatgcaccacggagagtcctctcaagtactccaccccgggaacaaagtgacacttacatgcgtcgccccactgagcggagtggactttcagctgagaaggggcgagaaggaactgcttgtcccaaggtcaagcacgagtccagaccgcatctttttccacctgaatgctgtcgcccttggcgatggcggccattacacttgtaggtataggctgcatgacaatcaaaatggctggtctggggacagtgcaccggtcgagcttatcctctctgatgagaccctgccggctccggagtttagccctgagccagagtctggacgcgccctgcggctgagatgcttagcccctctggaaggtgcccgttttgcattggtgcgggaggatagaggaggcaggcgcgttcataggtttcagagccctgcaggaacagaagcacttttcgagctacataatatttcggtcgctgactccgccaactacagctgcgtctacgtggacctcaagcctcctttcggcggttcagcaccctccgaaagattagagttacacgttgatggcccaccgcccaggccccaactgagagctacttggtccggtgcggttcttgccggacgcgatgcagtgcttcgatgcgaagggcccattcccgacgttacctttgagctgttacgcgaaggagaaacgaaagccgtgaagactgtccggactcccggagccgccgccaaccttgaattgatttttgtgggcccacagcacgccggaaactacaggtgtcgctatcgctcctgggtaccacatacatttgagagcgagttgagtgatccagtggagctgctggtggctgagtcctag

SEQ ID NO: 178739 - DNA, 1059 bp, synthetic construct
  misc_feature 1..1059: note = Description of Artificial Sequence: Synthetic coding sequence
  source 1..1059: mol_type = other DNA
atgcggagcctgggcgccctgctgctgctgctgagcgcctgcctggccgtatcagccggtcccgtgccaacacctcccgacaatattcaagtgcaagaaaatttcaacatttctcgcatttatgggaagtggtataacctggctataggttctacttgcccttggctgaagaaaatcatggatagaatgacagtgtctacactcgtgctcggcgaaggagctacggaagccgagatctctatgacaagtacccgctggaggaagggcgtttgcgaggagacgtcaggcgcttacgagaaaacagacaccgacggcaagtttttataccataagagcaagtggaacatcacaatggagagctatgtggtccacacaaattatgacgaatacgcaatctttctcaccaaaaagttctcccgacatcatgggcccaccatcaccgctaaactctacggacgtgctcctcaactgcgagagacccttcttcaggatttccgagtagtggctcagggggtggggattcctgaggactctattttcacaatggccgatcgtggggaatgcgtgccaggggaacaagagcctgagccaattctaatccctagggtccggcgggccgtccttcctcaggaggaggaggggtccggtggtgggcagctagtgaccgaggtaaccaaaaaggaggactcatgtcagttaggatattcggctgggccctgcatgggaatgacctctcgctacttttataacggaacctccatggcgtgtgagacctttcaatacggaggatgtatgggtaacgggaataacttcgtaacagaaaaagagtgcctacagacgtgtcgcacagtcgccgcgtgcaatcttccaatagtgcgcggaccctgtagggcttttatacagctgtgggcgtttgacgcagttaagggtaaatgtgtactctttccttatggcggctgccaaggtaacggtaataagttttattcagagaaggaatgcagggagtattgtggcgtgccaggggacggtgacgaagagctcctgcggttctctaactag

SEQ ID NO: 178740 - DNA, 813 bp, synthetic construct
  misc_feature 1..813: note = Description of Artificial Sequence: Synthetic coding sequence
  source 1..813: mol_type = other DNA
atggaccggatgaccgtgagcaccctggtgctgggcgagggcgccacagaggcagagatctccatgaccagcactagatggagaaagggcgtttgtgaagagacttcaggagcatacgaaaaaaccgacaccgacggaaagtttctgtatcataagtccaaatggaacattaccatggaatcctatgtcgtgcataccaattatgatgaatatgctatttttttgacaaagaaattctcgaggcaccatggacccacaattactgccaaactctatgggcgggcccctcaattaagagagaccctgttgcaagacttcagagtggtggcacagggagtaggaattccagaggacagcattttcaccatggcagacagaggagaatgtgttccgggggaacaggagcccgaacccatcctaattcccagggtaaggcgggctgtacttccccaggaggaggagggctctgggggtgggcagctggtgacagaggttaccaagaaggaggattcttgccagcttggttactctgccggcccatgtatgggcatgacaagcaggtatttttataacggaacgagtatggcgtgcgaaaccttccaatacggtggttgcatggggaacggcaataactttgtcacagaaaaggagtgtctgcaaacctgccgcactgttggcgagtgtggctcaccccccctatgtgcactgcaccctcaggacccagtgccccctgtgaatcacttacggatcgagaaagtggcaaaccgggggcattctagtgggcggacaccgggcggcttcctcaagagttag

SEQ ID NO: 178741 - DNA, 897 bp, synthetic construct
  misc_feature 1..897: note = Description of Artificial Sequence: Synthetic coding sequence
  source 1..897: mol_type = other DNA
atggtgcggatggtgcccgtgctgctgagcctgctgctgctgctgggacccgcagtgccccaggagaatcaggatggacgttacagcttgacatacatctatacaggattgtcaaagcacgtggaagacgtgccagcgttccaagcgcttgggtccttaaacgacttgcagttttttaggtacaattctaaggataggaaatcccaacctatggggttatggcgccaagtggaaggcatggaggattggaaacaggattctcagcttcagaaggccagagaggatatcttcatggagacactgaaggacattgtggaatactacaatgattctaacggctcgcatgttctccaggggcgatttggctgcgagattgaaaacaatcggtcctctggagctttctggaaatattactacgatggaaaagactatatagagttcaataaggaaattcctgcatgggtgcctttcgatccagcggcacagatcaccaaacagaagtgggaggcagagcctgtttacgtccagagggccaaagcttacctcgaagaagaatgccctgcgaccttaagaaagtaccttaagtactcaaagaacattctcgatcgacaagaccccccctctgtggtggtgacctcacaccaggctcccggagagaagaagaaactcaagtgcctggcttatgacttttaccccgggaagatagatgtgcattggacgcgagcaggagaggtccaggagcccgagttgagaggggacgtgcttcacaatgggaacggtacttaccagagctgggtggttgtcgcagttccgccccaggataccgcgccctacagttgccacgtgcagcatagctcactggctcaaccacttgtggtcccatgggaagcctcatag

SEQ ID NO: 178742 - DNA, 1104 bp, synthetic construct
  misc_feature 1..1104: note = Description of Artificial Sequence: Synthetic coding sequence
  source 1..1104: mol_type = other DNA
atgaagagcctggtgctgctgctgtgcctggcccagctgtggggctgtcactcagccccacacggcccgggtctgatctatagacaacctaactgtgatgacccggagacagaagaggccgcactggtagccatcgactacataaatcagaatctgccttggggttataagcatactcttaaccagatcgacgaagtaaaagtatggccacagcaaccaagtggcgagctttttgagattgaaatcgatacactcgagacaacctgccacgttttagatcccactccggtggcaaggtgtagcgtgcggcagctgaaggagcacgccgtagagggggactgtgatttccaactactgaaattggatgggaaattcagcgtcgtctatgcgaaatgtgacagcagcccagattccgctgaggatgtaagaaaggtgtgtcaagactgcccgctgctagctcctctaaatgataccagggtcgtgcatgctgcaaaggctgccctggcagcctttaacgcgcagaataacggttcaaactttcagctagaagaaatttctcgtgcacaactcgtccctctgcctccgtctacgtacgtggaatttacggtctcaggcacagactgtgtggcaaaggaggcaaccgaggccgccaaatgcaacttgctcgctgagaaacagtacggcttttgtaaggcaacactctctgaaaaacttggaggagcagaagtcgctgtaacttgcatggtatttcagactcagcccgtgagcagccagccccagccagagggcgctaatgaggcagtgccaacacccgtcgtcgatcctgatgcacccccttctccgcccctgggcgctcccggcttgccccctgccggctcgcccccggattctcacgtcctcctagcagcccctccgggtcaccagctccatagggcccactatgatcttcgccacacctttatgggcgtcgtgagtcttggctccccgtcaggcgaagtgtcccatcctagaaagacccggacagtggttcaacctagcgtgggggcggccgcgggaccagtcgtccctccttgtccgggcaggatacgccacttcaaggtgtag

SEQ ID NO: 178743 - DNA, 1302 bp, synthetic construct
  misc_feature 1..1302: note = Description of Artificial Sequence: Synthetic coding sequence
  source 1..1302: mol_type = other DNA
atgttcgccggctgcttcttcttcctgctgaaccagagccggaaccacccagtgagcctgtgcaatagctccggtcgcttgcaacagattaataaggcccaccaccccccgtgggtgtacctttcccagcaaagcacttgggttggccctgaggccagtaatcacctgcatgcctgccagggccttagcggagcagcaatgaaaagtttggttctgctcttgtgcctggcgcagctgtggggttgtcactctgctccccacggtccggggctcatttacaggcagccaaactgcgacgaccccgaaacagaagaagcagccctcgtggccattgattacatcaaccagaacctcccttgggggtacaagcatactcttaaccaaatcgatgaagtgaaagtctggcctcagcagccctctggtgaactttttgagatcgaaatcgatactctcgaaacaacctgtcacgtcctggaccccactcctgtcgcgagatgttccgtgcgccagcttaaagaacatgccgtcgagggcgattgtgacttccagctgctaaaactcgacgggaagtttagcgtcgtctacgctaaatgtgactcctccccagactcagctgaggacgtaagaaaggtgtgtcaggactgccctctcctcgcccctctgaacgatactagagtcgttcacgccgccaaagcagcactcgctgccttcaacgcgcaaaacaatgggagcaacttccagctggaggagatctcaagggcccagttagtaccgcttccacccagcacttatgtggaatttacagtctccggtacagactgtgtggctaaggaagcaaccgaggccgccaagtgtaacctgttagcagagaaacagtatggattttgtaaggccaccctctctgaaaaactaggaggcgccgaggtcgctgtgacctgcatggtgttccagacacaacccgtcagcagtcagcctcagccagagggcgccaacgaagccgtgcctaccccggtcgtggaccccgacgcacccccctccccacctcttggagcacctgggctgcccccggcagggagccccccagatagtcacgtgctgctggccgccccccccgggcaccagctgcacagggcccattacgatttgcgccacacattcatgggagtggtgagcctggggagtccaagtggtgaagtctctcacccaagaaaaactaggacagtcgtgcaaccatccgtgggggccgctgctggccctgttgtcccaccatgccccggcaggatccggcatttcaaggtgtag

SEQ ID NO: 178744 - DNA, 4425 bp, synthetic construct
  misc_feature 1..4425: note = Description of Artificial Sequence: Synthetic coding sequence
  source 1..4425: mol_type = other DNA
atgggcaagaacaagctgctgcaccccagcctggtgctgctgctgttggtgcttttaccaacagacgccagtgtttccggaaaaccccagtatatggtgctggtgccatcccttctccacacagaaaccacagaaaaaggctgtgtcctgttatcctatttgaacgagaccgttaccgtgtctgccagcctagagagcgtgcgcggcaataggagcctttttacagatctagaagcagagaacgatgtacttcattgcgtcgcttttgctgtacccaaaagctccagcaacgaggaagtcatgtttctaactgtgcaggtcaagggacctacacaggaattcaaaaaaaggacgactgtcatggttaagaacgaggactcccttgttttcgtccagacagataaatctatttacaaacccgggcagaccgtgaagtttcgggtggtgtcaatggacgagaatttccacccactgaatgagttaatccccttggtttatatccaggatcctaagggcaacaggatcgcccagtggcagtctttccagcttgaaggcggcctgaagcagttctcgttcccattgtcctccgagccattccaaggttcgtacaaggtggttgtgcagaagaagagcggagggcgcacagaacacccgtttacggtggaagagtttgttctacctaaattcgaagtgcaggtgactgtgccaaagattatcactatcctggaagaggaaatgaatgtgtccgtgtgtggcctgtacacctatgggaagccagtgccaggccacgtgacagttagcatatgtcggaaatatagcgacgcttcagactgtcatggtgaagactcgcaagccttttgtgagaagttctccggtcaactaaattcgcacggttgtttttatcagcaggtgaaaactaaggtctttcaactgaaaagaaaggaatatgaaatgaaactgcacacggaggcccagatccaggaggaaggaaccgtagtagagttaaccgggcgtcaaagctccgagattacccgcacaatcacaaagctgtcatttgtgaaagtggactctcacttccgtcaggggatccccttcttcggacaagtccggttggttgatggaaagggggtgccaataccaaacaaggtgatattcatcaggggcaacgaggcaaactattatagcaacgccacaacagacgaacacgggttagttcaattctcaatcaacaccactaacgtcatgggaacttcacttacagtgcgggttaactacaaagatagatctccctgctatggataccagtgggttagtgaagagcatgaggaggcccaccacaccgcatatctggttttctcaccttccaagtctttcgtgcaccttgagccaatgagccatgagctgccgtgcgggcatactcagacagtgcaggctcactatattctgaacgggggtaccttgctcggtttgaagaaactatccttctactacctcattatggccaagggtgggatcgtgcggacaggaacccatggcctcctggttaaacaggaggacatgaaagggcactttagcatttcgatccctgtgaagtctgatattgctccagtggccaggcttctgatctatgcagtgctccctacaggagacgtgatcggagattctgccaaatatgacgtggagaattgcctggctaacaaagtcgacttatcattttccccctcgcagtccttaccggcatcacacgctcatcttcgggtcactgccgccccacagtcagtctgtgccctccgagcagtggaccagagtgtcctacttatgaaacccgatgcagagctgtctgcatcttccgtctataatctgctgcctgagaaggacctgaccggctttcctggtcctttgaacgatcaggataatgaggactgtatcaaccgtcacaatgtgtacataaacggcatcacttatacccccgtgtcttcaaccaacgaaaaagacatgtactctttcctggaggatatgggtctcaaggcttttacgaacagcaaaatcaggaaaccaaagatgtgcccccagctgcagcagtacgaaatgcacggccctgaaggcctgagggtgggcttctacgagtcggatgtgatggggcgcggacatgcccgtctggttcatgtcgaggaaccccacacggaaacagtcaggaaatactttcccgagacctggatctgggacctggtggtggtcaactctgccggggtagccgaagtgggcgtcacagtcccagatactattaccgagtggaaggctggtgctttttgtctctcagaggatgctggcctcggaatcagctctactgcctcccttagggcatttcagccattctttgtggaactcaccatgccatattcagtgataaggggcgaggcattcaccttgaaagctaccgttctcaactacctaccgaagtgcatcagagtgagcgttcagctggaggccagccccgcctttctggctgtcccggtagagaaggaacaggcaccacattgcatttgcgccaacggacgccaaactgtgtcctgggccgtaacacctaagtccctgggcaatgtcaacttcacagtatccgcggaagctctggagagtcaggagctgtgcggcaccgaagtccctagcgttccagagcatggccggaaagataccgtcatcaagcctctcttggttgagccagaagggttggagaaggaaactacttttaacagcttgctctgcccctcagggggcgaagtgtccgaagagctgtcattgaagctgccccctaacgttgtggaagagtcggcccgcgccagtgtgtccgtgctgggagacattttgggctccgccatgcagaatacccagaatttgctgcaaatgccctatggatgtggtgaacagaatatggtgctctttgctcctaacatttatgtcctagactacttgaacgaaacccagcaactgaccccggagataaagagcaaggcaatcggctacctgaacactgggtatcagcgtcagttaaactacaagcattatgatggatcatattccacatttggggagcgctacggccgcaatcaaggcaacacatggctgaccgcctttgtgttaaagacgtttgcgcaggctcgcgcctatatcttcatagacgaggctcatataacacaggcacttatctggctctcacagagacagaaggataatggatgctttagaagttcgggctctctattaaacaatgcaataaagggtggtgttgaagacgaggtgactctctccgcgtacataaccattgcactccttgagataccattaaccgtgactcaccccgtggtgcggaacgcattgttttgtttggagtctgcatggaagacagcacaagagggggaccatggttctcatgtgtataccaaagccttgctcgcttatgccttcgcactcgccggcaatcaggataagagaaaggaagtgctgaaaagcttaaacgaagaagccgtgaagaaggacaattctgtacactgggagaggccccagaaaccaaaggctcctgtggggcatttctacgagccacaggcaccctcagcggaggtcgagatgaccagctacgtcctgctggcctaccttacagcccagcctgcacctacgagtgaggatctgactagcgccactaatatagtcaagtggataacaaagcagcaaaatgctcaggggggattctcttccacacaggacactgtggtggccctgcatgcactctctaagtatggcgcggctacattcacacgcacaggaaaagccgctcaagtgaccatacagtcaagcgggacattctccagcaaattccaggtggacaataacaatcgtctgctactccaacaggtgagcctgcccgagctgccaggggaatactctatgaaagtcaccggcgaggggtgcgtctacctgcagactagcctgaaatataatatcctcccagagaaggaggagtttcccttcgctctgggcgtacagaccttaccccagacttgcgatgagcctaaggcccacacctccttccagatttccctctccgtgtcatacaccggatcaaggtcagccagcaacatggccatcgtagacgtcaaaatggtgtctggcttcatccccctcaaaccaacagttaagatgctcgaacgctctaatcacgtttctagaaccgaagtgtcttctaatcacgtgcttatttacctggacaaagtgtcaaatcagactctttcactcttttttacagtcctccaagacgtgccagtccgagatctgaagcctgctattgtgaaggtgtacgattactacgagactgatgagttcgctattgctgagtataatgctccttgctctaaggatttgggcaatgcctag

SEQ ID NO: 178745 - DNA, 507 bp, synthetic construct
  misc_feature 1..507: note = Description of Artificial Sequence: Synthetic coding sequence
  source 1..507: mol_type = other DNA
atgggcaagaacaagctgctgcaccccagcctggtgctgctgctgcttgtcctcctccctacagacgcaagtgtgagcgggaagccacagtatatggtcctggtcccgagcttgctgcacactgagactacagagaagggctgcgtgcttctatcttacttgaacgagacggtcacagtgagtgcctccctggagtcagtgcgagggaatcggtcgctttttaccgacttagaggctgagaatgacgtcctgcactgcgtcgcgttcgccgttcctaagtcaagcagtaacgaggaagtgatgtttctgactgtccaggtgaaaggccctactcaggaatttaagaaacgtaccaccgtgatggtcaaaaatgaggactccctggtttttgtacagactgacaaatctatctacaaacctggccagaccgtcaagtttagggtcgtgtccatggacgagaattttcaccccctaaacgaactgatacccctggtttacatccaatag

SEQ ID NO: 178746 - DNA, 4470 bp, synthetic construct
  misc_feature 1..4470: note = Description of Artificial Sequence: Synthetic coding sequence
  source 1..4470: mol_type = other DNA
cgggtgcagtacgtgtgcagcccccccgcccccagcttctgcaacatgggcaagaataagctattgcacccatcactggtgcttttactgcttgtgcttttgcctactgacgcaagcgtctccggaaaaccccagtatatggttctggttccttcattgctgcatacagaaacaacagagaaggggtgcgtgctgctgtcatatctgaacgagacggtgacggtgagcgcttctctagagtcagtgagaggcaataggagcttgttcacagatcttgaagccgagaatgacgtactacactgtgtggcattcgctgtgccaaaatcttcttcaaatgaggaggtgatgtttctgactgtgcaagttaaaggcccaacgcaggaattcaagaaaagaacaactgtgatggttaagaacgaggacagcctggtttttgttcaaacagacaagagcatctataagccgggacaaaccgtcaaatttcgcgttgtatcaatggacgagaactttcaccccctcaatgaactgatccctctagtgtatatccaagaccctaaggggaatcgaattgcccagtggcagagctttcaactggaaggaggtctgaagcagttttccttccccctgagctctgagcctttccagggtagctacaaagttgtcgtgcagaagaaaagcgggggtagaaccgagcacccattcaccgtcgaggaatttgtcctacctaaattcgaagtccaggtgaccgtgcccaagataattactatcttggaggaagagatgaatgtcagtgtgtgtggactatatacatatggtaagcccgttcccggacacgttactgtatctatctgcaggaaatattctgacgcgtctgactgccacggcgaggattcccaagccttctgtgagaagtttagtggccaactgaacagccacggatgtttttaccagcaggtaaagactaaggtttttcagctgaaacgcaaagaatatgaaatgaaactccacacagaagctcagatccaggaggagggcacggttgtagagttgacgggtcggcagagttccgagattacgagaacaataactaagctgtctttcgtgaaggtcgattcacattttaggcaggggatacctttttttggtcaggtgaggctcgtcgatggaaaaggggtgcctattcctaataaggtaatctttatcagaggaaatgaagccaattattacagtaatgctaccactgatgagcatggccttgtgcagttttctatcaacaccacgaacgttatgggaacctccttaaccgtgcgggtgaactataaggaccgttccccctgctacggttaccagtgggtctccgaagagcacgaagaggcgcaccacactgcatacttagtgttttccccatccaagtcatttgtccatctggaacccatgagccatgaacttccctgcggccatactcaaactgtacaggcgcattatattctgaacgggggaaccctgctgggcttgaaaaagttatcgttctactatcttattatggctaaagggggtattgtcagaactgggacgcatgggctgctggtcaaacaggaggatatgaagggacacttttccatcagtattccagtaaagtccgatatcgcccccgtggcccgcttactcatttatgccgtcttacccactggcgatgtgatcggggattccgccaagtatgatgtcgaaaactgtcttgcaaataaggtggacctgagctttagcccctcccagtctctaccggcttctcatgcccacctgcgtgtgaccgcagcgcctcaatctgtttgcgctctgagggcagttgatcagagcgttctgctcatgaagccagacgctgagctgagcgcctcaagtgtttataatctcctccccgaaaaggatctcacgggctttcctggtcctttgaacgatcaggacaatgaagactgcattaaccggcacaatgtttatattaacggcatcacctatactcctgtctcttccacgaacgaaaaagacatgtattcctttctcgaagacatgggtctgaaggccttcacaaactctaaaatcagaaaacccaagatgtgcccccagcttcagcagtacgaaatgcatgggcccgaaggccttagggttggattctacgagagtgatgtgatgggacgaggtcatgccagactcgtgcacgtcgaggagccgcacactgagactgtgcggaaatacttcccggagacctggatctgggacctggtggtggtgaatagtgcaggcgtagctgaagtcggcgtgacggttcctgatacgatcactgaatggaaggccggagccttctgcctcagcgaagatgcaggccttggtatctcttcaactgcaagtctcagagctttccagcccttttttgttgagctgaccatgccatatagcgtcatcagaggggaagccttcactctgaaggcgacggtgctgaactacttaccaaagtgcattcgggtctctgtccagctggaagccagcccagctttcctggccgtccctgtggagaaagaacaggcacctcattgtatctgcgcaaacggtaggcagacggtctcttgggctgtgaccccgaagagtctcggcaatgtcaacttcacagtgagtgctgaggctcttgagagccaggaactgtgcggtactgaggtgccctctgtccctgagcatggtcggaaagacactgttatcaaacccctgctagttgagcctgaaggcctagagaaggagaccacatttaactctcttctgtgtccctccggtggggaagtttcagaggagctgtccctgaaactgccaccaaatgtggtcgaggagtccgctcgcgcaagcgtgtcagtgttgggtgacatcctgggctctgctatgcagaacacccaaaatttgctccagatgccgtacgggtgcggtgaacagaacatggttcttttcgccccaaacatttatgtcctcgattatctgaatgaaacccaacagcttacacctgaaataaagtctaaagccattgggtatcttaacacaggctatcagcgacagctaaattacaaacactatgatgggtcctattcaaccttcggcgagaggtacggcaggaaccaggggaacacctggttaacagcattcgtgctcaaaacattcgcacaggcaagggcttatatttttatcgacgaagcccatatcacccaggccctgatttggctgtctcagagacagaaagataacggctgcttccgtagtagcgggtccctcctcaacaacgctattaagggaggtgtagaagacgaagtgaccctcagcgcgtacataactattgctttactggagatccccttgactgtgacacatccagtggtgaggaacgccctgttttgcctggagtcagcttggaaaaccgcccaggaaggcgatcatgggagccatgtgtacaccaaggccctcctagcgtacgcttttgcgctggctggaaaccaagacaagaggaaggaggtgttgaagagcctgaacgaggaggccgtaaaaaaagataactccgtacactgggaacgtccacagaaacccaaagctcccgtagggcacttttacgagccacaagcacccagtgcagaggtggagatgacgtcatacgtgttgctggcgtatctgaccgcgcagcccgcaccaacgagtgaggatttgacaagcgcaacaaacatcgtaaaatggatcactaaacaacaaaatgctcagggtggattttcatctacacaagatactgtggtcgctctgcatgcactctctaagtacggtgcggccaccttcacaaggactgggaaggctgcccaagtaactatccaatccagtgggacattttcctctaagttccaagtcgacaataataatcggttgctgttacagcaggtgagcctccccgagcttccgggcgaatactcaatgaaagtgacgggtgaaggatgcgtgtacctccagacaagccttaaatacaacatcctgccagaaaaagaagagttccctttcgccctgggcgtgcaaaccctccctcaaacctgtgacgagcctaaagcgcacacgagcttccagatctctctgtcagtatcatatacgggatcacgatcagcatccaatatggcaatcgttgacgtgaaaatggtgagcggattcatccccctaaagccaactgtcaaaatgcttgaaaggagtaaccacgtgagccggacagaagtcagttctaatcacgtgctgatatacctggacaaggtctctaatcagaccttatccctgtttttcaccgtgcttcaggacgttcctgtccgcgatctcaagcccgctattgtcaaggtatatgattactacgaaaccgacgaattcgcgattgcagaatacaacgcaccatgttccaaagacctgggaaacgcgtag

SEQ ID NO: 178747 - DNA, 4365 bp, synthetic construct
  misc_feature 1..4365: note = Description of Artificial Sequence: Synthetic coding sequence
  source 1..4365: mol_type = other DNA
atgtgggcccagctgctgctgggcatgctggccctgagccccgccatcgctgaggagcttcccaactatctggtcacactgccggcgagattgaattttcccagcgtgcaaaaggtttgtctggacttatcaccaggttattccgatgtgaaatttaccgtgaccctagaaacaaaagacaagacacagaaattgctagagtacagtggcttaaagaagcgacatctgcactgcattagctttctggtgcctcctccagctgggggaaccgaagaggtggcaactattagagtgtccggggtgggaaataatatatcgttcgaggaaaaaaagaaggtgcttatccaacgtcagggaaatggcacctttgttcagaccgacaaacccttgtatactcccggtcagcaggtatattttaggatagttaccatggactctaattttgttccagtcaatgacaaatatagtatggttgaactccaagatccgaactccaatagaattgcccaatggctggaggtggtgcctgagcagggcatcgttgacctgagctttcaactggccccagaagccatgctggggacgtataccgtcgctgtagccgagggcaaaactttcggcactttttcagtggaagagtacgtgctgcctaagttcaaggtcgaggtcgtcgagcccaaagaactgagcaccgtgcaggagtcttttctggtgaagatctgttgccggtacacttacggcaaaccaatgctgggcgctgtgcaagtaagtgtgtgtcagaaggccaatacctactggtatcgggaggtagagagagaacagctgcctgataaatgcagaaatctcagcggtcaaaccgacaaaaccggctgtttctccgcgcctgtggacatggctaccttcgatctgatcgggtatgcttattctcatcagattaatatcgtggcaactgtcgtggaagagggtacaggcgtggaggcaaatgcgacccagaacatatatattagccctcaaatgggaagtatgacctttgaggacacaagcaatttctatcaccctaattttcccttcagtggcaagatcagagtccgggggcatgacgacagttttttgaagaaccatctcgtattcttggtgatttacggtaccaatggcacctttaatcagaccttagtcacggacaataatgggttggccccattcaccttggaaaccagcggctggaatggcactgacgtctccctcgaaggaaagtttcaaatggaggatcttgtatataatccagagcaggtccccagatactatcaaaatgcttaccttcacctgcgtcctttttattctacgactcggtcttttctgggcattcaccggcttaatgggccgctcaagtgtggccagcctcaggaggttctggttgactactatatcgaccccgcagacgcctcccctgatcaggagattagcttttcatactatctaatcggaaaggggagtcttgtgatggaaggacagaagcatttaaacagtaagaaaaagggcctcaaggctagtttttccctctccctgacatttactagccgacttgcgcccgacccatctctcgttatctatgccattttcccttcaggtggagttgtggctgacaagattcagttctctgtcgagatgtgctttgacaatcaggtgagcctgggcttctctccaagtcagcaattaccgggcgcagaagtagaactgcagctgcaagctgcccccggctccttgtgcgccctgagagctgtggatgaatccgtgcttttactgcgtcctgaccgggagctctccaacagatcagtctatggaatgtttcccttctggtacgggcactacccctaccaggtcgccgagtacgaccagtgccctgtgagcggcccgtgggactttccccagccgctcatagaccccatgccgcaaggccactctagtcagcgaagtattatctggcgtcctagtttttctgagggcaccgatctatttagcttcttcagggatgtgggtctcaagattctcagcaatgctaaaataaagaaacctgtcgactgttctcacaggtcccctgagtactctacagccatgggcgccggcggtggccatcccgaggccttcgaatcctctacccctctgcaccaggcggaagacagccaagtgcgccaatatttcccagagacctggttgtgggaccttttccctatcggaaactcaggtaaagaggcagtgcatgtaacagttcctgatgctattacagaatggaaggccatgtccttctgcacctcccagtctcgtggattcggcttaagccccacggtaggactgacagcttttaagcccttcttcgtggatctcacattgccttattctgtggtgcggggagagtcattccggctgacagccaccatcttcaactatctcaaggattgcattcgcgtgcagaccgacctggccaagtctcacgagtaccaattggaatcatgggcggacagtcagaccagttcctgcctgtgtgcggatgatgctaaaacacaccactggaacattactgctgtcaagctgggacatatcaactttacaatttctactaagatactagacagcaatgagccatgtggtggccagaagggattcgtccctcagaaggggcggtcagatacactgattaagcctgtgttagtgaagcccgagggggtcctggtggagaaaacgcactcaagcttattgtgtcccaaagggaaagtggcctctgaatccgtttccctggagttaccggtcgatatcgtaccagactctaccaaagcttatgttaccgttctcggggatataatggggacagcattgcagaacctagacgggctcgttcaaatgccgtccggttgtggcgagcagaatatggtgctatttgcaccaattatatatgtgttacagtacctagaaaaggctggattactcacagaagagatccggtcgagagccgtgggcttcctggagatcggctatcagaaagagctgatgtacaaacattctaacgggagttactcggctttcggcgagcgggatgggaatggcaatacttggctgacggcttttgtgactaaatgtttcggacaggcccagaagttcatcttcatcgatcccaaaaacatccaagatgccctaaaatggatggccggtaatcaactgccaagcggctgttatgcaaacgtgggcaaccttctccacacagcaatgaagggtggagtggacgacgaggtgtccttaacggcttacgtcactgcagctctgttggaaatgggcaaagacgtggacgaccctatggtctcacaagggttacggtgtttgaagaattccgctacctcgacaactaacctgtatacccaggctttacttgcatacattttctcgctcgctggcgagatggacattaggaacattctgcttaagcagctcgatcagcaggctatcattagtggagaatctatttattggagccaaaagccaacgccatcctccaatgcatccccttggagcgaacccgcagctgtagacgtggagctcacagcatatgccctcctggctcagctcactaaaccctctctcacacagaaggaaattgccaaagccacttctattgtagcctggcttgctaaacagcacaatgcgtatggcggattcagcagcacacaggacactgttgtggcccttcaagccctggctaagtacgcgaccactgcatacatgccatctgaggagattaaccttgtggtgaagagtactgaaaattttcagcgcacgttcaatatccaatcagtgaatcgattagttttccagcaggatacgctgccaaacgtgcccggtatgtacacactggaagcctcgggccaaggttgcgtctatgtgcagacagttctcaggtacaacatcctccctccaaccaacatgaaaaccttctcactgagcgtcgagattgggaaggcacgttgtgagcagcccacatccccacgctctctcacgctaactatccacacctcatacgtggggagcagatcctcttccaatatggcaattgtggaggtcaagatgctcagcggcttctcgccgatggagggaacaaatcagctcctgctgcaacaacctttggtaaagaaagttgaatttggcacagacacactcaacatctacctggatgagctgattaagaatactcagacctatacgtttacaataagtcagagtgtactagtgactaacctgaagccagcgaccataaaagtctacgattattatctgccagacgaacaggcaaccatacaatactcagacccatgcgagtag

SEQ ID NO: 178748 - DNA, 4365 bp, synthetic construct
  misc_feature 1..4365: note = Description of Artificial Sequence: Synthetic coding sequence
  source 1..4365: mol_type = other DNA
atgtgggcccagctgctgctgggcatgctggccctgagccccgccatcgccgaggagctgcctaactatcttgttacactgcccgccaggctcaactttccctcagttcagaaggtctgcctggatctgtctccggggtatagtgacgtcaaatttactgtcacccttgagactaaggacaagacgcagaaattgctcgagtatagcggactgaagaaaagacaccttcattgtatctcctttctcgtaccaccccccgccggcggaaccgaggaggtggctactattagagtgtcaggtgttggcaacaacatttccttcgaggaaaagaaaaaggtgcttatccagaggcaggggaatgggacgttcgtgcagacggataagcctctttacactccaggtcaacaggtgtatttccgaatcgtgactatggatagtaatttcgtgccagtcaacgacaaggtctcctgggaagaaggtcaggatccaaattctaaccgtattgcccaatggctcgaagtagttccagagcagggaatcgtcgatctgtcatttcagctcgcgcctgaagccatgctggggacctacaccgtcgctgtcgccgaaggaaagacgttcggcaccttttccgtagaagaatacgtgttacccaagttcaaggtggaggtggtggagccaaaagagttgagtactgtgcaagaatcatttctcgttaaaatctgttgtcgttacacctacggcaaacctatgctgggcgctgtgcaagtgagtgtgtgtcaaaaggccaacacctactggtacagagaggtagagagagaacagcttcctgacaaatgtaggaacctgtccggacaaactgataaaacgggctgcttttcagccccagtcgacatggcgacctttgatctgatagggtatgcttacagccatcagataaacatagtggcgacagttgttgaagagggcaccggagtagaagccaacgccactcagaacatctatatctcccctcagatgggctccatgacttttgaagacacctccaatttctatcaccccaacttcccattcagcggcaagataagggtcagaggacatgatgacagcttccttaagaatcacctggtctttctcgttatttatggtaccaatggcacatttaatcagacccttgtgacagataataatggcctggccccctttaccctggagaccagtggatggaacggtacagatgtgagtctcgaaggaaagtttcagatggaggatctagtttataaccccgagcaggtgccccggtactatcagaacgcctatctacatctcaggcctttctattccacaacccgctcgttcctagggatccatcgcctgaatggtccactgaagtgtggtcagccccaggaagtgctggttgattattacatcgaccccgcagatgctagccccgatcaggaaatctcattcagctattatctcatcgggaagggctcgttggtaatggagggacagaaacacttgaactctaagaagaagggtcttaaagcaagcttctctctctctcttacattcaccagcagactagcccccgacccttcactggttatctacgcaatcttcccttccgggggtgttgtggcagacaaaattcagtttagcgtggaaatgtgtttcgataaccaggtctccctcggattcagccctagccagcagttgcctggtgctgaggtcgaacttcagttgcaggccgccccaggctctctgtgcgctttacgcgcagttgacgagagcgtgctcttgttgcgacccgatcgcgaactgtccaaccggtcagtttatggtatgttcccgttctggtacgggcactatccataccaggtcgccgaatatgaccagtgcccggttagcggaccgtgggacttcccccaaccacttatcgacccaatgccacaaggacactcctctcagcgcagtattatatggagaccttcattctctgaaggaacagatctgtttagtttcttcagggatgtgggccttaagattcttagcaatgcaaagataaagaaaccagtggattgctctcaccgctcccctgagtattcaacagctatgggcgccggcggcggccacccagaggcctttgagagctccaccccattgcaccaggcagaagattcccaggtgcgccagtatttccccgagacatggctgtgggatttgttcccaatcggtaacagtggaaaggaagctgtccacgtgaccgtccctgacgccatcaccgagtggaaagcgatgagtttctgtacctctcaatccagggggtttggcctctctcccaccgtgggactcaccgccttcaagcctttctttgttgatctcaccctgccctattctgttgttaggggagaatcctttagactaacagccactatctttaactacctgaaagactgcattagggttcagaccgatctggccaaaagccacgagtatcagctggaatcatgggccgactcccagactagttcatgcttatgcgccgatgacgccaaaacacatcattggaatattacagccgtcaagctgggacacatcaatttcacgatttcgacaaaaatattagatagcaatgagccctgcggcggtcagaagggcttcgtaccccaaaaaggacggagcgacacactcattaagcctgttttggtcaaaccggaaggcgtgctggttgagaagacacacagctctctgctgtgtcctaaagggaaggtcgctagcgagagcgtctctcttgaacttcccgtggacatcgtccctgatagcaccaaagcctacgtgaccgttctcggggatataatggggacagctctacaaaacctggatggcttggtgcagatgcccagcggttgcggcgaacagaatatggtgctgttcgcccctattatctacgtcctgcagtatctggagaaggccggcttgcttacagaagagataagaagtcgggcagttggctttctggagatcggctaccagaaggaacttatgtacaaacactccaacgggagttactccgcttttggtgagcgagatgggaatggaaacacttggcttacggcattcgtgacaaagtgctttggacaagcacaaaagttcatcttcattgatcccaagaatatccaggatgccctgaaatggatggccgggaatcagttaccgtctgggtgctacgcaaatgttgggaacctactgcataccgccatgaagggtggagtcgacgacgaggtgagcctcaccgcatacgttacagccgcactgttagaaatgggcaaagatgtcgacgacccaatggttagtcagggtttgaggtgcctcaagaatagcgcaacctcgactaccaatctctatacacaggcgctgctggcttatatttttagcctggcaggagaaatggacatccggaacatacttctgaagcaactggatcagcaggccatcatttcaggcgaatcgatctattggtctcagaagccaacaccctctagtaacgccagcccttggagcgagcctgctgccgtcgatgtcgaattgactgcctacgcccttttggcccagctgaccaagccatcactgactcaaaaggagatagcaaaggctacaagtatcgtagcatggctggctaaacagcacaacgcatacggggggttttccagtacacaggataccgtcgtggcccttcaggcattggccaaatacgcgacaaccgcgtacatgccaagtgaggagattaatcttgtcgtcaagtcaactgaaaacttccagagaacgttcaatattcagagtgtcaataggctggttttccaacaagacacacttcctaatgttcctgggatgtacaccttggaggcctctgggcagggttgtgtatacgtccaaactgtcttgagatataatattttaccgcccactaacatgaagactttttcactgagcgtagagataggcaaggccagatgtgaacagccaacaagcccccgaagcctgacccttaccatacacactagctatgtcggcagcagatcatcttctaacatggccattgtcgaggttaagatgctgagcggcttcagccccatggaaggcaccaaccaactcctgctgcaacagcctcttgtgaagaaagtggagtttggaacggacaccctgaatatttatctcgatgagctcattaagaacacccagacttacacctttacaatctctcaaagcgtcctggtgaccaatctaaaaccggccactatcaaggtctacgattattacttaccggacgagcaagcaacaattcagtactcagacccctgtgagtag

SEQ ID NO: 178749 - DNA, 3015 bp, synthetic construct
  misc_feature 1..3015: note = Description of Artificial Sequence: Synthetic coding sequence
  source 1..3015: mol_type = other DNA
agcttcctgggcatccaccggctgaacggccccctgaagtgcggccagccacaagaggtgttagtagattactacatcgatcctgccgacgctagccctgaccaagaaataagcttcagctactacctgattggtaagggtagtcttgtgatggaaggccagaagcacctgaatagcaaaaagaaagggctgaaggcgtcatttagcctgtcattaacatttacctcgcggctggcgccagatcccagccttgtgatctacgccatctttccaagtggtggtgtggtcgctgataagattcagttttcggttgagatgtgttttgataaccaggtatctctgggcttttctccttcccagcagctccccggagccgaggtcgaactacagttgcaggccgcgcccgggtccctctgcgctctgagggccgttgacgaaagtgtcctgctgctccgcccagacagggaactcagcaacaggtcagtttacgggatgtttccattttggtacggacattacccataccaggtcgctgagtatgaccagtgtccagtctctggcccttgggactttccccagcctttaattgatccaatgcctcagggacactcctcacagagaagcatcatttggaggccttccttcagcgaaggaacagatttgtttagcttcttcagagatgtggggctgaaaatactcagcaatgccaagatcaagaaaccagtcgactgcagtcatagatcaccagagtattcaacagctatgggagccgggggtggtcatcctgaggcatttgagagcagtactcctctccaccaagccgaggattcacaggttcggcaatatttccccgaaacttggctctgggacctgttccccattgggaattcggggaaggaggcggtgcatgtgactgtgcctgatgcgattaccgaatggaaggcaatgtccttctgtacctcccagagcagaggctttggactctcacctaccgtaggcttgactgccttcaagccctttttcgtcgacctgactctcccatattccgtcgtccgtggagagtcatttcggctgaccgcaacaatttttaattacctaaaggattgcatcagagtgcagactgacttagctaaaagccacgagtaccagttggagtcctgggcagactcgcagacttccagctgcctgtgtgcggacgatgcaaagacacatcattggaatatcaccgcagttaaactcggacacataaacttcacaatctctactaagattctcgacagcaatgagccgtgtggtggacagaaaggctttgttccacaaaaaggccggtccgatactctcattaagcccgtcttggtcaaacctgaaggagtcctggtagagaagacacacagcagcctgctctgtcccaagggaaaggtggcgtcagagtccgtgtctttagaactccccgtggatattgttccagattctaccaaagcctacgtcactgtactgggcgatatcatgggcacagcacttcagaatctggatggcctcgttcagatgcctagcggctgtggtgaacagaatatggttctgttcgccccaattatctatgtcctgcagtatttggaaaaggctggactcctcaccgaagaaatccgctctcgagcggttggatttctcgagataggataccagaaagagctcatgtataaacattctaacggatcctactctgccttcggtgaaagggacggcaatggtaacacctggctgacagctttcgtgaccaaatgcttcggacaggcgcagaaattcatcttcatcgaccccaagaacattcaggacgcgctgaagtggatggcaggaaatcagctgccctcaggctgttacgccaatgtcgggaacctcctgcacacagccatgaaggggggagttgatgacgaggtgagtctgaccgcctacgtgacggcagcccttctggagatggggaaagacgtcgacgaccccatggtgagccagggcctgcgctgccttaaaaatagtgctacatccactacaaacctgtacacgcaagccctcctagcctacattttctctctggccggagaaatggatatacgaaatatcctcctgaaacaacttgatcaacaggccatcatctctggcgagtctatatactggtctcagaagccaacaccatcctctaatgcaagcccctggtcagagcctgcagctgtggatgtcgaactgacggcctacgcactactggcacagctgacaaagccaagcttgacacaaaaagagatagcaaaggcgactagtatcgtcgcttggttagccaagcagcataacgcgtacggtggtttcagctccactcaggacaccgtggtggcattgcaggccctggctaaatacgcaaccacagcttacatgccttcggaggaaatcaatctcgttgtgaagtcaaccgagaactttcagaggaccttcaacattcaaagcgtgaacaggcttgtctttcagcaggacaccttaccaaacgtccctgggatgtatacactggaagccagtgggcaggggtgtgtgtatgttcaaacagttctgcgatacaacattttacctccaacaaatatgaaaaccttcagtctgtcagtggagattggcaaggcaagatgcgagcaacctacttctcccagatcactcaccctgactatccacaccagctatgtgggctcccgctcttcttctaatatggccatcgtagaagtcaaaatgttgagtggcttcagccctatggagggaaccaaccagttgttactccagcagcccctggtgaagaaggtggagtttgggaccgataccttaaatatctacctggatgagctcattaagaacacacaaacctataccttcactatatcccaaagcgtgctagtaacaaacctgaagcctgctaccatcaaagtctacgactattaccttccagatgaacaggcaacaattcagtattcggacccttgcgaatag

SEQ ID NO: 178750 - DNA, 1830 bp, synthetic construct
  misc_feature 1..1830: note = Description of Artificial Sequence: Synthetic coding sequence
  source 1..1830: mol_type = other DNA
atgaagtgggtggagagcatcttcctgatcttcctgctgaacttcaccgaatctcgcacgctccatagaaacgaatacggtatcgcatccatcttggactcctaccagtgtaccgccgagatcagtctcgcagatctcgctaccatcttctttgcgcaattcgtgcaagaagcaacatataaggaagtaagcaaaatggtgaaggatgctctgacagccatcgaaaagcctactggcgacgaacagagtagtggttgtctggagaaccagcttcctgccttcttggaagagttgtgtcatgagaaagaaattctggaaaagtacggccattcagactgttgctcccagtctgaggagggccggcacaactgtttcctggcgcataagaagcctacccctgcttccataccactctttcaggtcccagagccagttacttcatgtgaggcctatgaagaagatcgcgagacatttatgaataagtttatctacgaaatcgcacgacggcatccctttctttatgcgccaactattctgctctgggccgcacgatatgataagattatcccgagctgttgtaaggcagagaatgcagtggagtgctttcagaccaaggcagcaaccgtcactaaagaactgagagagtccagcttactgaaccagcacgcctgcgccgtgatgaagaatttcggaacaagaacattccaggccatcaccgttactaaattgagccagaaattcactaaggtcaatttcaccgaaattcagaaactggtgctcgatgtcgctcacgtccacgagcattgctgtaggggcgacgtgctggattgcctgcaagatggagaaaaaatcatgtcctatatttgtagtcagcaggacaccttgtcaaacaagatcacagagtgctgtaagctgacaactctggagcgaggccagtgcatcatccatgccgaaaacgatgagaagccagaaggactgagtccgaatctgaaccgttttttaggtgacagagactttaaccagttttccagcggcgagaagaatatctttctggcctctttcgtgcatgaatatagccggcgccacccccagctggcagtgtccgtcatactgcgcgttgccaagggctaccaggagctgctggaaaagtgcttccagactgagaaccccctggagtgccaggacaaaggtgaagaggaactgcagaagtatatccaagagagccaggctctggccaagagatcctgtgggctgtttcagaagttgggcgagtattaccttcaaaatgcatttcttgtagcatacacgaagaaagccccccaactgacgagctctgagctgatggccatcacgaggaaaatggccgcaactgcggctacatgttgtcagcttagcgaagataaacttctggcgtgcggcgagggcgctgccgacataattattggacatctctgtataagacacgagatgactccggttaaccctggagtgggacagtgctgcacgtcaagctacgccaaccggagaccctgtttcagctctttagtcgtcgacgagacttacgttccaccagctttcagcgacgacaagttcattttccataaagacctgtgccaagcgcaaggagttgccctgcagacgatgaaacaggagtttctgattaacctagtgaaacagaagcctcagatcaccgaagaacagctggaggccgtcatagctgatttctcaggtctcctggagaagtgttgccaggggcaagagcaggaagtctgctttgctgaagaaggtcagaagctgatatcgaaaacacgcgccgctctgggtgtttag

SEQ ID NO: 178751 - DNA, 3735 bp, synthetic construct
  misc_feature 1..3735: note = Description of Artificial Sequence: Synthetic coding sequence
  source 1..3735: mol_type = other DNA
atgaacaaccagaaggtggtggccgtgctgctgcaggagtgcaagcaggtcctggatcagctgctacttgaagcccccgacgtcagcgaagaagacaagtctgaagaccagcggtgtcgagccctcctcccctcggagctcaggacgctcatccaagaggccaaagaaatgaaatggccattcgtgcctgagaaatggcagtataagcaggcggtgggtcctgaagataagacaaacttgaaggacgtgatcggggccggcctacaacagcttctcgcctccctgagggcttctattctggcacgggactgcgcagcagctgcggcaatagtatttctagtcgatcgctttttgtacggactggacgtatcaggcaaactgttgcaggtggctaaagggcttcacaagctccagcccgctactcccatcgcacctcaagtggtgatccggcaggcaagaatcagcgtcaactcgggcaaacttctcaaggctgagtatatactttcaagtttaatctcaaataacggcgcgacagggacctggctctacagaaacgagtccgacaaggtgctcgtgcaaagtgtgtgcattcagatcaggggacaaatactccaaaagctcggcatgtggtacgaggcagccgagttaatttgggcctctatagtagggtatctagcgctgcctcagcctgataagaagggactgtctaccagtcttggaatcctggcagatatctttgttagcatgagcaagaatgattacgagaagttcaaaaacaatccccagattaatctttctctgctcaaggaatttgatcaccacctgctctccgccgcagaagcctgcaagctggccgcagcctttagcgcctacaccccattgtttgtgctgaccgccgtcaatatccggggaacttgcctcttgagctattcttccagtaatgactgccctcccgagttaaagaatctccatttatgcgaggctaaggaagcattcgagataggcctgctcacaaaacgtgatgatgagccagtgacaggaaaacaggagctgcactcctttgtaaaggccgcctttggcttgacaacagtacacaggagattacacggcgagacaggaacagtgcatgccgcgagccaactgtgcaaggaggccatgggaaaactatacaatttttctacttctagccgatcgcaagacagggaggcgctgagccaggaagttatgagcgttattgctcaagtcaaggagcatctgcaggtccagtctttctcaaatgtggacgatagatcttacgttccagagtcattcgaatgcaggctggataaactgatcctccacgggcaaggcgatttccagaagattctggatacgtactcccagcaccatacttcagtctgtgaggtattcgagtccgactgtggtaacaataagaatgagcagaaagacgcaaaaactggggtttgtattaccgcgctgaagactgaaattaaaaacatcgacaccgtctctacaacgcaggaaaagcctcattgccagcgtgatacaggcatctcatccagtttgatgggaaagaacgtccagcgtgagctgagacgcgggggaaggagaaactggacacattccgacgcttttagagtgagcctggatcaagacgtcgagaccgagacggagccgtctgactactccaatggcgaaggagctgtgttcaataaatctctgagtggttcacagacaagctccgcctggtccaacctgagtggcttctctagttccgcctcttgggaggaggtgaactaccacgtggatgacagatcagcgcggaaggagcccgggaaggaacatctcgtggacacccagtgtagcacggccctgtctgaggagttggaaaacgaccgcgagggcagggccatgcatagcctgcactcacagttgcatgacctgtcgctgcaggaacctaacaacgataacctggaaccctctcagaaccagccacagcagcagatgcccctgactccgttttctccccacaatacgccaggcattttcctagctcctggtgctggactgctcgaaggggctcccgagggtattcaggaggtccgaaacatgggacctaggaacacctccgcacacagcagacctagctaccggtcagctagctggtcatccgatagtggccggcctaagaacatggggacccacccttccgttcagaaggaagaagcttttgagattatcgtcgaattccccgagacaaactgcgatgtaaaagaccggcaagggaaagagcagggcgaagaaatatcagagaggggggctggcccaacatttaaagcctctccttcttgggtcgatccagaaggcgaaaccgcagaatctacagaggatgcacccctagatttccacagggtgttgcataattccttgggaaatatctctatgctgccatgttcttcctttaccccaaattggcctgttcaaaaccctgactctaggaaaagcggcggccccgtggctgagcaggggattgatcccgacgcatctaccgtggatgaggaggggcagctccttgatagtatggacgtgccgtgcacgaacgggcatggatcccacagactgtgtatcctccgacaacctccaggtcagagagccgagacgccaaattcatccgtctcaggcaacattctgtttcctgtcctgagcgaggactgcaccactaccgaggaaggaaatcagcctggcaacatgctgaactgctcgcaaaacagtagctcctccagtgtctggtggctgaagtcacccgcattcagcagtgggagttcagagggagattcgccttggtcatatttgaatagcagtgggtcgtcttgggtttccttacctggaaagatgaggaaggagattcttgaagccaggacccttcagccagatgacttcgaaaagctgctcgccggggtgcgccacgattggctgttccaacgactggaaaatacgggcgtttttaagcccagccagctccatagagcccattcggcactactgctgaagtattctaaaaagtccgaactgtggactgcccaggaaactatcgtatacctaggagattacttgaccgtcaaaaaaaaaggcaggcaaagaaacgcattttgggtgcatcacctccatcaagaagagatcctgggtaggtatgtgggcaaggactacaaggagcaaaaggggctctggcatcacttcacagatgtggaaaggcagatgaccgcccaacattatgttacagaattcaacaagaggctctacgaacagaatatacctactcagatcttctacataccaagcacaatactgctgattctggaggacaaaaccattaaaggatgtatatccgtggagccgtatattcttggtgagttcgtgaagctgtccaacaatacgaaggttgtcaagaccgagtataaggctacggaatatgggctggcctacggacacttttcttacgagttttccaaccacagggatgtggttgtcgatctgcaggggtgggtaaccggcaatggtaaagggctgatctatctgactgatccccagatccactcagtggatcagaaagtgtttaccacgaatttcggcaaaaggggcatcttttactttttcaacaatcagcacgtggaatgtaacgagatttgtcataggttgtcattgactaggccctctatggaaaagccttgtacgtag

SEQ ID NO: 178752 - DNA, 429 bp, synthetic construct
  misc_feature 1..429: note = Description of Artificial Sequence: Synthetic coding sequence
  source 1..429: mol_type = other DNA
atgaacaaccagaaggtggtggccgtgctgctgcaggagtgcaaggcactgctccctagtgagctgcgtacgttgattcaggaggcgaaggagatgaaatggccatttgtacccgagaaatggcagtacaagcaagccgtcggtcccgaggacaagactaacctgaaagatgttataggagctgggcttcagcagctgctcgccagtttaagagcctctatcctcgctcgagactgcgcagctgcagcggcaattgtgtttttggttgatagattcctgtacgggttagacgtttccggaaagcttttacaggttgctaaaggattacataagttgcagccagcgacacctattgccccccaggtggtgattagacaggccagaattagcgtgaattcaggcagccaccctgcaaaacacagcatgtag

SEQ ID NO: 178753 - DNA, 3735 bp, synthetic construct
  misc_feature 1..3735: note = Description of Artificial Sequence: Synthetic coding sequence
  source 1..3735: mol_type = other DNA
atgaacaaccagaaggtggtggccgtgctgctgcaggagtgcaagcaagtcctggaccaactactgctagaggctcctgacgtttccgaagaggataagtccgaggatcagcggtgtcgggcactgctgccctccgagctgagaactctaatccaggaggcaaaagagatgaagtggccctttgtgccggaaaagtggcagtacaaacaggctgttgggcccgaggataagacaaatttgaaagacgtgataggcgctggccttcagcagctgctggcatctttgcgcgcatcgatcttagcaagggattgcgccgcagcggctgctattgtgttcttagtcgataggttcctgtacgggttagatgtgtctgggaaactgctgcaggttgccaaagggcttcacaaactccagcccgctactccaattgctccccaagttgtcatcaggcaggctagaatatcagtgaattcagggaaactgcttaaggctgaatacatcctgagcagcctgatttcaaataacggcgcgacaggaacttggctttaccgaaacgagtccgacaaggtacttgtccaaagcgtgtgtattcaaatccggggtcagatcctgcagaagctgggaatgtggtacgaggctgcagaattgatttgggcgtccatagtgggctatctggctttgccccagcccgacaagaaaggactgtcaactagtctcggcattcttgcagacattttcgtgtcaatgtcaaagaatgactatgagaaattcaaaaacaatccacagattaatctgtccctgctgaaagagtttgatcaccacctgctcagcgctgcagaagcttgcaagcttgcagccgcgtttagcgcttacacccctctgttcgtgctgacggccgtcaatattagaggcacgtgcctactttcctatagtagcagcaacgattgtcctccagaactgaaaaacttgcatctttgcgaagcaaaagaggcattcgaaattggactgcttacaaagcgggacgatgaacccgttacaggcaagcaagagctgcattccttcgtgaaagcagccttcggccttactacagtgcaccggcgcttacatggagagacagggactgtgcacgctgctagtcagctgtgtaaagaggcaatggggaagctgtacaatttctcaacaagttcccggtcccaggatagggaggccctaagccaggaggttatgtccgtgatcgcccaggttaaagaacacctccaagtccaatcctttagtaacgtcgacgaccgcagctatgtgccggaaagctttgagtgccggcttgacaagctcattctgcacggtcagggggattttcagaagatactggatacctactctcagcaccacacatctgtgtgtgaggtttttgagtccgactgcggaaacaacaagaatgagcagaaagatgctaagactggagtgtgtataactgccctcaaaactgagatcaaaaatattgacaccgtgagcacaacccaggaaaagcctcactgtcagagggataccgggatcagctcttcattaatgggaaaaaacgtacagcgggaactgagacggggaggacgccggaattggacacactctgatgctttccgagtgtctctcgaccaggatgtggaaacagagactgagcctagcgattacagcaatggagagggggctgtgttcaacaagtcactttccggttcgcaaacgtctagcgcatggtctaacctttccggcttcagtagctccgcatcttgggaggaggtgaattaccacgtcgatgatcggtctgccagaaaggagcctggtaaggagcatctggtcgatacccaatgctccaccgcgctgtctgaggaactggaaaacgatagggaagggcgtgccatgcattctctgcactcccagctgcacgatctctctttacaggaaccaaataatgataacctggagcccagccagaaccagcctcagcagcaaatgcccttgacacctttctcccctcataacacccccgggatctttcttgcacctggcgctggcctgctcgagggagcccctgagggaattcaggaagttcggaatatggggccacggaacactagcgcccacagcagaccatcgtaccggtccgcgtcatggtcgagtgattctggaagacccaagaacatggggacccacccctcggtccaaaaggaagaggcgttcgaaatcatagttgaattcccggaaactaattgtgacgtgaaggatcgccagggcaaagaacagggagaagagattagcgaacggggggctggccctacatttaaggcatcaccctcctgggtcgaccctgaaggcgaaactgccgaatctacagaagacgcaccccttgacttccacagagtgctgcacaactcgttgggaaatatctccatgctgccctgctcaagcttcacacccaattggccagttcagaaccctgactccaggaagagcggcggcccagtggccgaacagggaattgaccctgatgccagcacagtggacgaggaaggtcagctacttgatagtatggatgtaccttgcactaacgggcatgggagtcaccgtctctgcatcctgcgacaaccccctgggcagagagcagaaacacctaatagttctgtgagcggcaacatattatttcccgtactgagcgaggattgtactaccacagaggagggaaatcagcccggtaatatgctcaattgcagccagaattcatctagttcaagcgtgtggtggcttaaatctcctgctttctctagtggcagctccgagggagattctccatggtcttatttaaattcatcgggctcgagctgggtctccctccccgggaaaatgagaaaggagattctagaagcccggaccctgcagcctgacgattttgaaaaactcctggccggagtgcggcacgactggctgtttcagcgcctggagaacacaggcgttttcaagccttctcagctacatcgcgctcattcagcactgcttctcaagtacagcaaaaagtctgaactatggactgcccaggagactatcgtatatctgggcgattatcttaccgtgaagaagaagggtaggcagcgcaatgccttttgggtccatcaccttcaccaggaagagattcttggacgctacgtgggtaaagattataaagaacaaaaggggttgtggcaccatttcacagacgttgaacgacagatgacagcccagcattacgtgacagagttcaacaaaagactgtatgagcagaacatcccaacccaaatcttctacatcccctccaccatcttgcttatcctggaagacaagactattaagggctgtattagcgtggaaccatacatcctaggagaatttgtgaaactgtccaataacaccaaggtcgttaagaccgaatataaggcaacggaatatggactggcttatggccatttctcctacgaattctcaaatcatcgggacgtcgtggtggacctccaggggtgggtcaccggtaatggaaagggcttaatttatctgaccgacccccagatccattctgtggatcagaaggttttcactacaaatttcggtaaaagaggcatcttttactttttcaacaaccagcacgttgagtgtaatgaaatttgtcacaggctgtcactgacccggccttcaatggaaaaaccctgcacttag

SEQ ID NO: 178754 - DNA, 3501 bp, synthetic construct
  misc_feature 1..3501: note = Description of Artificial Sequence: Synthetic coding sequence
  source 1..3501: mol_type = other DNA
atgtgccggaagcggacccgggcccggaccagcgccgccgaggcctcccttagggcatctatcttggctcgtgactgcgcggctgccgcagcgattgtgttcctcgtggataggtttctctatgggctggatgtgagtggaaagttactccaggtcgcaaaaggcctacataaactgcagccagcaactccaatagctcctcaggtcgtaattagacaggccaggatctcagtgaactcaggtaaactgctcaaagccgagtacattctttcctctcttatatctaacaatggcgcaaccggtacatggctgtaccgcaacgaaagcgataaggtgctggtccaatccgtttgtattcagattagaggacaaatactacagaaattggggatgtggtatgaagccgccgagctaatatgggcgagtattgtgggctatttggctctccctcagcctgacaaaaaggggctctcgacttcattgggcatcctggccgatattttcgtgagcatgtctaagaacgactatgagaaattcaagaacaacccccagattaatcttagcctcctgaaagagttcgaccaccatctgctgtctgccgcagaagcttgcaaacttgccgccgcctttagcgcttatactccactctttgtgctcaccgccgtaaacattagaggaacatgcctgctatcctattcctcttccaatgactgcccacctgagttaaagaacctccacctctgtgaagctaaagaggcattcgaaatagggctgctgactaagagagatgacgagcctgttaccggcaaacaggagttgcactctttcgtgaaggctgcatttgggcttaccaccgtgcaccggaggctgcacggtgagaccgggacggtgcacgccgcttctcagctgtgcaaagaggctatgggaaagctgtacaatttctccacctcctcaagatcccaggacagagaggccctgagccaggaagtcatgtccgttatcgctcaggtgaaagagcaccttcaggtccagtcattttccaatgtggacgataggtcttacgtacctgagtctttcgaatgtaggctggataagctgattttgcacggccagggcgatttccaaaagatacttgacacctactcccaacatcacaccagtgtttgtgaggtttttgagtctgattgcgggaataacaagaatgaacaaaaggacgccaagacaggtgtttgcataacagcccttaagacagaaatcaagaatattgacaccgttagcacaacacaggaaaagccccattgccagagggataccggcatctcaagttctctaatggggaagaacgtgcagcgcgagctgcgaaggggcgggaggcgcaactggacccattctgacgcatttcgagtcagcctggatcaggatgtcgaaactgagactgagccatcggattacagcaacggagagggagcagttttcaataaatcccttagcgggagtcagacgtcaagtgcttggtctaacctttctggcttcagcagttcagcaagctgggaggaggtgaattaccatgtcgatgaccgtagcgcccgcaaggaaccgggaaaggagcatctggttgacacccagtgcagtactgcgctttctgaggaattggagaacgatcgggaaggtagagcaatgcactctcttcattcacagctgcacgatctgagtctgcaggagccaaacaacgacaatttggaacccagtcagaaccagccacagcagcaaatgcctctgactccattctcccctcacaacactccagggatctttctggcacctggtgcaggactcctcgagggtgcccctgaaggcatccaggaagttagaaatatgggcccaagaaatacgagcgctcactctcgtccatcttacagaagtgcatcgtggtcctctgacagcgggcggcctaagaacatgggaacgcatccctccgtgcaaaaggaggaagccttcgaaatcatagttgaatttccggaaacaaattgcgacgttaaggataggcaaggcaaggagcaaggggaagagatttcagagcgcggggcaggacctaccttcaaggcaagcccttcatgggtggaccctgaaggagagacagctgagagtacggaagatgctcccctggattttcatagagtgctgcataacagcctgggtaatatcagcatgctgccctgtagttcattcacaccaaattggcctgtgcagaaccccgactcaaggaagagcgggggccccgtggcagagcaaggtattgaccctgatgcttcgaccgttgatgaagaagggcagcttctagacagcatggatgtcccctgtacaaacgggcacggctcccataggctgtgcatcctcaggcaacctcccgggcaacgggctgagaccccaaattcctcggtctccggcaacatcctctttcctgtcttaagcgaggactgcactaccaccgaggagggaaaccagcctgggaatatgttgaattgctcccaaaatagcagctcttcaagcgtttggtggctgaaatccccagcttttagttctggatcaagcgaaggggactcgccatggagttatctcaatagctccggaagttcctgggtatccctacctggaaagatgcggaaggagatccttgaggcccggacacttcagcccgacgatttcgagaagttgctggccggtgttcgacatgactggttatttcaaaggcttgaaaacaccggagtcttcaaacctagccagcttcaccgggcacactcagccctattgctcaaatactctaaaaaaagcgagctctggactgctcaagagactatcgtttacctaggcgattatttgactgtgaaaaagaagggcagacagcgtaatgctttttgggttcatcaccttcaccaggaggaaatcttgggtcgctacgtgggcaaggactataaggaacaaaaaggactctggcaccactttaccgatgtcgagaggcagatgactgcccagcactacgtgacggagttcaacaaacgactgtatgaacagaacatccctacccagatcttctacattccgtccacaatcctgctcatcctagaggataaaaccattaaaggctgcatttcggtggagccgtatatactgggcgagttcgtgaaattaagtaataatacaaaagttgttaaaacagaatacaaagcgaccgagtatggacttgcatacggacacttttcctatgagttctccaaccacagagatgtagttgtcgacctgcagggatgggtaacaggcaacggaaagggccttatctacctgactgacccccagatccattcagtggaccagaaggtgttcaccacaaacttcggaaaacgtgggattttttatttcttcaacaaccagcacgtggagtgtaatgaaatttgccatcgtctttccctgacccggcccagcatggagaagccatgcacatag

SEQ ID NO: 178755 - DNA, 1149 bp, synthetic construct
  misc_feature 1..1149: note = Description of Artificial Sequence: Synthetic coding sequence
  source 1..1149: mol_type = other DNA
atggccctgcagggcatcagcgtggtggagctgagcggcctggcccccggtcctttctgtgcaatggttctggcagactttggggctagagtcgtgagagtggaccgtcctgggagccggtacgacgtttcccggctgggccgcggcaagaggagcctcgtactagatctgaaacagcccagaggcgcagctgtgctccggaggctgtgtaagagatctgatgtgctcctagaacccttccggagaggggtgatggaaaagcttcagctggggccggagatactgcagagagaaaacccccggctgatctatgccagattgtccggttttggacagagcggatccttttgtcgtctagcgggccacgatattaattatctggcactctccggtgtactaagcaaaatcgggcggagcggcgagaatccatatgcccctctgaatctgctggctgacttcgcagggggcggtctgatgtgcgccttgggcattataatggctctctttgatagaactagaactggtaaggggcaggttatcgatgcaaacatggtggaagggacagcctacctgagcagcttcctgtggaaaacccagaaactgtctctatgggaggcacccagaggacagaatatgctggatggaggggctcctttttacactacctaccgcacagcagacggcgaattcatggcggtcggcgcaatcgaaccccagttttacgaactgctgatcaaaggactggggttaaagagcgacgagcttccaaaccagatgtcgatggacgactggccagaaatgaaaaagaaatttgccgatgtttttgccgaaaagactaaggccgaatggtgtcagatttttgacggcaccgacgcatgcgtgaccccagtcctcacattcgaagaggtggtccaccacgaccacaataaagagaggggctcttttatcacatcagaggagcaggacgtcagtccacgtccagcccccctgctgctgaacaccccagctattccttccttcaagagggacccctttataggagagcatacagaagaaatcctcgaagagtttggcttcagtagggaggaaatctatcagcttaactccgataaaattattgaaagcaataaagtgaaagcgtctctttag

SEQ ID NO: 178756 - DNA, 597 bp, synthetic construct
  misc_feature 1..597: note = Description of Artificial Sequence: Synthetic coding sequence
  source 1..597: mol_type = other DNA
atggccctgcagggcatcagcgtggtggagctgagcggcctggccccaggccctttctgtgcgatggtcttggccgacttcggcgcccgggtagtgcgggtggaccggccaggatccagatacgatgtgtcacgcctcggacggggcaaacggtcactcgtgctggatctaaagcagccgcgcggcgccgccgtcttgagaagactctgtaaacgctccgacgtgctgttagagcccttcaggcgcggcgtcatggagaagttgcagctgggccctgagattctccaaagagagaacccacgccttatatacgcacgcctgagcggcttcggacagtcgggcagtttctgccggctggcaggtcacgatatcaactaccttgctcttagcgggggccgtaactcgattttcaaatttttctccgtggagaacagtgagatcgagtctgttgggagtacttcccgaactgaacatgtgggttggtggtctacgtttctctacgacctgcaggattcccgatggggaatacacgggtgttggagtaataggacaccggtactccgcgccgccgatcagaggacctggaccaaggtgtag

SEQ ID NO: 178757 - DNA, 690 bp, synthetic construct
  misc_feature 1..690: note = Description of Artificial Sequence: Synthetic coding sequence
  source 1..690: mol_type = other DNA
atggccctgcagggcatcagcgtggtggagctgagcggcctggccccgggacccttttgcgccatggttctagccgatttcggcgcgagagtagtgcgcgtggataggccagggtcacgctacgacgtgtctcgactggggagggggaaacgctccttggttttagatctcaaacagccaaggggtgccgctgtgcttaggaggctttgcaaaaggtccgacgtcctcctggagccttttaggcggggggtgatggagaagctgcagctgggcccagagatcctgcagcgcgaaaacccaagactcatttatgccagactctccggtttcgggcagtcagggagcttttgtcgattagccggtcatgacattaactaccttgccctgagtggaggccgaaactctatttttaagttttttagcgtcgagaatagcgagatcgagtctgttgggtcaactagtagaacagagcatgtaggatggtggagtacttttctctatgatctgcaggattcacgctggggtatccacggttgttggtctaaccggactcctgtgctcagagcagccgatcagcggtcattgatcccctattttaatctgtatcttcagtttctcaatatatcaatgcaaaatttgttcaaggtgcatacgttacttcggccttgttattttctggggcagaaatag

SEQ ID NO: 178758 - DNA, 1185 bp, synthetic construct
  misc_feature 1..1185: note = Description of Artificial Sequence: Synthetic coding sequence
  source 1..1185: mol_type = other DNA
atggccctgcagggcatcagcgtggtggagctgagcggcctggcccccggacctttttgtgctatggtcttggccgacttcggggccagggttgtgagggtagatcggcccgggagcagatacgatgtgtcccggttaggcagagggaaaagatcactagttctggacttaaaacagccacggggcgccgcagttctcaggcggctgtgcaaaagatctgacgttctgctggaaccctttcgcagaggggtgatggagaagcttcagctgggcccagagatcctacagcgcgagaacccaagactgatctacgccagactgtcgggctttggccagagtgggagcttctgcaggcttgcaggacacgatattaactatctcgccctttcgggggtactgtccaagattggtagatccggcgagaacccgtatgccccactgaatctgttagcagacttcgctggcggcgggcttatgtgcgcactcggaattatcatggcattattcgatagaacgcgcaccggaaaagggcaggtgatagatgctaacatggtggaagggactgcctatctttcctcattcctctggaagacccagaagctgtctctctgggaggccccaagaggccagaacatgctggacgggggcgcccctttttacaccacttatcgaactgctgatggcgagttcatggcggtcggggccattgagcctcagttctacgagctccttattaaaggactagggttaaaaagcgacgagctgccaaatcagatgtcaatggacgactggcccgaaatgaagaagaagtttgccgacgtgttcgcagagaaaacgaaggctgaatggtgtcaaatctttgacggcactgacgcctgtgtcactcccgttttgaccttcgaagaggtcgtgcaccacgaccataacaaggaaagagggtcattcatcacctccgaggaacaggacgtgagtcctaggccagctcctcttctgttaaatacacccgccataccctcattcaaacgcgacccttttataggtgagcacaccgaggaaatcttagaggagtttggcttcagccgcgaagaaatttaccagctgaattccgataagatcatcgagagcaacaaagcaggctccaaattttggatcttatatcccacgcacagtaacatacagaaatag

SEQ ID NO: 178759 - DNA, 1002 bp, synthetic construct
  misc_feature 1..1002: note = Description of Artificial Sequence: Synthetic coding sequence
  source 1..1002: mol_type = other DNA
atggccgccggctgctgcggcgtgaagaagcagaagctgagcagctcgcctccctcagggagtgggggaggtggcggagccagcagctcctctcactgcagtggagagtctcaatgtagggccggcgagcttggcctggggggggccggaaccagactaaatggtctggggggcctgaccggaggcgggagtgggtctggttgcacactgagtcccccacaaggctgcggtggaggaggtggaggtattgcgctgagcccgcctccgagctgtggcgtgggtactttgctgtccacaccagctgccgccacgagtagttccccaagctcttcaagcgccgcatcttcatcttcacctggttcaaggaagatggtggtaagtgccgaaatgtgttgcttctgcttcgacgttctgtattgtcatctttacggttatcagcagccacggacaccacgttttacgaacgagccttacccacttttcgtcacctggaagattgggcgggacaagaggctacgcgggtgtattggtacctttagtgctatgaatctgcactctggattgcgagagtacactctcacgtcagctttaaaagatagtcgcttcccaccgatgacccgtgatgagctgccccggcttttctgctccgtctctctccttaccaattttgaggatgtatgtgactacctagattgggaggtcggagttcatgggattagaatcgaattcatcaacgagaagggcagcaagcggacagcaacgtatctgcctgaagttgccaaggagcagggctgggatcatatacagaccattgatagtctgttgagaaagggtggatacaaagcacctataacgaacgagttcaggaaaaccatcaaattgactagatatagatcggaaaagatgacgctcagctatgcagagtatctggcccacaggcagcaccatcactttcaaaatggcatcggccaccccttgcccccgtacaatcactatagttag

SEQ ID NO: 178760 - DNA, 633 bp, synthetic construct
  misc_feature 1..633: note = Description of Artificial Sequence: Synthetic coding sequence
  source 1..633: mol_type = other DNA
atggtggtgagcgccgagatgtgctgcttctgcttcgacgtgctgtattgccatctgtacgggtaccagcaaccacggactccaagatttactaacgaaccttatccccttttcgtgacttggaaaattggaagggacaaaaggcttcgcggatgtattggcacattctccgccatgaatctgcacagcggcctgcgagaatatacccttacgagcgctctaaaggattctagatttcctcctatgaccagagatgaacttcctcgattgttttgttccgtttccctgctgacaaattttgaggatgtctgtgattacctggactgggaggttggcgttcatggcattagaattgagttcataaacgagaaagggtccaaaagaacagctacctacttgcctgaggtcgcaaaagagcagggttgggatcacatacaaactatcgacagcttgttgcgcaaaggaggatacaaggcacctataaccaacgaattccgaaaaaccatcaagttgaccaggtatcgctcagagaagatgactttgtcgtacgcagaatacctggcacaccgccagcaccaccacttccagaacggcataggccaccctttgccaccttataatcactacagctag

SEQ ID NO: 178761 - DNA, 891 bp, synthetic construct
  misc_feature 1..891: note = Description of Artificial Sequence: Synthetic coding sequence
  source 1..891: mol_type = other DNA
atggccgccggctgctgcggcgtgaagaagcagaagctgagcagcagtccccccagtggctccggtggaggaggcggtgcgtcctcctcctcacattgtagtggagagagccagtgcagggctggcgagctagggctggggggcgccggcaccaggcttaacgggctgggtggtctgacaggcgggggtagcggctccggttgcacccttagtcctccgcaaggctgcggtggcggaggcggtggaattgccctgtccccacctccgtcttgcggagttggcacactgctgagcacacccgcagccgctacctcaagcagcccttcttcctcgtctgcagcctccagcagttctcccggctcacggaagatggttgtcagcgccgaaatgtgctgtttttgttttgacgttttgtattgccacctgtatgggtatcagcagcccaggacaccccgattcactaacgaaccttacgcgctgaaggattcccgatttccacctatgactcgtgacgaactgcctcggctcttctgctccgtcagcctgctcactaattttgaggatgtatgtgattacctcgactgggaggtgggtgtccacgggattagaattgagttcattaacgaaaagggctccaagcgtaccgcaacttacctgccagaagttgcgaaagagcaaggatgggaccacatccagaccatagacagtctgcttcgtaagggagggtacaaagctccgattaccaacgaatttagaaaaactattaagctcacgcgttataggtcagagaaaatgactctgtcctatgccgagtatctggcccatcgtcagcaccatcatttccagaacggtattggccaccccttaccaccctacaaccactactcatag

SEQ ID NO: 178762 - DNA, 2862 bp, synthetic construct
  misc_feature 1..2862: note = Description of Artificial Sequence: Synthetic coding sequence
  source 1..2862: mol_type = other DNA
atgtgcaaccccgaggaggccgccctgctgcggctggaggaggtgttttctgcaacattggcgcatgtgaactcgctcgtgctacagccactgctgcccgcagccccggacccatctgacccttggggccgggagtgcttacgcctcttgcagcaactgcacaagagctcgcagcagttgtgggaggtcaccgaagaatctctacatagcctccaggagcgccttcgctaccccgactcaaccgggctagagtcgcttctgcttctgcggggagcggatagggtgctccaggcacacattgaatatatcgaaagctatacctcttgcatggttgtccaggctttccagaaagcggctaagcggcggtccgagtactggagaggccaaaggaaggctctgcggcagctccttagcggggtctcgagtgaaggcagtgtgggcgcctccctgggtcaggcgcttcatcagcccctggcccaccatgtgcaacagtatgtgctgctgctcctctcactaggagatacaatcggggagcatcaccctactcgggagctggtggtaaacgcagtgaccttatttggaaacctgcagtcatttatgaagcaggagctcgatcaagcagtggccacacaggctctgtggcatactctgagggggcgcctgcgggacgtgctgtgcacgcctgcacaccggttactccaggactctcaagatgttccagttactgtagctcccctgagagccgagagagtgctgttattcgacgatgccctggtcctgctgcaggggcacaacgttcatactttcgatttaaaactggtgtgggtcgatcccgggcaggacgggtgcacgttccacctgctgacacctgaggaagaattttcgttctgcgccaaggacagccagggccaggccgtatggcagtggaaggtgacttgggcagtgcatcaggcccttcacggtaagaaagactttccagtgctcggagccgggttagagccttcccagcctcccgactgtcgctgcgccgagtatactttccaagctgagggccgtttgtgtcaggcaacatacgagggcgagtggtgtagaggtcggcctcatggtaaggggactctgaaatggcccgacggacgtaatcatgtcggtaacttttgtcagggtctggagcacggatttgggattaggctgctcccccaggcaagtgaggacaagtttgactgctataagtgccattggagggagggatccatgtgtggctacggtatctgcgagtactcaactgacgaggtgtataaaggctatttccaggaaggcctaagacacggttttggagtgctcgagtctgggcctcaggcacctcagcctttccgctacacaggccactgggaacgtggtcagcgctcaggttatggaatcgaggaggatggggataggggggagcgatatatcggtatgtggcaagccggccaacggcacggccccggggttatggtgacccaggcaggagtatgttatcagggtacgttccaggctgataagacagtgggcccgggtatcctcttgtccgaagatgattccctctacgaaggtaccttcacacgtgacctgaccctgatgggcaagggaaaagtaaccttcccgaatgggttcacgttagaggggtcattcggctctggcgccggcagagggcttcacactcagggcgtgctcgacactgcggctctgccccctgatccttcatctacatgcaagagacagttaggagtgggcgcgtttcccgttgagtcacggtggcagggagtgtacagcccctttcgggatttcgtatgcgcaggctgtcctagagacttacaggaagccctgttgggcttcgatgttcagtcctctcgtgaactgaggcggtcacaggattacctgagttgcgagcgcacccaccctgaggatagcgtggggtcaatggaggacatcctggaggaactcctgcagcaccgagagccaaaggccctgcagctctacctgcgcaaagcgttgagtaactctcttcatcccctgggcaagctgctgaggacgcttatgttgacttttcaggctacctacgcgggggtgggtgccaataaacacctgcaagagctcgcgcaagaagaggttaaacagcatgcgcaagagttgtgggccgcttacaggggtttgctgagggtggcgctggaacggaaaggccaggccctcgaggaagacgaggatacggagactcgcgacctgcaggtccacggtcttgttctgccgcttatgttaccatctttttacagcgagctcttcaccctttatttacttctgcatgagcgtgaggattcattctactcccaggggattgcaaatctgagcttgtttcctgacacccagcttctggagtttctggacgtgcaaaagcacctttggcctctcaaagatctcacgctgaccagtaaccagcgctatagtcttgtaagggacaagtgttttctgagtgccacggagtgtctacaaaagatcatgaccacagtcgacccaagggaaaaactggaagttctggagcgcacttacggcgaaattgaaggtacagtttccagggtgcttggtcgggagtataagctcccaatggacgatctgttgccccttctcatatatgtcgtttcacgcgcgaggatccagcatcttggagccgaaattcatctcattagggacatgatggaccccaatcatacagggggactgtacgacttcttacttaccgctcttgagtcttgctatgagcatatccaaaaggaggatatgaggctccaccggctccccggtcattggcatagcagagaattatggtag

SEQ ID NO: 178763 - DNA, 903 bp, synthetic construct
  misc_feature 1..903: note = Description of Artificial Sequence: Synthetic coding sequence
  source 1..903: mol_type = other DNA
atggaggacatcctggaggagctgctgcagcaccgggagcccaaggcgcttcagttgtacctcaggaaggcattgtccaattcacttcatcctctggggaagctgttacggacccttatgcttaccttccaggccacgtacgctggtgtgggagccaataaacatcttcaggagctcgctcaagaagaagtgaagcagcatgcccaagagctctgggccgcgtaccgaggcctcctgagagtagccctggaacgcaaaggacaggcattggaggaagacgaggatacagaaactagagacttgcaggtgcacggcttggtgttgccgctgatgctgcctagtttctacagtgagctctttacgctgtatctgctcctgcacgagcgtgaagattcgttctattcacaggggattgccaatttgtccctgtttcctgatactcagctgttagagttcctggatgtccaaaagcacctttggcctctgaaagatttaactttaacctcgaatcagcggtattcacttgtgagggataaatgcttcctgtccgctacggaatgtctgcagaaaattatgactaccgttgatccgagagaaaagctagaagtgttggagcggacatacggcgagatcgagggcaccgtgtccagggtcttgggcagggaatacaaactgccgatggatgacctgctgcccttgttgatatatgtggtctccagagccaggattcagcatctcggcgcagagattcacctgattcgtgatatgatggatcccaatcacaccgggggcctctatgatttcctgctgacagccctcgagagctgttatgagcacattcaaaaagaggatatgcgccttcaccgtctccccggccactggcactcccgcgagctatggtag

SEQ ID NO: 178764 - DNA, 2862 bp, synthetic construct
  misc_feature 1..2862: note = Description of Artificial Sequence: Synthetic coding sequence
  source 1..2862: mol_type = other DNA
atgtgcaaccccgaggaggccgccctgctgcggctggaggaggtgtttagcgcgacattagcccacgtcaacagtttggtcctgcaaccactgctcccagctgcccctgaccctagtgacccatggggcagagagtgcctgcgcttgctacagcagctccacaaatcctcccagcaattatgggaggtgacagaggagagtcttcattccctacaggagcgcctgagatacccggattcaaccgggcttgagtctcttctccttctgcgcggcgcggaccgagtgctgcaggctcacatcgaatatatagagtcgtatacgtcgtgcatggtagtacaggcatttcagaaggccgccaagcgacggtcagagtattggagaggacagcgaaaagctctaaggcagctcttatcaggcgtgtccagtgaaggcagcgtgggtgcttcgctcggacaggcactgcatcagccactggcacaccacgtgcagcaatatgtcctcctcttgttgtcactcggggacactattggcgagcatcatccgacgcgggagctggtcgttaatgctgtaacactttttggtaaccttcagagcttcatgaagcaggagctcgatcaggccgttgccactcaggccctctggcataccctccggggccggcttcgggacgtgctatgtacgcccgcacaccggcttcttcaggactcacaggatgtgccagtaactgtcgctccactgcgcgcggaaagggtactgttattcgacgatgctctcgttctcttgcaggggcataatgtgcatacatttgacttaaagctggtctgggtagaccccggtcaggacggttgcacctttcacttgctaacgcctgaggaggagttctccttttgtgccaaagactcccaagggcaggctgtgtggcagtggaaagtgacctgggccgtgcatcaggcattacatggcaaaaaagactttccagtgctaggcgccggcctcgagcctagccaaccacctgattgcagatgtgctgagtatacctttcaggctgaggggcgactgtgccaggcgacgtacgagggcgagtggtgccgcggaaggccgcatggtaagggcacactaaagtggcctgatggccggaaccatgttggaaacttctgtcagggtttggaacacggattcggcatcagacttctgccacaggcttctgaagacaagttcgactgttacaagtgccactggagagaaggaagcatgtgcggatacggtatctgcgaatatagcactgacgaagtctacaagggctatttccaggagggacttcgacacggttttggggttttagagagcggcccccaagctccgcagccattccggtacactggccattgggagcggggacagcgtagcgggtatggaattgaagaggacggcgatcgaggcgagaggtacattggaatgtggcaggctggtcagcgacacggcccaggcgtcatggttacacaagcaggggtgtgctaccagggaacctttcaggcggacaaaactgtgggtcccggaatacttttgtccgaagatgattcactgtacgaggggacatttactcgggatctcacactgatggggaaaggaaaggttacatttcccaacggtttcaccctggaaggctccttcgggagtggagccggccggggacttcatacacagggggtgctcgatactgctgcactgccccctgatccatcttcaacttgtaagcgacagctgggcgtcggagccttcccagtggaatctcggtggcaaggtgtgtacagccccttccgggattttgtttgcgctggctgccctcgggatctgcaagaagccctgctgggattcgacgttcagagctcacgagagctgaggagatcacaggattacctaagttgcgaacgcacccatcctgaagacagcgtggggtcgatggaggacattttggaggaattgttgcagcaccgggaacccaaggccctgcaattgtatctgagaaaggccttatcgaatagtcttcatccattaggcaaactcctgcggacattaatgcttacattccaggccacttatgcaggagttggagcaaataaacacctgcaggagctggctcaggaagaagtcaaacagcacgcccaggagctgtgggctgcataccgaggtctgctgcgagttgcgctcgagcgcaaaggccaggcgctcgaagaggacgaagatactgaaacaagggatctccaggttcatggtctcgtgctgcctttgatgctcccttccttctactcagagctgttcacgctgtacttactcctgcacgagagggaggactccttttacagccagggaatagccaatttaagtcttttccccgacacacagctgctcgaatttctggacgtgcagaagcatctctggcctttaaaggatttaactttgacttctaatcagcggtactccctcgtccgggacaagtgcttcctgtctgcgaccgagtgcctgcaaaagatcatgacgaccgtggatcctcgggaaaaattggaggtgctggaacgtacttatggtgaaatcgagggaacagtgagtagagtgcttggccgagaatacaagctgccaatggacgacctacttcccctgctgatttacgtggtaagtagggctagaatccagcacctgggagcagagattcatctgatcagagatatgatggaccctaatcacacaggggggctgtacgacttcctcctgaccgccctggagtcatgctacgagcacattcagaaagaggacatgagactgcaccgactgcccggacactggcactcacgagagttgtggtag

SEQ ID NO: 178765 - DNA, 12504 bp, synthetic construct
  misc_feature 1..12504: note = Description of Artificial Sequence: Synthetic coding sequence
  source 1..12504: mol_type = other DNA
atggagcccgaggacctgccctggcccggcgagctggaggaggaggaggaagaggaagaagaagaggaggaggaggaggaggaggctgcggcagccgcggcagccaatgtcgacgatgtggttgtggtggaggaagtcgaagaagaggccggccgcgagctcgatagcgactcccactacggtcctcagcacctcgagagcattgatgatgaagaggatgaagaggccaaggcctggctacaagcacatcccgggcgcatcctgccaccactgagccccccccaacacaggtactctgagggcgaacgaacttctctagaaaagattgttcccctcacatgccacgtgtggcagcagattgtgtatcaggggaacagtaggacacagatatctgacacgaatgtggtttgtttggaaacaactgcccagcgaggctcaggagatgaccagaagactgaatcctggcattgcttaccccaggagatggattcctcacagacactcgacactagccaaacgaggttcaatgtgcggaccgaagacaccgaggtaaccgatttccctagccttgaagaagggatactcacacaaagcgagaaccaggtcaaagagcccaaccgtgatctgttctgctcccctctgctagtgattcaagactccttcgctagcccggacctgcctctcctgacgtgtctgactcaggaccaggagtttgctcctgattccctgttccaccagagtgagctgagcttcgcacccctcagaggcattccggataaatcagaagacacagaatggtcttcccgacccagtgaagttagtgaggccctcttccaggctaccgcagaggtggctagcgacctcgcatccagtcgctttagcgtttcccagcaccctttgattggatcaaccgccgtggggagccagtgccccttcctccccagcgagcagggaaataacgaagaaacaatctcctcggtcgatgagcttaagatccccaaggactgcgatcgctacgacgacctgtgctcatatatgagctggaaaacaaggaaagatactcagtggccagagaacaacctcgccgacaaagatcaggtctccgtcgccacgtcatttgacatcaccgatgagaatatcgcgactaaaagatctgaccatttcgacgcggcccgctcttacggacaatactggacccaggaagactccagcaaacaggctgaaacttacctcacaaaaggcttacaaggcaaagtggaaagtgatgtgattactctggacggccttaatgaaaacgctgtggtgtgctctgagagagtggctgaattacagagaaagcctacacgggaatctgaatatcacagctccgacttaaggatgttgcgtatgagtccggatactgtccccaaagcgcccaaacatcttaaggctggcgatacgagtaagggaggcatcgctaaggtgactcagtcaaatcttaagagtggtatcactacaacccccgttgactccgatatcggcagccacttgtcgcttagtctcgaggatctgtctcagttggccgtctctagtctcgaaacaactaccgggcagcacacagacactcttaaccagaaaacactggccgacacccacctgaccgaggagacactgaaggtaactgcgattcccgaacctgccgaccaaaagacagccacgccaaccgtgctaagttcctcacacagccataggggcaaaccaagcattttttatcaacaggggttaccagattcacacctcacagaagaagcacttaaagtgtctgcagcccctggactcgctgatcagacaacaggcatgtctactctcacgtccaccagctactctcaccgagaaaagccaggcacattttatcaacaggaactcccagagagcaacttgacggaggaaccactggaagtatctgccgcgcccggacccgtggaacagaagacaggcattcctaccgtttcctcgacatcacacagccacgtagaggatcttttgttcttttatcggcaaacccttcctgatggacacctcactgatcaagccttaaaagtttctgccgtgtccggccctgctgaccagaaaacaggcacggcaaccgtgttatcgaccccccatagccaccgcgagaagcctggaatcttttaccaacaggagtttgcggatagtcatcagactgaagaaactctcactaaggtttccgccacccccggaccggccgaccagaagaccgaaatccctgcagttcagtcatcttcctattcacaaagggaaaagccatcaattctttacccccaggacctggcagacagtcatttaccagaagaaggcttgaaggtctccgctgtggccgggccagcagaccagaagaccggtttgcctactgtacctagctccgcctatagccatcgggagaagctcctcgtcttttatcaacaggcgctgctcgattctcacttgcccgaggaggctctaaaagtaagtgccgtgtcaggacctgccgatggcaaaactggaaccccggctgtgacatctaccagttctgccagtagtagtctgggcgagaaacctagcgccttctaccagcagacacttccgaactcgcatctgacggaagaagccctgaaggtatctatcgtccccggacctggggatcaaaagactgggattccctccgcccccagctccttctatagtcatcgcgagaagcccattatattcagtcagcagacactccctgattttttgtttcccgaggaggcactcaaagtgtctgctgtgtctgtgctcgcggctcagaagacagggacaccaaccgtcagttctaatagccattcccattcagagaagtcgagcgtgttctaccagcaggaactccctgattccgacctccctcgcgagtctctcaagatgtctgccattcccggtctgactgaccaaaagacagtgccaacacccacagtgccgtcagggagcttctcccatcgtgagaagccgtcgattttttaccagcaggaatggccagattcctatgccacggagaaggctctgaaggtgtccaccggacctggacctgcggatcagaagacggaaattccggctgtgcagtctagctcctacccccagcgagagaagccttccgtactgtaccctcaggtgctcagcgactctcacttgcccgaggagagtctgaaggtcagtgcctttccagggcctgccgaccagatgactgatacccctgccgtgccctccacattttactctcagcgagaaaaaccaggtattttttaccaacagacgctacccgagtctcacctccccaaagaggccctgaagatctccgtcgctcctggcttggctgaccagaagacaggaactcccactgttacgtctacatcttattcccagcatagggagaagccatctatttttcatcagcaggcacttccgggaacgcacatcccagaggaggcacaaaaggtctcagctgtcaccggtcctgggaatcagaagacctggatcccaagagtcttgagtaccttctactcacaaagagaaaagccggggattttttaccagcagactctgccaggctcccacatacctgaggaggcacaaaaggtatcccccgtgttgggacccgccgaccagaagacaggcacaccaactcctacaagtgcgagttactcccatacagagaaaccgggaatcttttaccagcaggttctgcctgataatcacccaaccgaggaagccctgaaaattagtgtggctagcgagcccgttgatcagaccactggcaccccggccgttaccagtactagttactcacagtatagggaaaagccaagcatcttttatcagcagtcactgccgtccagccatctaacggaggaggctaagaatgtgagtgctgttcctgggcccgcagatcagaagactgtaatcccaatcctcccgtcaaccttctattcacatacagagaaaccgggggttttttaccagcaggtgctgccccactctcacccgaccgaagaggctctgaagatctctgtggccagcgagcccgtcgatcagaccactggcaccccaactgtgacatccacatcttatagccagcacacagaaaagcctagcatcttctaccaacagtcattgccaggctcccatctcacggaggaggccaagaatgtgtccgccgtacccggccctggcgatcgcaagaccgggattcctactctgccgagtacgttttactcacatacagagaagcctggctccttctatcagcaagtcctgccccatagccacctcccggaggaggccctggaagttagcgtagctccagggcctgttgaccagacaatcggtacgcctaccgtcaccagcccgtcatcaagcttcggggaaaagcccatcgtcatctataagcaggccttcccagaaggccacctgccggaggagagcctcaaagtctccgtagcccctggcccagtggggcagacaaccggggcccccacaatcacctccccaagttactcccagcacagggccaagagcggatcattctaccaactcgcgttgctcggcagtcagataccagaggaagccttgcgggtttcatctgcgcctgggcccgcagaccaaacaaccgggattcccaccataaccagtacctcatatagcttcggcgagaagccaattgtcaattataaacaggctttcccagatggccacctgccagaggaagctctgaaggtgagcattgtgagcggccctaccgaaaagaaaaccgatattcctgccggccctttgggatcttccgccctgggagaaaagccaattaccttttacaggcaggccttgcttgacagccccctgaacaaggaagtggtcaaggtgtctgccgccccagggcctgctgatcagaaaacagagacactgccagtacactccacttcttatagtaaccgcggcaagcctgtaatcttctatcaacagacactgtcagactctcatctgcccgaagaggctttgaaggtccctcctgttcccggaccagatgcccagaagaccgaaactccttcagtgtccagcagcttgtacagttaccgcgaaaagccaatcgtgttctatcaacaggctctccccgattcggagctgacccaagaggcacttaaagttagcgctgttccgcagcccgccgaccagaagaccggtctgtccactgtcacgtcatccttttattctcataccgaaaaacccaacatcagttatcagcaggaacttcctgatagccacctgacagaagaggcgctaaaagtgtcgaacgttcccggaccagccgatcaaaaaacaggcgtctcaaccgtgacaagcacctcttatagccatagagaaaaacctatagtaagttatcagagggagctcccccactttacggaagccggcctgaagattctgcgggtccccgggcccgctgaccagaagacgggaatcaacatccttccctccaactcgtatccccaaagggaacactcagtgatttcctacgaacaggaactccctgaccttacagaagtcactttgaaggcaattggggtgccaggtccagccgatcagaaaaccggaatccagattgcaagttcatccagctacagcaacagagaaaaagccagtattttccaccaacaggagcttcctgacgtgactgaggaagcgttaaacgtgttcgtagtccccgggcaaggcgaccggaaaactgagatacccacagtcccgctcagttattactctagaagagagaaaccaagcgtgatctcccaacaggagttgccagattcacatttgactgaggaggctctaaaagtgtctccagtgagtattcctgcggaacaaaaaacaggtataccaatcggcttgagctcctcgtactcccatagtcataaggagaaactaaaaatctcgaccgtccacatccctgatgaccagaagactgagtttccggcagccacgctctcgtcatactcacaaatagagaaacctaagataagtaccgtgattggaccaaacgaccagaagacgccatcccagacggccttccactcatcctactcacaaaccgtgaagccaaatattttgtttcaacagcaactgccagatcgcgatcagtccaagggcattttaaaaatcagcgcggtgcccgagctgaccgatgtgaacacagggaaacccgtgagtctgagctcttcgtactttcatcgagaaaagtcaaacatcttttccccgcaagaactgcctggaagtcacgtgacggaagacgtcctcaaagtcagcacaatcccggggccggccgggcagaagaccgtgctccccacagcgctgccatccagcttttcccaccgcgagaagccagatatcttctatcaaaaggatctccccgacagacatcttacagaggacgcattgaaaatttcgtctgcactgggccaagctgatcagatcactggtttgcagaccgttccctcgggcacttacagccacggtgagaaccataaactggtgagcgagcatgtgcagaggctgatcgacaacttaaactcttccgactcatcagtgtcgtcaaacaatgtgcttctaaactctcaggccgacgaccgcgtggttatcaataagcccgaatccgcaggatttagagacgtgggctcagaagagattcaggatgcggagaacagcgctaaaacactgaaagagatccgcacactgctgatggaggctgagaacatggcgctcaagcgctgtaattttcccgctcccctggccagattcagagatatatctgacatttctttcatccagagtaagaaggtggtgtgtttcaaagagccatccagcactggagtgtcgaacggggacctactgcacaggcagcccttcacggaggaatcccccagtagtcgatgtattcagaaagacataggaactcagactaatctcaagtgcagacgcggaatcgagaattgggagttcatctcaagcactacagtgcggtcccctctgcaagaagcggagagtaaggtgtctatggcactggaagagacattgcgtcagtaccaagcagcaaagtccgtgatgagatcagagcccgagggctgctccggcacgatcggcaacaagatcattatccctatgatgaccgtgatcaaatctgattcatcttccgacgcttccgacggaaatggctcctgctcatgggactctaatttgcctgagtcccttgagtcagtctcggatgtgttgttgaacttcttcccctacgtgagccccaagacaagcataaccgattctcgggaagaggaaggcgtttctgagtcagaagatggtggggggagcagtgtggacagcttagctgcccatgtcaagaacctactgcagtgcgaatctagtttgaaccacgcaaaggagatcctgcgaaacgccgaagaggaggagagtcgtgttagggcacacgcgtggaacatgaaattcaacctcgcccacgactgtgggtactctattagcgagctgaatgaggacgaccgacgtaaagtcgaagagatcaaggccgaattgtttggacatggaagaactaccgacttgtccaaaggactgcagtcaccaaggggtatgggatgtaaaccggaggccgtgtgtagtcatataataattgagagtcacgaaaagggatgcttcagaaccctgacctccgagcacccgcaacttgacaggcacccgtgtgccttccggagtgctggcccaagcgagatgactagaggcaggcaaaacccttcaagctgtagggctaaacacgtgaacctttctgcatccttggaccagaacaactctcatttcaaagtctggaattctttgcagctgaaatcccacagtcctttccagaactttattcctgacgagtttaagatttcaaaggggcttcggatgcctttcgatgagaaaatggatccctggcttagcgagctggtggagcctgcatttgttcctccaaaagaggtggatttccactcgtcatcacagatgccatctcccgaacctatgaagaagtttactaccagtatcactttttcatcacaccgacattcaaagtgcatctccaactctagcgttgtcaaggtgggtgtgacagaaggttctcagtgtacaggtgcctctgttggcgtcttcaactcacactttaccgaggagcagaatccccccagggaccttaagcagaagacatcatccccaagttctttcaaaatgcatagcaattcccaggacaaggaagtgacaatacttgctgaagggcggcggcagtctcagaagctcccagtcgatttcgagaggagttttcaggaggagaaacccctagagaggagtgatttcaccggatcccattcggaaccctccacgagggccaattgttcaaatttcaaagaaatacagatcagcgacaatcatacacttattagtatgggccggccgagttctacccttggcgtcaatcgctccagtagcagattgggagtgaaagagaaaaatgtgacaattaccccagatcttccaagctgcatatttctagagcagcgtgagctgttcgagcagagcaaagctccacgcgctgatgaccacgtcaggaaacatcattcgccatcaccccagcatcaggattacgtcgccccggatctcccatcttgtatcttcctggagcagagggagctgtttgaacagtgtaaagctccttatgtcgaccaccaaatgcgcgagaaccattctccacttccccagggacaagacagcatcgcatccgatcttcctagccccatcagcttagaacagtgccagtccaaagctccaggggttgatgatcagatgaacaagcatcactttcccctgccacagggccaggattgtgtggtcgagaaaaataaccagcataagcccaagtcccatatctctaatattaatgtggaggccaaattcaacactgtagtcagtcagtcagctccaaatcattgcacactagcggccagtgccagcactccaccgtccaatcggaaggccctgagttgcgtacatatcaccctctgtccgaagacatccagtaaactggatagcggtacccttgatgagcggttccactcattggacgcggcaagcaaagctaggatgaactccgagttcaacttcgacctgcatactgtgtcatcaagatccctggagccaacatctaagctgctgacatctaaacctgtcgcacaggaccaggagtccttgggatttctgggacccaagtcatccctggatttccaggtcgttcaacccagcctccccgatagtaataccataactcaggacctgaagaccattccttcccagaacagtcagattgtgacatctaggcagattcaggtaaatatcagcgattttgaaggacactcaaacccagaaggcaccccagtgtttgctgaccggcttcccgagaagatgaagacgcccctcagtgctttcagtgagaagctctcttctgacgcggtaacacaaattactaccgaaagcccagagaagacactgttttcatctgagatttttattaacgcagaggaccggggacacgaaattatagagcccggcaatcaaaaactccgcaaagccccagtgaaattcgccagtagctctagcgtgcaacaggtgacgttttctcgagggactgatggtcaaccactgcttctgccatacaagccctccgggtcgactaaaatgtactacgttccgcaactgcgtcagattcccccctctccggacagcaagtccgatactaccgtggaatcatcccattccggctccaacgacgccatcgccccggattttccggctcaggtgctgggcactcgagatgatgatctgtcggccactgttaatatcaagcataaagaaggcatctattctaagagggttgtgaccaaggcttcccttccagttggcgaaaaacccctacagaacgagaacgcagatgcaagcgtgcaggtgctgattaccggcgatgagaatctttccgacaagaagcagcaagagattcactctaccagggcggtgactgaggcggctcaagccaaggaaaaggagtcacttcagaaggacacagccgatagttcggccgcggcagcagctgagcactctgcacaggtgggcgatccagagatgaaaaacctacccgatacaaaagcgattacacagaaggaggagatccaccgcaagaagacggttcctgaggaagcatggccaaataacaaggagtcgctccagattaacatcgaggaatcggaatgccattcagaatttgaaaatacaacccgtagtgtttttcgctctgctaaattctacatccatcaccctgtgcatctgccatcagatcaagatatttgccacgaatccctcggtaagtccgtgttcatgcggcactcctggaaagacttttttcagcaccatccggataagcatagggagcacatgtgcctgccattgccctaccagaatatggataagacaaaaactgattacacccggataaagtccttgtcaattaatgtgaatctgggcaacaaggaagtgatggataccactaaatcacaggtccgagattaccctaagcacaatggccaaatatccgatccgcagcgggatcagaaagtgacccccgagcagaccacccagcacactgtgtcattaaatgagctctggaataaatacagagaacgtcagaggcagcagcgtcagcccgaacttggcgacaggaaagaactgtctcttgtggaccgactcgaccgcctggctaagatcctgcagaatccaattactcactctcttcaggtttcggaaagtactcacgatgattcccgcggtgaacgcagcgtcaaggagtggtccggccgccagcagcagagaaacaagctccaaaagaaaaagaggttcaagtcgctagagaaatcccacaaaaatactggtgaactcaagaagtccaaagtgcttagtcaccatagggcaggtagaagtaatcagattaaaattgagcagataaagtttgacaaatacattctgtccaaacagcccggcttcaattacattagcaatacgagcagcgattgtcgaccttcagaagagtccgaactcctgaccgacaccaccacgaacatcttaagtggaaccacttcgacggtagagtccgacatcctgactcagaccgatcgcgaggtggctctgcacgaaaggagtagctccgtctccacgatagatactgcgcgcctgatacaggccttcgggcacgagagggtctgcctcagcccccgtcggatcaaactctatagttccatcacaaaccagcagcggcgatacctggagaagcgatctaagcactctaaaaaagtgcttaatactggtcatcctcttgtgacctccgaacatacgcgtcgacggcacatccaggtggccaatcatgtcatctctagtgacagcatcagctcctccgcatcctcttttttgtcctctaactctacattctgcaacaagcagaatgttcacatgctcaataaaggtattcaggccggaaacctggaaatcgtgaacggggctaagaaacatacccgggatgtaggcatcacattccccactcctagttcatccgaggcaaagctggaagaaaactccgatgtgacgtcctggtctgaggagaagagagaggagaaaatgctattcaccggctatccggaggataggaagctgaaaaaaaataaaaagaacagccacgagggagtgagttggttcgttcctgtcgaaaatgtggagagtcgcagcaaaaaggaaaacgtgcccaatacatgtgggcccgggatatcttggttcgaaccgatcacgaaaacacggccctggagagagccactaagggaacagaactgccaggggcagcatctcgatggacgaggttatctggcaggccccggtcgcgaggccgggagggatcttctgcgcccattcgtcagagcaactctgcaggagtccctgcagttccataggccggactttattagccggtctggcgagagaattaaacgcctaaaactgatcgtccaggaaagaaaactgcaaagcatgctgcaaactgaacgcgacgcactcttcaacatagacagggagcgccagggacatcagaatcggatgtgcccactgcctaagcgggtgttcctggccatccaaaagaacaaaccaatctccaagaaggagatgatccagcggagcaaaagaatctacgagcagttgcctgaagtacagaagaaacgcgaagaggaaaaaagaaagtctgagtataagagctatcgtctccgggcccaactgtacaagaaaagggtgaccaaccagctgctgggtaggaaagtaccctgggactag

SEQ ID NO: 178766 - DNA, 7686 bp, synthetic construct
  misc_feature 1..7686: note = Description of Artificial Sequence: Synthetic coding sequence
  source 1..7686: mol_type = other DNA
atggagcccgaggacctgccctggcccggcgagctggaggaggaggaagaggaagaagaagaggaagaggaggaggaagaggaggctgctgctgccgcagcggctaatgtggatgacgttgttgtggtggaggaagtcgaagaggaggcgggtcgcgagctggactccgattcacactacggaccacaacatctggagagcatcgacgatgaggaggatgaagaggctaaggcttggctgcaggctcacccaggacgcatactgccgcccctgtccccccctcagcacaggtacagcgaaggagaaagaacgagtttagagaagatcgtacccctgacgtgccacgtttggcagcagatcgtctaccagggcaattcgaggacacagatctccgacacaaacgtggtgtgcctggaaaccaccgcccaaaggggtagcggggatgaccagaagactgaatcttggcattgcctgccacaagagatggactcgtcccaaaccctggatacatctcagacccggttcaacgtgagaaccgaggatacagaggttacagattttcccagtctggaagagggtatcctgactcagtctgaaaaccaggttaaagagccaaatcgtgatctgttctgtagtcctcttttggtaattcaggacagcttcgcatccccagacctgcctcttctgacctgcctgacccaagaccaagaatttgctccagactcactcttccaccagtccgaactttcctttgcaccactccgaggaatcccagataagtcagaggacaccgagtggtcatcacgtccatccgaagtcagtgaggcgttgttccaggctaccgccgaggtagcaagtgacctggcctcctcccgcttttctgtttcccaacaccctctgattgggagtacggccgtagggagccagtgtccattcttaccaagcgagcagggaaataatgaggagacaatatcatcagtggatgaactgaaaattccaaaagactgcgataggtacgatgatctatgctcttacatgtcctggaagacaagaaaggatacccagtggccagagaacaatttggccgacaaggatcaggtgagcgtcgccacgtcgttcgacatcaccgacgaaaatattgctactaagcgcagcgaccactttgatgctgccagatcttatgggcagtactggacccaggaagattctagtaaacaggctgagacctacctgacaaagggcctgcaagggaaggtcgaaagtgatgtaatcacattggatggactgaatgagaatgctgtggtgtgctcagagagggttgcagagcttcagagaaagcccacccgtgagtctgaatatcacagctcggatcttcgaatgctgagaatgtcaccagataccgtccccaaagctccaaagcacctgaaggctggcgatacatcgaagggcggcatcgccaaggtaactcagtccaacctaaaatctggaatcactacaactcccgtggactctgacataggcagtcacctttctttgtcgctggaggacttatcccaactcgccgtgtccagcttggaaacaactaccggtcaacataccgacaccctgaatcagaagacgcttgcagatacgcacctgactgaagaaacactgaaagtcacagctatacccgagcccgcggaccagaaaactgcaacgcctactgttctctcctcctcacactcccatcgcgggaagccctctatattctaccagcaaggcctcccagattcccacttgacagaagaggcccttaaggtatccgctgcaccaggtttagctgaccagacaacaggcatgagcaccttaacgtcaacttcctatagtcacagagaaaaacctgggacattttatcagcaagaactccctgagtccaatctcacagaggagcccctagaagtgagtgccgctcctggacccgtcgaacagaagacagggatcccaacggtgagtagtacctctcactctcatgtggaggacctgctttttttctaccgccagactttaccggacggacacctcacagaccaggctcttaaagtctctgccgtgtcaggtccggccgatcagaaaacagggaccgccacagtactttcaaccccccactcccaccgggaaaagccaggaatcttctaccaacaggaattcgcagactcgcaccagacagaagagacactgactaaagtgtccgcgacccctggccctgccgatcaaaagacagagatccctgcagtgcaaagcagctcttacagccagcgcgagaagcccagtatactgtatccacaggacctcgccgacagccacctgccagaggagggcttgaaggtatccgctgtggcaggcccagccgatcaaaagaccgggctgccaaccgtcccatcttctgcctacagtcaccgggagaagctgcttgttttctaccagcaagccctcttagactctcacctgcccgaagaggctttgaaagtctctgccgtttctggaccggctgatggaaaaacaggaacacccgccgttacttccacttccagtgcatcttcaagccttggcgagaaaccatcagcattctaccagcagaccttgccaaacagccatctcacagaagaagctctgaaagtgtcaatcgtgcccggacctggggatcagaagaccgggatcccatctgcccccagcagcttttacagccatcgggaaaagcctattatctttagccagcagacactacccgacttcttgttccctgaggaagcacttaaggtgtctgccgtgagtgtgctcgctgcccagaaaacggggaccccaaccgtcagttcaaatagccactcgcattctgagaaatcaagcgtgttttatcagcaagaactgcccgactccgatctacccagggagtccttgaaaatgtccgctatccccggattaacagaccaaaagacagtgccaacaccaaccgtcccgtcagggtcgttctcccatcgtgaaaagccctctattttttatcagcaggagtggcctgatagctatgccacggagaaggccttgaaagtgtctactggcccgggcccggctgaccagaagacggagattcctgccgtccaaagctcgtcttatcctcagcgcgagaaaccctctgtcctatatccgcaggtgttgtcagattctcacttgcctgaggaatctctgaaggtttcagctttccccggccccgccgaccagatgactgacactcctgctgtgccaagcaccttctactcccagagagaaaaaccggggatcttctaccagcagactctgcctgagtcccatctgcccaaggaagccctgaaaatcagcgtggcgccgggacttgcagatcaaaagaccggtactcccaccgtcacttccaccagctactcccaacatagggagaaaccctccatttttcatcagcaggcattacctggcacccatattccggaagaagcccagaaggtcagcgccgtcacgggtcctgggaaccagaagacttggattccacgtgtgctcagtacattctactcacagcgtgagaagcctggcatcttttatcagcaaactctgccagggtcgcacatccccgaggaagctcaaaaggtgtcccctgtgctaggccctgctgaccagaaaacaggaactccgaccccaacctctgcatcgtacagccatactgagaagcctggaatattctaccagcaggtgttgcctgataatcaccccacggaagaagccctgaagattagcgtcgcttctgagcccgtggaccagacaacaggcactccagcagtcacttccacgtcatactctcagtaccgagagaagcctagcattttctatcagcagagcctgccaagctctcacctgacggaggaggccaaaaatgtttcagcagtgccaggaccagccgaccaaaagaccgtgattccaatcttaccaagtacattctacagtcacaccgagaagccaggagtgttctatcaacaggtgttacctcactcccacccaacagaggaggcattgaagatctctgtggccagcgagcctgtcgaccaaactaccggcacccccacagtgacttctacgtcatactctcagcacacggagaaaccctcgatcttctaccagcagtctttgccaggaagccatcttaccgaagaggctaagaacgtgtcagccgtgccgggccctggtgacagaaaaaccggtatacctaccctgccatccacgttctactcccacaccgagaagcctgggtcattctatcagcaggtgctgcctcattcccatctgcccgaagaggccctggaggtgtctgtggcccctggacccgtggaccagactatcggcacccccaccgtgacctcccccagttcctccttcggcgaaaagccaatcgtcatttataaacaggcctttcccgagggtcatctcccggaggagtcactcaaagtcagcgtagccccaggccctgtgggccagactaccggtgctccgaccatcaccagcccctcctattcccagcatcgtgcaaaatccgggagcttctaccagctcgctctgctggggtcccagattccagaggaggccctgcgcgtgtccagcgctcctggccccgcagaccaaacaacagggattcctactattactagtacgagttactcatttggagaaaagccgattgtcaattacaagcaggctttcccagatggacacctacctgaggaagccttaaaagtgagtatcgtttccggtcccaccgaaaaaaagaccgacattccagccgggcccctgggcagcagtgctctgggggaaaaaccaatcacgttttacagacaggcgttacttgactcgccactgaataaagaggtggtcaaagtctcagcagcccccggtccagctgaccagaaaaccgagacactgcccgtacattccacttcctacagtaacagggggaagcctgtcatattttatcagcaaacactgtctgacagtcatctgcccgaagaggcactgaaagtgcctccagtgccgggacctgatgcacagaagacagagaccccttccgtttctagcagcctttattcataccgagagaaaccgattgttttctaccagcaggcactgcccgactccgagttgacgcaggaggcgctgaaagtgtcagctgtgccccagcccgcagatcagaaaaccgggctgtcaaccgtgacgtcaagtttctatagccacaccgagaagcctaacattagctatcagcaggagctgcccgattctcatctaaccgaggaagccctcaaggtatctaacgttccaggaccggccgatcaaaagactggtgtgagcactgtgacctctaccagctacagccaccgcgagaagcccattgtgtcgtatcagagggaactaccccactttactgaggccggccttaaaattttgcgggttcccgggcccgcagatcaaaaaaccggaataaatatattaccatcaaactcttatccacaaagggaacattcagttatctcgtacgagcaggagttgccagacttgacggaggtgaccctcaaggccatcggagtaccaggcccagctgatcaaaaaactggaatccagatcgcatcttcgtcctcttactcaaatcgcgaaaaggccagtatctttcatcagcaggagcttcctgatgtgaccgaagaggccttgaacgtctttgttgtgccaggccagggcgaccggaagactgaaattcctaccgttccactgtcatattactcgcgcagagaaaagccaagcgtaatctcgcagcaggagctgcctgacagccacctgacagaagaagcgctcaaggtttcccccgtgagcattcctgctgagcagaaaactggcatacctatcgggctcagcagctcctatagccattcccacaaggagaaactgaagatctcaacagtacacatcccagacgaccaaaaaaccgagtttcctgccgcaactctgtcctcatacagtcagatcgagaagccgaagattagcacagtgattggaccgaacgatcagaagaccccttcgcagactgccttccacagctcatattcccaaactgtgaagccaaacatcttgttccagcaacagcttcctgatagggatcaaagtaaaggcatactcaagatcagcgccgtccctgaacttaccgatgtgaatacgggaaagccagttagcctaagtagcagctactttcatagggaaaagtcaaacattttctcccctcaggagcttcctggcagtcatgtcacagaagacgtcctgaaagtctctacaatccctggaccggcgggacagaagacagtattgccaaccgccctgccaagctcgttctcacatagagagaaaccagatattttctaccagaaggacctgcctgacaggcacctcaccgaagacgccctcaaaatctcatcagccttggggcaagccgaccagatcactggtcttcaaaccgttccatctgggacatacagtcatggcgaaaaccataaacttgtgtcggagcatgtccaacgactcattgacaacttaaactcttctgactcatctgtatcttccaacaacgttctgctgaattcacaggcagacgaccgggtagtgatcaacaagcccgagtctgccggatttcgggatgtcggcagtgaagagattcaggacgccgaaaattccgcaaagacactgaaggaaatccggactttgctgatggaagccgagaacatggccctcaagcgctgcaactttcctgcacctttagcccgattccgggacatatccgacatcagcttcatccaaagtaaaaaagtggtgtgttttaaagaaccttcctccacaggggtaagcaatggagatctcctgcatcgccagccatttactgaggaaagtccgagctccaggtgtattcagaaggacatcgggactcaaacgaaccttaagtgccgccggggtattgagaactgggagtttatatccagtaccactgtgcggagtcccctgcaagaggcagagtctaaggtatccatggctctggaggaaacattgcgacagtatcaagcagctaaaagtgtaatgcgaagcgaacccgagggttgcagcgggaccatagggaacaagatcataatcccaatgatgacagtcataaagagcgacagctcatctgacgccagcgacggtaacgggagctgttcctgggacagcaatctcccggagagtctggagtccgtgtctgatgtcctcctgaacttcttcccttatgtttcccctaaaacttccatcacggacagtcgggaggaagagggggtctctgagagtgaggacggcggcggcagctcagtggacagcctggcagcccacgtgaagaatctgctgcagtgcgagagcagcctgaaccatgccaaggagatcctgcggaatgcagaagaggaggagtcacgggttcgcgctcatgcctggaacatgaagttcaatcttgcacatgactgcggatattcaatctccgaactaaatgaggacgaccgaaggaaggtggaagagatcaaagcagaactgttcggtcatggaagaacaacagacctgagtaaaggcctgcagagttag

SEQ ID NO: 178767 - DNA, 1944 bp, synthetic construct
  misc_feature 1..1944: note = Description of Artificial Sequence: Synthetic coding sequence
  source 1..1944: mol_type = other DNA
atggccgcccccgccggcggcggcggcagcgccgtgagcgtgctggcccccaacggtcggagacacactgtcaaggtgaccccctccacggtactcctccaggtcttagaggacacttgtcggagacaggattttaacccgtgcgagtatgacctgaagttccaacggagtgtgctcgatttatccctccaatggcggttcgccaaccttcctaataacgcgaaactggagatggttcctgccagtcgctccagagaaggaccagaaaatatggtaaggatcgctctgcaacttgacgatggtagccgccttcaggattccttctgtagcggacagacattatgggagctgctctcccatttccctcagatccgtgagtgcctccagcatccggggggggctacccctgtctgcgtgtataccagagatgaggtcacgggcgaggcggccctgagaggcaccaccctccagtcccttggactcacaggaggaagtgcaactatccggttcgtgatgaagtgctacgatcccgtgggcaaaacgcctggttccctaggttcgtctgccagtgcaggccaggcagccgcatccgcacctctgccattggagagcggagagctctctagaggtgacctgtccaggcccgaggacgctgatactagcgggccctgttgtgaacatacccaggagaaacaatctaccagggccccagccgcggctccatttgtccccttcagtggggggggtcagcggctcggaggtccccccggcccaacaaggcccctgacgagctcgagtgcgaaactgcctaaaagtctcagctctccaggtggcccatcaaagcccaagaaatccaagtccgggcaagaccctcagcaagaacaagagcaagaacgcgaacgcgatccacagcaggagcaggaacgggagaggcccgtcgacagagaaccggtggacagggaaccggtggtgtgccatcctgatctggaagagcggctccaagcctggcctgccgaactccccgatgaattctttgagctgactgtggacgatgtgagacgtagactcgctcagctcaaaagcgaacgtaagcgcctagaggaagcccccctcgtcactaaagccttccgagaagctcaaattaaagagaagttggagagataccctaaggtagcccttcgggttttatttccagaccgttacgtccttcaaggcttctttagaccatccgagacagtgggggatcttagggactttgtgagatcccacctgggcaaccctgagctatcattctacctgtttattacaccgccaaaaactgttctggacgatcatacccagaccctgtttcagcctcaacttggcgaccgagttgcaccatttacgctgggcccaagcctgaaaagatgcctgggaccagagcagagaacaagattaccggtcgttggagacgggggtgatgtcgactccggccggctgctattctggggaccgagcagaggaagagctagcccatccaccggccagccgccatgtcatcccgtttgtcgaccatcctcccccccatctccaaggccatcctctggagatccatcccgggtaaaggccggtcacaaacatgtgggcacaggccgagcaaacctcttccccgccgcgctcgtgcacctcggagctgaggagccagccggggtctatcttgagcctggattacttgagcacgctatctcgccttcagcggccgacgtactggtcgctcggtacatgagcagggcggcaggctccccaagtcctctccctgctcccgatcccgccccaaaatcggagcctgccgctgaggaaggggctctcgtgcctccggaaccgattcctggcaccgctcagccggtcaagagatcgttgggcaaggttccaaagtggctgaaactgcctgcgtccaagcgatag

SEQ ID NO: 178768 - DNA, 1662 bp, synthetic construct
  misc_feature 1..1662: note = Description of Artificial Sequence: Synthetic coding sequence
  source 1..1662: mol_type = other DNA
atggccgcccccgccggcggcggcggcagcgccgtgagcgtgctggcacctaatggacgcaggcatacagtgaaggttaccccaagtactgttcttttacaggtgctcgaggacacttgtagacgccaagatttcaatccatgcgagtacgatctcaagtttcagcgctctgtgctggacctgtccttgcaatggcgatttgcaaacctgcctaataacgctaaactcgagatggtcccagcatccagaagcagggagggacccgaaaacatggtgcggatcgcgctgcagctggatgatgggtcaagactccaggactctttctgttcaggccagaccctctgggaattgctaagccacttccctcaaatcagagaatgcctgcaacaccctggaggggctacacccgtgtgcgtgtataccagggacgaagtaacaggagaagcagcactgagaggcacaaccctgcaatcactggggctgactggggggagtgctacaattcggtttgtcatgaaatgctacgatccggtgggcaaaaccccgggcagcctaggatcctccgcatccgctgggcaagccgcagccagcgctccacttcctctggagtcgggcgagttgtctaggggcgatctctcaagacccgaagatgccgacacatccggtccctgctgcgagcatacgcaggaaaagcagtcaacgagggcgccagcagccgccccttttgtgccattctccgggggcggccagaggctaggaggccctccaggccccacccggcccctcacttcttcttcagccaaattgcctaagagcctgagcagccctgggggcccgagcaaacccaaaaagtcaaagtccggtcaggatcctcagcaggagcaggagcaagaacgtgagcgcgatccccagcaagagcaggagcgcgagcgcccagtggacagggagcccgtcgatcgggagcctgtggtctgtcaccctgacctggaagagaggttgcaggcctggccagcagagctccctgacgaattcttcgagctaactgttgacgacgttaggcgtcggctggcccagctgaagtccgaacgtaagcggcttgaagaagcacccctggtgaccaaagcttttagagaagcgcaaattaaggaaaagcttgaacgctatccaaaggtggccctgcgcgttctatttccggaccgatacgttcttcagggttttttcaggccctcagagacagttggtgatcttcgcgatttcgttcggtcgcatctcgggaacccggagctctctttttacttgtttattacccctccaaaaaccgtgctcgatgatcatacacagacactgttccaagcaaacctgttcccggctgccctggttcacctgggtgccgaggaacccgcaggggtgtacctcgagcctggactgttagagcatgcgatttccccctcggccgccgatgtgttggtcgctcggtatatgtcacgtgcggccggctctcccagtcccctccctgcccccgatccagcacccaagtcagagcctgcagctgaagagggtgccttagtacccccagagccgattccggggaccgcacagcccgtgaaaagatctcttggaaaagtgcctaagtggctgaaactccctgcatcaaaaaggtag

SEQ ID NO: 178769 - DNA, 1050 bp, synthetic construct
  misc_feature 1..1050: note = Description of Artificial Sequence: Synthetic coding sequence
  source 1..1050: mol_type = other DNA
atggtgcccgccagccggagccgggagggccccgagaacatggtgaggattgcgctacagctcgacgatggcagtaggctccaagatagcttctgcagtggccaaacattatgggagctcctgagtcactttccgcagatacgcgagtgcttgcaacatccaggtggtgccacacctgtctgcgtgtacacccgggacgaagtcaccggagaggcagccctacgcggtaccaccctgcagtccctggggcttaccggcggatccgccactataagatttgtgatgaaatgttacgaccctgtcgggaagaccccagggtcactaggatcttccgctagtgccggacaggccgccgccagtgcaccattacccctggaatctggtgaactgtcccggggcgacctgtcaaggcctgaagacgcagacacgtctggtccctgttgtgaacatacacaggaaaagcagtcaacacgagccccagctgctgcccccttcgtgcccttcagcggcggcggacagcgcttgggagggccccctggccctaccagaccccttacctctagctctgcaaaacttcccaaaagcttaagcagtcccggtggtccatcaaagcccaagaagtccaaatctggacaggaccctcagcaggagcaggagcaggagcgggaacgagacccccagcaggaacaggaaagggagaggccagtggatcgggaaccggttgacagggagcccgtggtgtgccaccccgacttagaagaacggctccaagcctggccagcggaactgcctgatgagttcttcgaactgactgtggacgacgtacggcgccgcctcgcccagctcaagtccgagagaaagagactcgaggaagctccgctggtcactaaagcattcagagaagctcagatcaaagaaaagttggaacgttaccccaagcggcggtcactcagcctcagccctaggctggaatcagtggtcccgagtcagctgactgcaagttcagcttccagagtacaagtggtgctactgccacagccccccaaatag

SEQ ID NO: 178770 - DNA, 981 bp, synthetic construct
  misc_feature 1..981: note = Description of Artificial Sequence: Synthetic coding sequence
  source 1..981: mol_type = other DNA
atggagttcctgagcgagaagttcgccctgaagagcccccccagcaaaaatagtgacttttacatgggagccgggggccctttagaacacgtgatggagacactggacaatgaatccttttacagcaaggcaagtgccggaaagtgcgtgcaggccttcggccctttgcctagggccgaacatcacgtgcgacttgagcgtacatccccatgtcaggactcgagtgtgaattatgggatcactaaggtggagggccaacctcttcacaccgaacttaatcgagccatggataactgtaattcgctgcgaatgtctcctgtgaaagggatgcaggagaaaggtgagcttgatgagcttggagacaagtgcgattctaatgtgtctagttccaaaaaacgcaggcacagaactacgttcacttcacttcaacttgaagagctggagaaagtgttccagaagacacactacccagacgtatatgtgcgggagcaattggctttacggactgaacttaccgaggctcgggttcaggtgtggttccaaaaccggcgggccaagtggcgcaagagggagcgatatggacagattcagcaagcaaaatctcactttgcagctacctatgatatttccgtcttgcccaggaccgacagctatcctcagattcagaacaatttgtgggctggaaatgcctctggcggctcagtagtgacatcctgtatgcttccacgggacacctcgtcctgtatgaccccatattcacatagtcccaggaccgactcgtcctataccggcttttctaaccaccagaatcagtttagtcacgttccactgaataatttctttacggattcacttttgactggagccaccaatggccatgcttttgaaacaaaacccgaattcgagcgcaggtcctcgagcatagcagtgctgaggatgaaagctaaggagcataccgcaaatattagttgggcaatgtag

SEQ ID NO: 178771 - DNA, 1032 bp, synthetic construct
  misc_feature 1..1032: note = Description of Artificial Sequence: Synthetic coding sequence
  source 1..1032: mol_type = other DNA
atggaccccgagcactgcgcccccttccgggtgggccccgcccccggaccgtacgtagcaagcggtgacgaaccaccaggcccgcaaggcactcccgcagcggccccccacttgcacccagcacccccccgaggcccccgattaacgcgatttcccgcatgtggcccactggagccctacctacctgaaccagctaagcctcctgccaaatacctccaagacctggggcccggtcctgccctgaatggaggacacttctacgaagggcccgctgaagctgaggagaagacttccaaagccgcgtcttttccgcagcttccattagactgtcgggggggcccccgcgacggcccatctaatctacagggtagccctggcccctgccttgcctctctgcatttacctctgtcaccgggtttgccggatagcatggaactcgcgaagaacaagtcaaagaaaaggcggaatagaaccactttctccacatttcagctggaggagttggagaaagtgttccaaaaaacgcattaccccgacgtgtatgctcgcgagcagttggcactacgaactgatctgactgaagccagagtccaggtctggttccagaatagacgggcaaagtggcgcaagcgtgagaggtatgggaagatccaggaaggaaggaatccattcactgctgcttacgacataagtgttcttccccgtacagacagtcaccctcaactccaaaactcactatgggcctcccccggatccggtagtcctggcggaccatgcctcgtctcccctgagggaattccatcaccctgcatgtccccatatagtcatccacacggctcagtggccggcttcatgggtgttcctgcacccagtgcagcccaccccggtatttactccattcacggatttccacctacactggggggacacagtttcgagccctcatccgatggcgactacaagagtccatccctagtcagtctgcgtgtgaagcccaaagagccgccgggactactgaactggacaacatag

SEQ ID NO: 178772 - DNA, 1236 bp, synthetic construct
  misc_feature 1..1236: note = Description of Artificial Sequence: Synthetic coding sequence
  source 1..1236: mol_type = other DNA
atgaacgccgagacctgcgtgagctactgcgagagccccgccgccgcaatggatgcctattactctcccgtaagccagagccgtgagggcagctcacctttccgcgcttttcccggtggggataagttcggtaccacgttcctctctgctgccgccaaagctcagggtttcggtgatgccaagtctcgcgcaaggtacggcgcagggcagcaggatctcgctactcctttagagagcggggccggtgcccgaggcagcttcaacaagttccagccgcagccctcaaccccccaaccgcagcctccccctcagccccagccccagcagcagcagcctcagccacagccacctgctcagcctcatctctacctgcagcgtggcgcgtgtaagactccccctgacgggtcactcaagctccaggaaggatcttccgggcactcagcagcactacaagtgccgtgctatgctaaagagagctcattgggagagccagaactgcctccagactcagataccgtcggtatggacagctcatatctctctgtaaaggaagccggagtcaagggcccccaggacagggcctcctctgaccttccgagccccctcgagaaggccgattctgagagcaataagggaaagaaacgtcgcaacaggacaacattcaccagttatcagctggaggagctggagaaagtattccagaaaactcactacccagacgtttacgccagagagcagttggccatgcggaccgatctcacagaggctcgcgtccaggtttggtttcagaacagaagagctaaatggcggaagcgggaaagattcggtcagatgcagcaggtccggacccacttttccacagcctacgagctccctttgctgaccagagctgagaactatgctcagatccagaacccatcctggcttgggaacaacggcgccgcctcccccgttcccgcctgcgtcgtgccttgtgatcccgtccccgcatgtatgtctccccatgctcatccaccagggtccggggcttcttccgtcacagattttctgtctgtgtctggggctgggtcccatgttggccaaacgcatatggggagcctctttggagccgcttcgctttcgcccgggcttaacggatatgaactgaacggcgaaccagatagaaagacctcctctatagccgctttgagaatgaaagctaaagagcacagcgctgcaattagctgggcaacctag

SEQ ID NO: 178773 - DNA, 630 bp, synthetic construct
  misc_feature 1..630: note = Description of Artificial Sequence: Synthetic coding sequence
  source 1..630: mol_type = other DNA
atgcggagcaccatcctgctgttctgcctgctgggcagcacccggtccctaccccagctgaagcctgccctgggtctaccacctacgaagttagcaccagaccaagggacactgccgaatcagcagcagtcaaatcaagtctttccaagtctaagcctgatccctttaactcagatgctgaccttaggacctgatctccacctcctgaatccagctgccgggatgacccctggtacccagacacatcccctcaccctcgggggactcaatgtgcagcagcaactgcacccacatgtgctccccatcttcgtgactcagctgggagctcaggggactatattgtcaagtgaggagctcccacaaatctttacaagccttataattcacagcctgtttccgggtggtatcctcccgacaagccaggccggcgccaaccctgatgttcaagacgggtctctgcctgcaggcggcgccggcgtgaacccagccacgcagggaacacctgccgggagattgccaacgcccagtggaaccgacgatgatttcgccgtgactacccctgccgggatacaaaggtctacacatgccatcgaagaggcaactacagagtcagccaatggcatccagtag

SEQ ID NO: 178774 - DNA, 627 bp, synthetic construct
  misc_feature 1..627: note = Description of Artificial Sequence: Synthetic coding sequence
  source 1..627: mol_type = other DNA
atgcggagcaccatcctgctgttctgcctgctgggcagcacccggagtctcccacttaagccagccctaggcttgccaccaactaaactggcaccagatcaaggaacgctgccgaaccaacagcaatccaaccaggtgtttccctctctttcactcataccactgactcagatgctgaccctggggcctgacctgcacttgcttaaccctgccgctggcatgaccccgggcacacagacccatccgctcactctggggggactgaacgtgcagcagcagctgcacccacacgtacttcccattttcgtgactcagctgggggcccagggcactattctgtccagcgaagagctcccgcaaatctttacatcattaattattcactccctgttcccaggtggaattctgcctacttctcaggcaggcgccaaccctgatgtgcaagacgggtccctgccagctgggggcgcaggggtcaaccccgccacccagggcacccccgccgggcgcttgccgaccccctccggcactgacgacgatttcgccgtgactacaccagcgggtatccagagatcgactcacgcgattgaggaagccacaacagaatcggcaaatgggatacagtag

SEQ ID NO: 178775 - DNA, 2256 bp, synthetic construct
  misc_feature 1..2256: note = Description of Artificial Sequence: Synthetic coding sequence
  source 1..2256: mol_type = other DNA
atgcccgccctgggctgggccgtggccgccatcctgatgctgcagacagccatggccgagccctcacccggcactctccctcgtaaagctggagttttcagtgacctgagtaatcaagaacttaaagccgtccactccttcctctggtcgaagaaggaactcaggctacaaccaagctcaacaacaaccatggctaaaaacacagtatttttgattgagatgttactcccaaaaaagtatcatgtgctgagattcttggacaagggtgaacggcaccccgttcgcgaagctcgagcagtgattttcttcggcgaccaggaacacccaaatgtgacggagttcgccgtgggcccattgcctgggccatgttacatgcgggctctgtcaccaaggcccggatatcagtcctcttgggccagtcgccccatcagcaccgctgagtacgctctgctataccacaccctccaggaagccaccaagccacttcaccagttttttttaaacaccaccggattctccttccaggattgccatgatcgatgtctggcatttaccgatgtagcaccgaggggagtggcctccggccagaggcggtcttggctaattatacagcggtatgtcgagggatactttctgcatccaaccgggctagaactgctggtcgatcatggctctaccgacgcaggccactgggcagtggaacaagtgtggtacaatgggaaattctatggatccccagaagagttggcccgcaaatacgccgatggagaggtggacgtggtcgtactggaggatcccctccctggcggcaagggacacgactctacggaagagcccccactcttcagtagccataagccaagaggagatttcccatctccaattcatgtctcgggccctaggctggtgcaacctcacggtcccagatttcggctggagggaaacgctgtgctgtatgggggatggagcttcgctttccggctgcggagttctagtgggttacaggtgcttaatgttcacttcgggggcgaacgaatagcctacgaggtcagtgttcaggaggcagtggccttatacggaggccataccccagccggcatgcagactaaatacctcgatgtcggttggggactagggtctgttacccacgaactggccccgggcatcgactgcccagagaccgccacctttctcgacacttttcactactatgacgccgacgatcccgtgcactacccacgtgctctgtgtctattcgagatgcctaccggggtgccgctgcggagacatttcaactctaattttaaaggcgggttcaatttctacgcagggctgaagggccaggtcctagtcctgcggacgacaagtaccgtgtacaactatgattacatctgggactttattttctatccaaacggcgtgatggaggcaaagatgcatgctaccggttatgtgcacgccactttttacactccggaggggctacgacacggcacaagactgcacacacacctcatcgggaacattcacacccacctggttcattatcgggtagacctcgacgtggccgggacaaaaaactcgttccagacactccagatgaaacttgagaacattacaaacccctggtcccctaggcacagagtggtgcagcccacactcgaacagacccagtactcttgggagcgtcaagcagccttcaggttcaaacggaagctgccaaaatacctgctcttcaccagccctcaggagaatccgtgggggcataagcgcacctacaggctacagattcactctatggctgaccaagtcctcccccctggctggcaggaggagcaggctatcacatgggctcgatatccactggccgtcaccaagtaccgggaatctgagctttgcagttcctcgatctaccaccaaaacgacccttggcaccctccagttgtgttcgaacagtttttgcataataacgaaaatatcgagaacgaggatctggttgcttgggtgaccgtggggttcttacacataccacacagtgaagacattcccaacacggcaacacctgggaactcggtgggattcctattacggccatttaactttttccctgaagacccatccttggcgagtcgtgatacggtaatcgtgtggccacgggacaatgggcccaattatgttcaacgatggatccccgaagaccgcgattgttctatgccgccacctttctcttacaacggcacataccgcccagtgtag

SEQ ID NO: 178776 - DNA, 2313 bp, synthetic construct
  misc_feature 1..2313: note = Description of Artificial Sequence: Synthetic coding sequence
  source 1..2313: mol_type = other DNA
atgcccgccctgggctgggccgtggccgccatcctgatgctgcagactgccatggccgagccctcgccgggcaccctgccccgcaaggcgggggtgttttcagatctgagcaaccaggaacttaaggcagtgcattccttcctctggtcaaagaaggaactcagactgcagccatcgagcacgacaacaatggccaagaacacagtttttctcatcgaaatgctcttgccaaagaaataccacgtcctacgatttctcgataagggagagaggcacccagtgagagaggcaagagccgttatcttttttggtgatcaagaacatcctaacgtgactgaatttgctgtgggtccacttcctggcccgtgttatatgagagcgctcagccctagaccaggatatcagagtagctgggcatccaggcccattagtaccgcagagtatgccctgctttatcacaccctccaggaggccactaagcctctacaccagttcttcctgaataccacgggcttttccttccaggactgtcacgatcggtgcctggcctttactgatgtggcacctcgcggggtggcttccggccaacggcgaagctggctaataattcagaggtacgtcgaaggttacttcctgcatccgactggcctagagctcctagtcgatcatggcagcacagacgccggtcactgggccgtggagcaggtttggtacaatggtaagttttatggcagcccagaggagctggcccggaagtatgccgacggggaggtggacgtcgtcgtacttgaggatccactgcctggaggcaagggacatgacagcactgaagaaccaccattattttcctcccataagcccagaggagacttcccttcacctattcatgtgtcaggacccaggttggtgcagccacatggacctaggttcagactagagggaaacgccgtcctctatggtggttggagcttcgctttccgtcttcggtcctcctcggggttacaagtcctgaacgtgcacttcggaggagaacgcatagcctatgaggtctctgtgcaggaggccgtggcactttacgggggtcatacccctgccggtatgcagaccaaataccttgacgtaggttggggactggggtccgtaactcatgaattagccccaggcatcgactgtcctgagacggctacattcctggatactttccactactatgacgccgacgatcctgtgcactacccacgagcactgtgcctgtttgaaatgccaacaggagtcccccttaggcgacattttaactcaaatttcaaaggcgggtttaacttttatgcgggcctcaaaggacaggtgcttgtgctgcgaacgacttctactgtgtataattacgactatatctgggacttcatcttctatcctaacggggtcatggaagcaaagatgcacgccacaggctatgtgcacgcaactttctacacccccgaagggttgcgccacggaacgaggctgcacactcatctgatcggcaacatccatactcatctggtacactaccgagtggatttggatgttgccggtacaaaaaatagcttccagaccctgcagatgaaactcgagaacatcactaacccatggagccctagacatagagtcgtgcaacccaccctggagcaaacccagtactcatgggagagacaagcagcttttagattcaagcgaaagttgcccaaatatctgctctttacatctccccaggaaaacccttggggacataaacgaacgtacaggttgcaaattcactctatggccgatcaggtcctccctcccggatggcaggaagagcaggcaatcacctgggcacgcactgagggcgggcagcctcgagccctctcacaggctgctagtcctgtccctgggcgatatcctctggcagtaacaaaatatcgggaaagcgaactgtgttcctcatccatctatcaccaaaatgatccttggcatccacctgtggtgtttgaacaatttctccataataacgaaaatatcgaaaatgaagatctagttgcatgggttaccgtggggtttctgcatatcccgcactctgaggacatccctaacaccgcaacccccggtaacagtgtcgggttcctgttgcgcccttttaactttttccccgaggatccgtccctcgctagcagagacacagttatcgtgtggcctcgggacaatggccccaactatgtgcagcggtggattcccgaggacagggactgctctatgccgccgccattttcatataatggaacctataggcccgtgtag

SEQ ID NO: 178777 - DNA, 1884 bp, synthetic construct
  misc_feature 1..1884: note = Description of Artificial Sequence: Synthetic coding sequence
  source 1..1884: mol_type = other DNA
atgcgggccctgagcccccggcccggctaccagagcagctgggcctctagacctatttccactgcggagtacgctctcctgtaccataccttgcaggaagctacgaagccgctccaccagttttttctgaacacgacaggtttctccttccaggattgtcacgataggtgcctggccttcaccgatgttgctcccagaggtgtagcaagcggacagagaaggagctggctgatcattcagaggtatgttgagggctactttctccatcccacaggtctcgagctgctggtcgaccacgggtcaaccgatgccggccactgggcagtggagcaagtatggtacaacgggaaattttacgggagtcccgaggaactcgcacggaaatatgcagatggggaggtggacgtggtcgttcttgaggatcctctgccgggagggaaagggcacgactccaccgaagagcctcctttattcagcagtcacaagcccagaggggactttccttcgccaatacatgtgagcgggcctcggctggttcagccacacgggcctcggttccggcttgaagggaacgcagtgctctacgggggatggtctttcgcctttagactccgaagttccagcggcctgcaggtgctgaatgtgcatttcgggggagagcggatcgcttatgaagtatccgtccaggaggctgtcgccctgtacggtgggcatacccccgctgggatgcaaactaagtacctggacgtggggtggggactcggttccgttactcatgagctagcgcctggcatcgactgtcccgagactgccaccttcttagatacctttcattattatgatgcagatgatccagtacattacccccgcgccctgtgccttttcgagatgccaactggagtgcctttgcgtcgtcacttcaactccaatttcaagggcggttttaacttttacgctggcctgaagggccaagtactggtgctgcggaccacctcgactgtgtataattatgattacatctgggatttcattttttatcccaatggtgtaatggaggccaaaatgcatgcgaccggctacgttcatgcaacattttacacacccgagggtcttcggcatgggacccgcttacatacacaccttattggcaacatccacacacatttggtccattaccgcgtggacctagatgtggctggcacaaaaaattcgttccaaacgctacaaatgaaattggaaaacatcaccaatccatggagtccccggcatcgagtggttcagcccaccctggaacagactcagtactcctgggaaaggcaggccgcttttaggttcaaaaggaagttgccaaagtatttgctctttacaagcccccaggagaacccctggggacataagcgaacttacaggttgcagatccattcaatggctgaccaggtcctgccacccggctggcaggaggaacaggctattacatgggctcgttatcctctagcagtgactaaatatcgtgaatccgagctgtgcagctcatccatctaccaccagaatgatccttggcaccctcccgtggtgtttgaacagttcctgcataacaacgaaaatatagagaacgaagatctggtcgcctgggttacagttgggtttttacacattcctcactcagaggatattccaaatacggccactcccggcaactccgtagggttccttctgagaccgttcaatttttttccagaggacccctccctggctagcagggataccgtaatagtgtggccccgagataatgggcctaactacgttcaacgctggatcccggaggatcgagactgcagtatgccgccgccgtttagctataacgggacttacaggcccgtgtag

SEQ ID NO: 178778 - DNA, 750 bp, synthetic construct
  misc_feature 1..750: note = Description of Artificial Sequence: Synthetic coding sequence
  source 1..750: mol_type = other DNA
atgcccgccctgggctgggccgtggccgccatcctgatgctgcagaccgccatggctgaaccttctcctggaactctgccacgaaaagccggtgtgttctcagatctttctaatcaggagttgaaagctgtgcacagtttcctgtggtcgaagaaagagcttcgactgcaacccagcagtaccacaacaatggctaagaacacagtgtttctgattgagatgctcctacccaaaaagtatcatgtcttgcgattcctggataaaggcgagaggcaccctgtgagagaggctagggccgtcatcttcttcggagatcaagaacaccctaacgtgacagagttcgccgtcgggcctctccctggcccttgttatatgcgcgcactgtccccgagacctggttaccagtctagttgggctagtcgtccaatttccaccgcagagtatgccctgttatatcatactcttcaggaagccaccaagccgctccatcagttttttctgaatacgaccggcttcagcttccaggattgtcacgatcggtgcctagctttcaccgacgtggccccccgaggcgtagcgagcggccaaagaaggtcatggctcataattcagcggtatgtcgagggatattttctgcaccctactggcttggagctgctcgtggaccacggaagcaccgacgccggccattgggccgttgagcaagtgtggtacaatggtaagttctacggttccccagaggagctgtag

SEQ ID NO: 178779 - DNA, 2256 bp, synthetic construct
  misc_feature 1..2256: note = Description of Artificial Sequence: Synthetic coding sequence
  source 1..2256: mol_type = other DNA
atgcccgccctgggctgggccgtggccgccatcctgatgctgcagacagctatggcagagccatcaccaggtacactgcctagaaaagccggcgtgttctctgatctgtcaaaccaggagctgaaagccgtgcactcctttctgtggtctaagaaagagctccggctccaacctagcagcacaactactatggcaaagaacaccgtgttccttatcgaaatgttattgcccaagaaatatcacgtgctgcgctttcttgacaaaggcgagcgccatcctgtccgagaggctagagcagtcatcttctttggagaccaggagcatcccaacgtcaccgagtttgccgtgggcccgctcccaggaccctgctatatgcgggccctaagtccaaggccggggtatcagtcaagttgggcctctaggcctatcagtacggcagagtatgccctgctgtatcataccctgcaggaagccaccaagccactccaccagttctttttgaatacgactggcttctcctttcaggattgccacgaccggtgtctcgcattcacggatgtagcacctcggggagtagcctctgggcagcgcagatcctggcttatcattcaacgatatgttgaaggttattttttacatccaaccgggcttgaactcctggtggaccatggtagtactgatgcaggacactgggcggtggagcaggtttggtacaatggcaaattttacggtagccctgaagagctggcccgcaagtacgccgatggggaagtggatgtggttgtgctggaggaccccttacctggaggcaagggacacgattctaccgaggagccaccactgttctcttctcacaagcctcgcggagactttccgagcccaatccacgtatcaggtccacgattggttcagccacacggacctagattcagactggaaggaaacgctgtactgtacggagggtggtcatttgcatttaggctccgtagcagctctggtctgcaggtgctcaacgtgcacttcgggggagagaggattgcatatgaggtcagcgttcaggaagctgtggcgctttacgggggccacactcccgccggaatgcagaccaaatatttagacgttggatgggggctaggaagcgtgacacatgagctcgcgcctgggatagattgtcctgagactgccaccttcctagacaccttccactactatgacgcagatgaccccgtccactaccccagggccctgtgcttatttgagatgccgaccggtgtgcccctgaggcgtcactttaatagcaattttaaggggggttttaacttctacgcgggtctcaaaggtcaggttctggtactgcggactacgtcaaccgtctataactacgactacatatgggactttatattttacccgaacggcgtaatggaggccaagatgcacgcaacagggtacgttcatgccacattttacacgcctgaaggattacggcacggtactcgtctccacacacacttgattggcaatatacacactcatctggtacactacagggtggacctggacgttgcagggactaaaaacagcttccagacgttgcagatgaagctggagaacataacaaacccttggagccccagacatagggttgtgcagcctaccctggaacagacacagtactcctgggagcggcaggcagctttcaggtttaaacgaaagctgcctaagtatctcttgtttacctcccctcaggagaacccatggggccataaaaggacttaccgcctgcagatacacagcatggcggatcaagtgttgcctccaggttggcaggaggagcaagcaattacatgggcccgctatccccttgctgtcactaaatacagagagtcagagctgtgttcgtcgagcatctatcaccaaaatgacccttggcacccaccagtggtgttcgagcagtttctgcataacaacgagaacatagagaatgaggatcttgtggcgtgggtgactgtcggtttcctgcacatcccccacagcgaggatatcccaaacactgccacccctggcaattccgtggggttcttgttgcggcctttcaatttttttccggaggacccctctctggcatcgcgtgatacggtcatcgtttggcccagggacaatggacccaactatgtccagaggtggatcccagaggatagagattgcagcatgccccccccattttcatacaatgggacctatcgtccggtgtag

SEQ ID NO: 178780 - DNA, 1014 bp, synthetic construct
  misc_feature 1..1014: note = Description of Artificial Sequence: Synthetic coding sequence
  source 1..1014: mol_type = other DNA
atgcccgccctgggctgggccgtggccgccatcctgatgctgcagactgcgatggcagagccctctcccggcacgctgccccgcaaggctggagtgttcagcgatctctcaaaccaggagctgaaagcagtgcacagttttctctggtctaagaaggagcttaggctgcaaccctcaagtacaaccactatggctaagaatacagttttcctcatcgagatgttgctgccgaaaaaataccacgtgctgaggtttctggataagggcgaacgacaccctgttcgcgaagcccgggctgtgatcttttttggggatcaggaacaccctaatgttactgaattcgcggtgggtcccctccctggcccatgttatatgcgcgccctttccccgagacctgggtatcagtcaagttgggcctcgagacctatctccaccgccgagtatgcgctcctataccatacgttacaagaggcaacaaaaccattgcaccagttcttcctaaacactaccggattcagtttccaggattgtcatgatcgctgcctcgccttcaccgacgtggccccccgaggagtcgcctcagggcagaggcgtagctggcttataattcagcggtacgtagaaggatacttcctgcaccccacaggactggagctgttagtcgatcacggttctaccgacgccgggcactgggccgttgaacaggtctggtataacggaaagttctacggctcccccgaggaattggcccgcaagtacgccgacggcgaagtcgatgtcgttgtgctggaagatcctctgccagggggcaagggacacgattccaccgaggagccaccattgttcagtagccacaaaccacgcggggactttccttcacctattcatgtcagtgggcccagactcgtgcagccccacggccctagattcagattggaagggaatgctgtgctgtacgggggatggtcctttgcttttcggcttcggagctccagcggcttacaagtgttgtag

SEQ ID NO: 178781 - DNA, 582 bp, synthetic construct
  misc_feature 1..582: note = Description of Artificial Sequence: Synthetic coding sequence
  source 1..582: mol_type = other DNA
atggaggccaagatgcacgccaccggctacgtgcacgccaccttctacactccagagggcctgcggcacggtactagactccatacacacttgattgggaacatccatacccacctggtgcactatcgtgtggatctggatgtagctggcacaaaaaattcattccagacgctccagatgaaactcgagaacattaccaatccgtggtctccccgccacagagtggtgcagcctaccttagagcagacgcagtactcatgggagcggcaagctgctttcaggtttaagcgaaagctccccaaatacttgctcttcacttcccctcaggaaaatccctggggccacaagcggacataccgtctgcaaattcactcgatggcggaccaggttttgccccctggatggcaagaggagcaggcaatcacctgggctagatacccgcttgccgtcaccaaataccgtgagtctgagttgtgtagcagctccatatatcatcagaatgatccgtggcatccttggagcctctcaagtttttttaccacaactagaactctgaaaatgaggacttggtggcccggatag

SEQ ID NO: 178782 - DNA, 2256 bp, synthetic construct
  misc_feature 1..2256: note = Description of Artificial Sequence: Synthetic coding sequence
  source 1..2256: mol_type = other DNA
atgcccgccctgggctgggccgtggccgccatcctgatgctgcagactgcaatggctgagccctcccctggtactctgcctcggaaagctggtgtcttctctgacctgagcaaccaggagctcaaggctgtgcattcattcctgtggtcaaaaaaagaactacggctgcagccgtcgtcgacgactacaatggcaaaaaacacagtatttcttatcgaaatgctgctgccaaaaaagtaccacgtgctgagattcctggacaagggcgagcgccatccagttagagaagcccgggccgtgattttcttcggggaccaggagcaccccaacgtgaccgagtttgctgttggtcccctgccaggcccctgttacatgcgtgccctatcccccagacctggataccaatccagctgggcttcccgaccaataagtaccgcggaatacgcactgctgtaccatactcttcaagaggcaacaaaacccctacaccagtttttcctcaacacaacaggtttttcttttcaggattgccacgaccgctgcctggcttttaccgatgtggcccccaggggtgtcgcgagcggacagagacgaagctggcttataattcagcggtacgtggaaggctacttcctccaccctacaggactggagctgctggtagatcacggtagtacagacgccgggcactgggcagtagagcaagtgtggtacaatgggaaattttacgggtccccagaggagctggcccggaagtacgccgatggagaggtggacgtagtggttcttgaagaccctcttccaggaggaaagggccatgactccacagaagaaccccccctattctcctcgcataagccaaggggggacttccctagccccatccacgttagtggtccccgcttagtgcagccccacggcccccggtttagactcgaggggaatgccgtgctctacggcggctggagtttcgcctttcgccttcggtcgagctctggcctgcaggtgttgaatgttcactttggaggcgaacgcatcgcctatgaggtctccgtgcaggaggccgtggcactgtatggagggcacactccagcaggcatgcagacaaaatatctggacgtggggtgggggctaggcagtgtaacgcatgagttggctccaggaattgactgtccagagacagcaacctttcttgacacttttcactactatgacgcagacgacccagtccattatccacgtgctctctgcctgttcgaaatgccaaccggagtgcccctacgcagacacttcaattcaaacttcaaagggggctttaacttctacgctggactgaagggccaggttttagtattgcggactacaagtacagtttataattatgattatatttgggactttattttttatcccaacggcgtgatggaggccaaaatgcatgctacaggctatgtccacgcgaccttttatactcctgagggactgagacacggcactcgattgcatactcacctgattgggaacatccacactcacctggtgcactatcgcgtagatctggatgtcgcagggactaagaatagcttccagaccctgcagatgaagttagaaaacattaccaatccatggtcacccaggcatcgcgtggtgcagccaactctggaacagactcagtactcgtgggagcgacaggccgcatttaggttcaagcgaaaactcccaaaatatctgttgttcaccagcccccaagaaaatccctgggggcataagcggacctatagacttcagatacacagtatggccgaccaagtcctacctcctggctggcaggaagagcaagccattacatgggcccggtatcccctggctgtaaccaagtatagggaatcagaattgtgctcaagctcgatctaccatcagaacgacccgtggcaccctccagtggtctttgaacaattcttgcataacaacgaaaacatcgaaaacgaggacctggtggcttgggtgacagtcggattcttgcacattccccactcagaagatattcctaataccgctactcccggtaattctgttggcttccttcttagacccttcaactttttccctgaagatcccagcctggcttcacgggataccgtcatcgtatggccccgcgataatggacccaattacgttcaaaggtggattccagaagatcgagactgctcaatgcccccgccttttagttataatggcacttatagacctgtatag

SEQ ID NO: 178783 - DNA, 1191 bp, synthetic construct
  misc_feature 1..1191: note = Description of Artificial Sequence: Synthetic coding sequence
  source 1..1191: mol_type = other DNA
atgctgcccagcctgcaggagagcatggacggcgacgagaaggagctcgaaagttcagaggaaggaggctccgcagaagaaagacggctggagcccccaagtagcagtcactactgtctgtatagttacagggggagtcgtctggcccagcagaggggcgattccgaagacggctcccctagtggaactaatgctgagactccttcaggcgacgacttctccctgagcttggcagacacaaacttgccgtctgaggtggaacctgagctgaggtcctttatcgcaaagaggctctctcgcggagctgtgttcgaggggttaggaaacgtggcctctgttgagctcaagattccgggctatagagtcgggtgttactactgcctattccagaacgaaaaactcctcccagagacggtaacaattgattccgagcggaatccctccgagtatgtggtttgttttctcggcggtagtgagaagggcttggaaacctttagactagagctggacaagtacattcaggggctcaagaacaacatgaactgtgaggcgagagggctcgaatctcacatcaagtcctacctgagtagctggttcgaggacgtggtgtgtcctattcagcgcgtcgttcttctgtttcaggagaaactaacattcttactgcacgctgctctgtcctacacaccagtggaggtaaaggagtccgatgagaagacaaagagagacattaataggttcctttcggtcgcaagcttacaggggctgatccacgaaggtactatgaccagcctgtgcatggctatgactgaggagcaacacaaaagcgtggttattgactgcagttcttctcaaccacagttctgcaacgcaggtagcaaccgcttttgtgaagactggatgcaggcattcctgaatggcgccaagggtggaaatccctttcttttcaggcaggtcctggaaaacttcaagctgaaggcgatacaggatacaaacaatctgaaaaggtttatccggcaggcagagatgaaccactacgcactgttcaagtgctacatgttccttaagaactgcggctcaggtgacatcctcctaaagatcgtcaaggtggaacatgaggaaatgccagaggcgaaaaatgtcatagctgtactggaggaatttatgaaagaggctctggatcagtcattttag

SEQ ID NO: 178784 - DNA, 1539 bp, synthetic construct
  misc_feature 1..1539: note = Description of Artificial Sequence: Synthetic coding sequence
  source 1..1539: mol_type = other DNA
atggacctgaaggagagccccagcgagggcagcctgcagcccagctccattcagatatttgcaaatacatctacactgcatgggataagacacatattcgtgtacggccctctcacaatacggagagttctgtgggccgtagcttttgtgggcagcctggggctgcttttggtggaatcttctgagcgggtgtcttactacttcagctaccagcacgttacaaaggtcgacgaagtggttgcccagtcccttgtgtttccagccgtcacactgtgcaacctgaatgggttcaggttttcgcggctgacaacgaacgatctgtaccatgccggtgagttacttgctctgctagacgtaaacctccagatacccgacccacatctggcagatccctctgtattagaggccctccgccagaaagctaactttaaacactacaagccaaaacagttttctatgctagaattcttacaccgggtgggtcatgatttgaaagatatgatgctctactgcaagttcaaaggccaggaatgtggacaccaggacttcacaactgtattcactaaatacggcaagtgctacatgttcaactctggggaggacggtaagccccttttgaccacagtgaagggtggtaccggaaatggactggagatcatgctagacatccaacaggacgaatatttacccatctggggcgaaactgaggagaccacatttgaggctggtgttaaagtgcagattcactcccagtcagagccaccttttatccaggaactaggttttggcgtggcccccggcttccagacgttcgtcgccactcaggaacaaagattaacgtatctaccccccccctggggcgaatgccggtcttcagagatggggctggacttcttcccagtttactcaatcaccgcctgtcgaattgactgcgagacccgctacattgtggagaattgcaattgtagaatggtgcacatgcccggcgacgcccctttctgcacacctgagcagcataaagaatgtgccgagcccgcactgggtcttcttgcggagaaagacagcaactattgcctctgtaggaccccttgcaacttgacgcgttacaacaaggagctgtccatggtcaagatacccagtaagactagcgcgaaatatctggagaaaaagttcaacaagtccgagaagtatatatcagagaacatactggtgctggacatcttttttgaggccctgaactacgaaactatagaacagaagaaggcctatgaggtcgctgcactcctgggcgacatcggcggtcaaatgggcctctttattggcgcgtcaatcctgactattctagagctgtttgactatatttatgagctgataaaagagaagctgttggatctgcttggcaaggaggaagatgagggttctcatgacgagaacgtaagcacctgcgacaccatgcccaatcatagcgaaaccataagtcacactgtgaatgtaccattgcagaccaccctgggcactctggaagaaattgcttgttag

SEQ ID NO: 178785 - DNA, 612 bp, synthetic construct
  misc_feature 1..612: note = Description of Artificial Sequence: Synthetic coding sequence
  source 1..612: mol_type = other DNA
atgttcaacagcggcgaggacggcaagcccctgctgaccaccgtgaaaggtggaacagggaacggtcttgaaatcatgctggacattcaacaggatgagtacttgcccatatggggtgagaccgaggaaaccacctttgaggcgggagttaaggtgcagatccattcccagagcgagcccccgttcattcaggagctgggttttggggtcgcccccggcttccaaactttcgtggctacccaggaacaaaggctaacataccttccaccaccttggggagagtgtagaagctctgagatgggactcgatttctttcccgtctacagtatcaccgcctgtagaatcgattgcgagaccaggtacattgtcgaaaactgcaattgccgcatggtgcacatgcccggggatgcgcctttttgcaccccagagcagcataaagagtgcgcggaacctgcgctcggtttattagccgaaaaagactcaaactattgcctttgtcgaacgccttgcaacttgaccagatacaataaagagctatccatggtgaaaattcccagcaaaaccagtgccaagtaccttgagaagaagttcaacaagagtgagaagtattag

SEQ ID NO: 178786 - DNA, 1287 bp, synthetic construct
  misc_feature 1..1287: note = Description of Artificial Sequence: Synthetic coding sequence
  source 1..1287: mol_type = other DNA
atggccgtgggcgccagcggcctggagggcgacaagatggccggcgctatgcccctgcaactgctgcttcttttaatattactaggccccgggaacagtttgcagctgtgggatacttgggcagatgaggcggagaaagccctcgggccgctattagcaagggacagacggcaggctactgaatatgagtatcttgactacgactttctgccagagacagaaccccccgaaatgctgcgcaatagtaccgacacaaccccacttacgggacctggcacccctgaatcgaccacggttgagcctgctgccagacgttctaccgggttggatgcaggcggagcggtcactgagctgaccactgagctcgccaatatgggtaatttatccacagatagcgctgcgatggagatacaaaccacgcagccagccgctaccgaagctcagacaacccaaccagttcccaccgaggctcagactaccccactcgcggctactgaggctcagactaccagattgaccgcaaccgaggctcagaccacccccctggcggcaactgaggcacagactacgcctccagccgctaccgaggcgcagaccacccagcctacaggactggaagctcaaactaccgcccctgccgcaatggaagcccagactactgccccagcggcgatggaagcgcagacaacacctccagctgctatggaggctcaaacaactcaaacaaccgctatggaggcgcagactacagctccagaggcgaccgaggctcagacgactcagccaacagccaccgaggcacagacgaccccactggctgccatggaagccttatcaacagaaccaagtgctaccgaggcgttgtccatggaacctacgaccaagagagggctatttattcctttttccgtttcctctgtgactcataaaggcatccccatggcagccagtaacctaagtgttaactaccccgttggtgcaccggaccacatatcggttaagcagtgcctgctcgcaatactgattctcgctctggttgcaacaattttctttgtttgtaccgttgttctcgctgtacgtttgtcacggaagggacacatgtacccagttaggaattattccccaacggagatggtgtgtatcagcagtttgctgccggatgggggtgagggcccatcagccacagccaacgggggcctctccaaagcaaagtctcctggcctgacgcccgaaccgcgcgaggacagagagggtgacgacctaacattacattcgttcctaccctag

SEQ ID NO: 178787 - DNA, 1587 bp, synthetic construct
  misc_feature 1..1587: note = Description of Artificial Sequence: Synthetic coding sequence
  source 1..1587: mol_type = other DNA
atggagctgaaggccgaggaggaggaggtgggcggcgtgcagcccgtgagtatccaggcgttcgcgtcttcaagtactctccatggtctggctcacattttcagctacgagcggcttagcctgaagagggccctgtgggctctttgctttcttggttcactggccgtactgctatgtgtttgcactgaaagggtgcagtattactttcattaccatcatgtaacaaagttagatgaagtggctgcaagtcagcttacttttcccgctgtaacgctatgcaacctgaatgagttcaggttttcccaggtgtccaagaatgacctgtaccacgctggggaacttctggccctgctgaacaaccggtatgagatccctgacacacagatggccgacgagaagcaattggaaattttgcaggataaagctaactttcgatccttcaagcccaagccttttaatatgcgcgaattttacgatagggctggacacgatatcagagatatgttattgtcatgtcatttcagaggtgaggtgtgtagcgctgaggatttcaaggtagtattcacaagatatggaaaatgctacaccttcaactcaggcagggacggcagaccacggctgaagaccatgaaaggtgggactgggaacggactggagatcatgcttgacatccagcaggatgaatacttgcccgtttggggagagaccgacgagacatcattcgaggccggaattaaagtgcagatccacagccaggatgagccgcccttcattgatcagctgggtttcggtgtcgccccgggctttcagacctttgtggcctgtcaggaacagagactgatttacctccctcccccttggggaacatgtaaggcagtaactatggactcagacctggatttcttcgattcctactccatcacggcctgccggatcgactgtgagactcgttatctggtggagaattgcaattgcagaatggtgcacatgcccggtgacgcaccctactgtaccccggagcaatataaagagtgtgccgatcctgctctggattttctggtcgagaaggaccaggaatattgtgtgtgcgagatgccctgtaacctaaccaggtacgggaaagaactgtccatggtgaagatccccagtaaagcctcagcaaaatacttagctaaaaaattcaataagtcagagcaatacatcggagagaatattttggtcttggatatcttctttgaggttttaaattatgagaccatcgaacagaagaaagcttatgaaatcgccggcctcctgggcgacattggcggtcagatgggactttttatcggcgcctctattctgacggtgctggaactctttgattacgcctacgaagtgatcaaacataagctctgccgccggggaaaatgtcagaaggaggccaagcgcagcagtgctgacaagggagtcgccctcagcctcgacgacgtgaagcggcataacccttgtgagtctttacgtggccaccctgcaggtatgacttatgccgcaaacatactgccccaccacccagcgcgaggcacctttgaggattttacttgttag

SEQ ID NO: 178788 - DNA, 1689 bp, synthetic construct
  misc_feature 1..1689: note = Description of Artificial Sequence: Synthetic coding sequence
  source 1..1689: mol_type = other DNA
atgcccatccagatcttctgcagcatgagcttcagcagcggcgaggaagctcctggaccactcggagacatctggggcccccaccaccaccagcagcaacaggacatcagcgaaagcgaggaagaggaggaggaaaaggaaaaggaggctgttagaaaagaagctagcgaaggtcacagcccaatggacctggttgcattcgctaactcttgcacgttacacggtactaaccacatcttcgttgaggggggccccggcccacgtcaggtattgtgggccgttgcgtttgtgctagcactgggggcttttctgtgccaggtgggtgatcgagtggcctactacctctcatacccacacgtcacacttctaaacgaagtggcgaccacagagctggcatttcccgctgtcaccttgtgtaataccaacgcagtgagattaagtcaattgtcgtaccctgatctgctctacctggccccgatgctgggtctcgacgaaagtgatgaccctggagtacctctggccccgccgggacccgaggctttttccggcgagccctttaacctacaccgcttctacaacaggagttgccataggctggaagatatgcttctctactgttcctaccaaggtggcccttgcggcccacataatttctctgtcgtgtttacaaggtatggtaagtgctacacgttcaactctggccgggatggtagaccaagactcaagaccatgaagggcggcaccggcaatggtctggaaattatgctggatatccagcaggacgagtatctgcccgtctggggagaaaccgatgagacttcatttgaagcagggatcaaagtacagatacacagtcaggatgaacctccctttatagaccagctgggctttggagtagctccaggcttccagacctttgtggcctgccaggaacaaagattaatttacttacctccgccttggggcacctgtaaagcagtgaccatggactcagacctcgactttttcgattcttattcaatcactgcttgccgcattgattgcgagacgcgataccttgtggaaaattgcaattgccgtatggtgcatatgcctggggatgcaccttactgcaccccagagcagtacaaggagtgcgcagatcctgccttggattttctcgtggaaaaagatcaagaatactgcgtgtgtgaaatgccatgcaacctgacacgctacgggaaagagttgtcaatggtgaagattccgtccaaggcctccgcaaaatacttggccaaaaaattcaacaagagcgagcagtacattggggagaatatcttagttctggatattttctttgaagtcctgaactacgagacaatagagcagaaaaaggcttatgaaatcgctgggcttctcggggacatcggagggcagatggggctgttcattggcgcctccatactgaccgttttggaactcttcgactacgcctatgaggtcatcaaacataaactgtgtcgtagggggaagtgtcagaaggaggctaagcgcagctcggcagataagggagtcgcgctgagtctggatgatgtaaaaaggcacaacccttgcgagtccttgcggggtcaccccgcagggatgacatatgctgctaatatcctccctcaccaccccgctcgagggaccttcgaggatttcacttgttag

SEQ ID NO: 178789 - DNA, 1650 bp, synthetic construct
  misc_feature 1..1650: note = Description of Artificial Sequence: Synthetic coding sequence
  source 1..1650: mol_type = other DNA
atgaagcccaccagcggccccgaggaggcccggcggcccgccagcgatatacgtgtgtttgcgagtaactgttccatgcacggacttggccacgtattcgggcccgggtccctgagtctcagacgtggcatgtgggcagccgcagtggttctctctgtagccacatttctgtaccaggtagctgaacgcgtgcggtattatcgcgaattccatcatcagaccgcactggatgaaagggaatcccaccgactaatattcccggctgttacactctgcaacattaatcccttgagacggtccaggctgacccccaatgacttgcattgggctggaagcgcattgctcgggttggatccagccgagcacgccgcttttctgcgcgctctgggaaggccacccgctccaccagggtttatgcctagtcctacattcgatatggcccagttgtacgcacgggcagggcacagtctggacgatatgcttctggactgcaggtttagggggcagccctgtgggccagagaatttcactactatttttacacgcatgggtaaatgttatacattcaactcaggcgcagacggcgccgaactgctaactaccactcgtggcggaatggggaatggtctggacataatgttagacgtacaacaggaggagtatctgcccgtgtggagggataatgaagaaacacccttcgaggtgggaatcagagtgcagatacattcccaggaagaaccgccaatcattgaccaacttgggctgggtgttagccctggatatcaaacgttcgtctcatgccagcagcaacagctcagtttcctacctccaccttggggcgattgcagttctgcttctttgaaccctaactatgaacctgagccctccgacccattgggaagcccaagtccctcccccagcccaccatatactctgatgggctgtcggctcgcttgtgaaacaaggtacgtagcgcgtaaatgtggctgccgcatggtctatatgccgggtgatgtgccagtctgttctccacagcaatacaagaactgtgcacatccagctatcgatgccatgctgcggaaagactcatgcgcttgcccaaatccatgtgcatccacccgatacgccaaagagttatctatggtccggatcccgagtagagccgcggcccgctttctcgcgagaaaattgaatcgcagcgaagcatacatagcagaaaacgtgctggccctcgatatctttttcgaggccctcaactacgaaaccgtggagcagaaaaaggcatacgagatgtcagagctcctcggagatattggcggccaaatgggcctatttatcggggcctctctgcttacaatactcgaaatcctggattacctgtgtgaggtctttcgggacaaggtgttgggctatttttggaatcgtcagcatagccagcgacattcttctactaatctgcttcaggaaggcttaggaagccatcgcacccaggtcccgcaccttagcctggggccatctactctgctgtgctccgaagacctgcccccactcccagtaccctctcccagactgtctcctccgcctactgcccctgcaacactttcccattctagtcggcccgccgtgtgtgttctcggggctccgccctag

SEQ ID NO: 178790 - DNA, 1596 bp, synthetic construct
  misc_feature 1..1596: note = Description of Artificial Sequence: Synthetic coding sequence
  source 1..1596: mol_type = other DNA
atgaagcccaccagcggccccgaggaggcccggcggcccgccagcgacataagagtgtttgctagcaactgtagtatgcacggcctgggccacgtgttcggaccaggctctctgtcgctgcgacggggcatgtgggccgccgccgtcgtgctctcagttgccacgttcttataccaggtcgcagaaagagtccggtactacagagaattccatcaccagaccgctctggacgaacgagagtctcatcgcctaatttttccagcggtgaccttgtgcaacattaaccccttaagacggagccggttgacacctaacgacctgcattgggctgggtcagccctgctggggttagacccagcggaacacgctgccttccttcgggcattgggtcgcccccctgccccgccaggctttatgcccagtccaacttttgacatggctcaactatatgcgcgggccggtcactccctcgacgatatgttattagactgccggttcaggggtcaaccgtgcggtcccgagaattttaccaccatctttacgagaatgggcaagtgttacacgttcaactctggcgctgacggggcagaactcttgaccacgactcgaggcggcatgggaaacggccttgacataatgttggatgtgcagcaggaagaataccttccagtgtggagagacaacgaagagacgccgtttgaagtgggaattagagtgcagatccacagtcaggaggaacctccaattatcgaccaactgggtcttggcgtatcccctgggtaccagacctttgtgtcatgccaacagcaacagctgtctttcctaccacccccctggggggactgtagctccgcttccctgaatccaaattatgaacctgaacccagcgacccgctgggtagcccaagtccttcccccagccccccttatacgttgatgggttgtagactagcatgtgagacacgatatgtcgccagaaaatgtggatgtagaatggtatacatgcccggagacgtgcccgtatgcagtccacaacagtacaagaattgcgcccaccccgccatcgatgctatgttgcggaaggacagttgtgcctgccctaacccgtgtgcctccacgcgttatgccaaagagcttagcatggtgcgcatcccaagtcgcgcagcagcccgttttttggcacggaagctgaacaggagtgaagcctatattgccgaaaatgtgctcgccctggatattttttttgaggccctcaactacgaaacagttgaacagaagaaggcttatgaaatgtctgagcttctgggggatattggaggtcagatgggactgtttattggggctagcttactgacaatcttagagatcctagattatctatgtgaggtgtttcgtgataaagtgctggggtacttctggaacaggcaacactcgcaacgccactcttccacaaatttgctgcaggaaggactgggaagccaccgtactcaggtgccacatctgagcctaggcccccggccccctacacccccatgtgctgtgaccaaaactctgtccgccagccatcgaacctgttatcttgtgacccaactgtag

SEQ ID NO: 178791 - DNA, 1632 bp, synthetic construct
  misc_feature 1..1632: note = Description of Artificial Sequence: Synthetic coding sequence
  source 1..1632: mol_type = other DNA
atgaagcccaccagcggccccgaggaggcccggcggcccgccagcgatattcgggtgtttgcctcaaactgttctatgcacggcctcggtcacgtgtttggcccggggtccctctccctgcgccgcggaatgtgggctgctgccgtggtcctgtccgttgcaacgtttctctaccaagttgccgaacgggtgcggtactacagggagttccatcaccagaccgctctggacgagagagaatctcatcggctgatcttcccagctgtgactctgtgtaacataaatccactccgcagaagcaggcttacgcctaatgatctccattgggctggatctgctctcctgggtctagatccagctgaacatgctgcctttttgcgagccctgggacgcccaccagctcctcctggcttcatgccctcccccacttttgacatggcccagctttatgctcgggctggacatagcttagacgatatgctgctggattgccgattcagggggcagccatgtggacccgagaatttcaccacgatctttacccgcatgggaaagtgctacactttcaattctggcgcagatggcgccgaattgctcactacaaccagaggcggcatgggtaacggtctagacatcatgctggatgtccagcaggaggaatacctgccagtctggagagataatgaggagaccccgttcgaagtggggatccgggtgcagatccactcccaggaagagcctcctatcatcgaccagctggggttgggcgtttctccggggtaccagacgttcgtgtcttgccagcagcagcagctgagttttttgccccccccgtggggagattgttcatccgctagtcttaacccaaactatgagcctgagccctcagatccgctgggaagtccatctccgtccccgtcccctccttacactctgatgggttgtagactggcctgcgagacccgatacgtggccagaaaatgcggatgccgaatggtgtacatgcccggggatgtgcccgtctgttcaccccagcagtacaagaattgtgcacacccagccatcgacgcaatgctgagaaaggattcatgtgcctgtcccaatccttgcgcctcgacccggtatgccaaggagctcagcatggtccggatcccctcccgggccgcagcccggtttctggccaggaaacttaacagatctgaggcatacattgccgagaacgtacttgctctggatattttcttcgaagcactcaactacgaaactgtggagcagaagaaagcgtacgaaatgagtgaactgctcggcgatataggaggacagatgggattgtttataggtgcctccctgcttactatcctggagatcttggactatctatgcgaagtgtttcgtgataaggtcctgggctacttctggaacagacagcacagccagcgacattcctccacgaacttaacgtcccacccgtccctgtgcaggcaccaagattccctgaggctacctcctcacctgttaccctgtcacacagctctcgatttattgtctgttagctccgaaccaaggcccgatatcctggacatgccctctctccacgtcgccttccccagttcacctcagatcaagagttag

SEQ ID NO: 178792 - DNA, 1944 bp, synthetic construct
  misc_feature 1..1944: note = Description of Artificial Sequence: Synthetic coding sequence
  source 1..1944: mol_type = other DNA
atgctgagcggcgccgccggcgccgcccggcggggcggcgccgccttggcccctagccttacccgttccctcgcagggactcacgcaggggctgattcctgcgcgggcgccgataagggaagccacaaagagaccatagaggaacgggacaaacgacaacagcgccagcaacgacagcggcagcaccaggggtgtggggctgctggaagcggatcagattccccgacaagcggtccccacccagtcccggtcctcttcccgctcgccctgtctctcgaggagcaaccccttcctcccctgccgctggggcgggcaccagggcttcttgcccgtgagggacaaggccgggaggccctggcgtcacctagcagcagaggacaaatgcctatcgagatagtttgcaaaataaagttcgcggaggaagatgcaaagccaaaggagaaggaggccggagacgaacaatcactcttgggcgccgtggcgcctggagctgcaccacgcgatctggccacctttgcttccacgagcactcttcatggcttggggagagcttgcggaccagggccacatggcctccgacgcacactgtgggccctcgcgctacttacctctctcgccgcattcttataccaagccgcgggcctggctaggggttacctcactagacctcatttagtggctatggatcccgcagcgccagctcctgttgctggcttccccgccgttactctctgcaatattaaccggttcagacattcagctctttccgacgctgatattttccacctagctaacctcaccggtctgcctcccaaggacagagacggacaccgagctgccggattgcgatatcctgagccagatatggtcgatattttaaatagaactggacatcaactcgctgacatgctgaagagttgtaattttagtggtcaccattgctcagccagcaacttcagcgtggtatacacccggtatggcaagtgttatacatttaacgccgaccctcggtcctccttacctagccgagcgggaggaatggggtcaggactcgagatcatgctggacattcagcaggaggaatacctgcccatatggagagaaactaatgaaacaagcttcgaagccggaattcgcgtgcaaatccatagtcaagaggaaccgccctatatccaccagttgggcttcggcgtctcacctggattccaaaccttcgtcagctgccaggagcagcggctgacttacctgccccagccctggggcaactgccgagcagaatctgagctgagagagcctgaactacaggggtacagtgcctattcagtgtctgcctgccggctgagatgtgagaaggaggctgtgctgcaaagatgccactgtaggatggtgcatatgcccgactcactgggcggaggccccgaaggaccttgtttctgtcccactccctgtaatttgacccgctacggtaaagaaatctccatggtgagaatccccaataggggttctgcccgatatctggccagaaagtataatcgaaacgagacatacatccgggaaaacttccttgtgctggacgtgttttttgaggcccttacttccgaggccatggaacagcgcgcggcttacgggctgtcagcgttgcttggcgatctgggggggcagatgggtctttttatcggcgctagcatcctgactctcctcgaaatcctcgactacatttatgaagttagctgggaccgacttaaacgcgtctggaggcgacccaaaactccccttcggacctctacaggggggatcagcacacttggtctgcaggagctgaaagaacagagtccgtgccccagccggggacgagtggagggcggcggcgtgagtagtctgctgcctaatcaccatcatcctcatggccccccgggcgggttgttcgaagactttgcttgttag

SEQ ID NO: 178793 - DNA, 2001 bp, synthetic construct
  misc_feature 1..2001: note = Description of Artificial Sequence: Synthetic coding sequence
  source 1..2001: mol_type = other DNA
atgctgagcggcgccgccggcgccgcccggcggggcggcgccgccttagcgccctcattgaccaggtcgttagccggaacacacgccggagcggacagttgtgccggagctgataaaggatcccacaaagagactatcgaagaacgtgacaagcggcagcaacgtcagcaacggcagcggcagcatcagggctgtggagccgcggggagcgggtctgattcaccaacctccggcccccatcccgtacctgtgctgttcccattggctcttagcctggaagagcagcccttgcccccccttccacttggtagggccccgggtttgctggctagggagggacagggccgcgaggccttggcctcacccagctccagaggacagatgccaatcgaaatcgtgtgcaaaatcaagttcgccgaggaagatgcaaaacccaaagaaaaagaggctggtgacgagcagtctctcctgggcgccgtcgcgcctggcgccgcacccagagacctggccaccttcgcatccacctctactcttcacggattagggcgtgcttgtgggccaggcccccatggtctgcgacggaccctgtgggccctagctcttctgactagtctggctgctttcttgtaccaggccgccgggcttgctagaggctacctcacaaggccacacctcgtcgcgatggacccagccgctccggcgccagtcgcaggcttccctgcagtcactctctgcaatatcaaccgatttaggcatagcgccctgagcgacgccgatattttccatctcgctaatttgactgggctgcctcctaaggatagggatggccaccgggctgctgggctcaggtacccagaacccgatatggtcgacatcctaaatagaaccggtcaccaactggccgacatgctgaagtcctgcaacttctctggccaccactgcagcgccagcaatttttccgtcgtttacacccgatatggaaagtgctacacatttaatgcggaccccaggtcctccttgccatctcgtgctgggggaatgggctccggtcttgagattatgttggatatccagcaagaggaataccttccgatatggcgagagaccaacgagacatcttttgaagcaggcatccgggtccaaattcactctcaggaggagcccccttacatccaccagctgggctttggcgtgagtcccgggtttcagaccttcgtcagttgccaggagcagagattgacatacctaccacaaccctggggcaactgtagggctgagagcgaactgagagagcccgagctccaagggtattcagcatacagcgtcagcgcttgccggttgcgctgcgagaaggaggccgttcttcagagatgtcactgccggatggtccacatgcccggaaacgagaccatatgtcctccgaacatttacatcgagtgtgctgatcatacactcgactccctgggaggaggcccggaaggcccttgcttctgccccaccccatgtaaccttacgagatacgggaaagagattagcatggtgagaattcccaataggggctctgcacggtatctcgcccgcaaatataaccggaatgagacttatattagggaaaatttcctggtcctggacgtctttttcgaggcactgacatctgaagcgatggagcagagggccgcatatgggctgtccgctctcttgggagatctgggaggccagatggggctgttcattggcgcgtctatattgactttactggaaatcctcgattatatttacgaggtctcttgggaccggctgaaacgggtgtggagacggccaaagacccccctaaggactagcaccggcggaattagcacccttggtctgcaggaattaaaggaacaaagcccatgccccagccggggtcgggtggagggaggcggcgtgtccagcctgctacccaaccaccatcatccccacggcccacctggcggcctgtttgaagacttcgcgtgttag

SEQ ID NO: 178794 - DNA, 2271 bp, synthetic construct
  misc_feature 1..2271: note = Description of Artificial Sequence: Synthetic coding sequence
  source 1..2271: mol_type = other DNA
atgcacctgaagatcgtgctggccttcctggccctgagcctgatcacaattttcgcactcgcctacgtgttgctgacttctcctggtggttcaagtcagccccctcattgcccctctgtgtcacatcgtgcacagccatggccccatcccggccagtctcaactgttcgccgacctgtcacgagaagagctgacagcagtcatgcgattccttacacagaggttaggacccggactcgtagacgccgcacaagcccagcctagcgacaattgcatattctccgtcgagcttcaactccccccaaaagcggccgcactagctcacttggatagaggctccccaccccccgctagggaagccctggccatcgtcctcttcgggggccagccacagcctaatgtgtcggaactggttgtaggccctttacctcacccctcatatatgagggacgttaccgtggagcggcacggtggaccactcccttatcataggagaccagtgcttcgggccgaatttacacaaatgtggagacatttgaaagaggttgagttgcccaaggccccaatctttctgagctcaacgttcaattacaacggtagcacgctcgctgccgttcatgctaccccaagaggactgcggtctggggaccgggccacgtggatggctctttaccataatatttccggggtcgggctgttcctgcacccagtaggccttgagcttctgctcgaccacagggccctcgaccccgcccactggactgtccagcaagttttctacttaggccactactacgcagacttggggcagcttgagcgggaatttaagtccggaagactggaggtcgtccgtgtgccgctgcccccccctaacggtgccagcagtcttagaagtcgtaattctcctggcccactaccaccactgcaattttccccacaaggcagccagtatagcgtccaggggaacctggtggtgtcatccttgtggagttttacattcggtcacggagttttttctggactgaggattttcgacgtgcggtttcagggggaaaggattgcctacgaggtatctgtacaggagtgcgtgtcaatctacggcgcagattccccgaaaaccatgctgacacggtacttggacagctcatttggtctgggtagaaatagccgaggtctggtccgaggggtggactgtccatatcaggctaccatggtggacatccacattctcgttggcaagggtgctgtacagctgctaccaggcgctgtctgcgtattcgaagaggctcagggactgcccttgcgtcgccatcataattaccttcagaatcacttctacggaggcttggcctcctctgcattggtggtgagatctgtcagcagcgttggcaattatgactatatctgggactttgttctctatcccaatggcgctctggagggaagagtgcatgccaccggctacatcaataccgctttcttaaaaggaggggaggagggccttctgtttggcaatagggtcggagagagggtgcttggaaccgttcatacacacgcctttcactttaagcttgatttggacgttgctggactgaaaaactgggttgtggcagaagatgtcgtctttaagcccgtcgccgccccgtggaacccagagcactggctgcagagaccacagcttacacgccaagtccttgggaaagaggatctgactgcgttttcgctcggcagtcctcttccaaggtatctgtatcttgcctctaatcaaacgaatgcctggggtcaccagcgcggttatagaatccaaatccacagtcccctcggcatccatataccattagagtccgacatggagcgggccctgtcctggggtagatatcagctggtcgttacacagcgaaaagaggaggagtcccaatcgtcaagcatatatcatcaaaatgacatttggacaccaacggtcaccttcgctgattttattaacaacgagaccctgttgggggaagatctggtcgcatgggttaccgcttcatttctgcatattccgcacgctgaggacatcccaaataccgtgaccttgggaaatcgcgttggtttcctcctaaggccatataacttctttgatgaggacccttcaattttcagccctggaagtgtttattttgagaaggggcaggatgccggcctgtgttctattaatccagtggcatgtctacccgacttggccgcatgtgtgcccgacctcccgcctttctcctaccacggcttctag

SEQ ID NO: 178795 - DNA, 2190 bp, synthetic construct
  misc_feature 1..2190: note = Description of Artificial Sequence: Synthetic coding sequence
  source 1..2190: mol_type = other DNA
atgcacctgaagatcgtgctggccttcctggccctgagcctgatcacgatattcgcgttagcatacgttctgttaacctccccaggtggttcaagtcagccaccacattgcccgtctgtctcacaccgggcccaaccatggccgcaccctggccagtcacagttgttcgcagatctgagcagagaggagctgaccgcagtgatgcgcttcctcacccaacgactaggtcccggactggtggacgccgctcaggcccaacctagcgacaactgtatcttttctgtcgaactgcagctccctccaaaagcggccgccctggctcacttggacagagggagccccccccccgccagagaagccctggcgatcgtgcttttcggcggccagcctcagcccaatgttagtgagctggtggtgggccctctaccacacccatcttacatgcgggacgttactgtggagcgccacggcggccccctgccttaccatagaagacccgtcctccgtgccgagtttactcagatgtggaggcacctcaaggaagtggagctgcctaaggcaccaattttcctgtcctccacgttcaattataacggctccactctggccgcagtccatgcgacaccccgaggtctgcggtctggcgacagggccacatggatggctctgtaccacaatatctcaggagtgggtttgttcttgcatcctgtcgggttggagcttctccttgaccatcgggctctcgatcccgcacactggacagtgcagcaggtgttctatctgggccactactacgctgatttgggccaactggaacgcgaattcaagagcggtcgtttggaggtggtgagggtgcccctgcctcctccgaatggagctagctccctgaggtcaagaaattcccccggtccactcccccctctccaattcagtccgcaggggtctcaatattcagtgcagggaaatctggtggtttcttccctctggagcttcacctttgggcacggcgtattctccgggctgcgaatattcgacgttagattccaaggggagcgcattgcctatgaagtgtctgtgcaggaatgtgtgtctatctacggggctgactcccctaaaaccatgctgacccgctatctggacagctcattcggcctgggtcgcaactcccgggggctggtgcgtggggtggactgtccctaccaggctaccatggtcgacatacacattctggtcggtaagggggctgtgcagctactgcctggcgcggtgtgcgtgttcgaggaggctcaaggcttgcctctgagacggcaccacaactacttgcagaatcatttctacggcgggctggcatctagtgccctcgtggtacgctcagtttcaagtgtggggaactatgattatatttgggatttcgttctgtatccgaatggagctctggaggggcgagttcacgccaccggatacatcaacaccgcttttctcaaagggggggaagaaggtctgctgtttgggaaccgcgtcggtgagagagtgctcggaactgtgcacacacacgcgtttcattttaagctggatcttgacgtcgccggactgaagaactgggtggtggccgaagacgtagtgtttaaaccagtcgccgctccctggaaccctgaacactggcttcaacggccccagctcacgaggcaggttctcggaaaagaggatcttacagcgttttccctggggtctcccctaccaaggtatctttacctcgctagcaaccagaccaatgcatgggggcaccaacgaggatatcaactagtggtgactcaacgcaaggaggaagagtctcaaagctcttcgatctaccaccagaatgacatctggacacccactgtcacttttgccgacttcatcaacaacgagaccctcctgggcgaggatttagtggcttgggtcacggcttctttcttacatatccctcacgctgaggacattcctaacaccgtgactcttggcaatagagtgggcttcctgcttcgcccttacaacttcttcgatgaagaccccagtatctttagtccgggcagtgtgtacttcgagaaagggcaagacgctggcctatgctctattaaccctgttgcttgtctcccagacctcgccgcctgcgtgcctgatctacctcccttttcgtatcacgggttttag

SEQ ID NO: 178796 - DNA, 2292 bp, synthetic construct
  misc_feature 1..2292: note = Description of Artificial Sequence: Synthetic coding sequence
  source 1..2292: mol_type = other DNA
atgaaccagaagaccatcctggtgctgctgatcctggccgtgatcacaatttttgctttggtgtgcgtactgctcgtggggcggggtggcgacgggggtgaaccttcccaactgccacactgcccatccgtatccccctctgcccagccatggacccatcccggccagtcacaactcttcgcagacttatcaagggaagaactgacagcggtgatgaggtttctgacccagcgcctgggccctggacttgtggacgctgcccaggctaggccatctgacaactgcgtatttagcgtggagctacagctgccaccaaaggccgccgcccttgcccatttagaccgcggctcccctccccccgctcgagaggccctggccattgtatttttcggccgccaaccccagccaaacgtttcagagctggtggtgggaccccttccgcacccttcctacatgagagacgtaacggttgaacgacacggagggccccttccctaccatcgtcgccccgttctcttccaggagtacttagacatagatcaaatgatctttaaccgcgagctcccacaggcctccggtttgcttcaccactgttgtttttataaacaccggggccggaacctggtcactatgaccactgcaccgaggggactgcagtcaggcgaccgggccacctggttcggactttactataatatttcaggggccggcttttttttacaccacgtaggactggagctcttggtgaaccacaaagccctcgaccctgccaggtggacgatccagaaagtgttttaccagggaagatactatgattcgctagctcagctcgaggcccagtttgaggcaggacttgtgaatgtcgtcctgatccccgacaacggaacgggaggctcctggagcctaaaaagccctgtgccacccgggcccgctcccccactgcaattttaccctcaaggcccccgtttctcagtgcagggctcccgggtcgcctcttctctctggacattcagttttggccttggtgctttctcaggcccaaggatatttgacgtccgttttcagggagagaggctggtttatgagatttccctacaggaagctttggccatctatggcggcaattcacctgctgccatgaccacaagatacgtggatggaggctttgggatgggaaaatacactacacctctgacacgaggagtcgactgcccctatctcgccacttacgtcgattggcatttcctgctcgagagtcaggcacctaaaacaatcagagacgccttttgcgtatttgagcaaaaccagggactgcccctccgccgacatcacagcgatttgtacagtcattacttcggcggactggccgaaactgtccttgtcgtgagatctatgagtacgctgcttaactacgattacgtttgggacaccgtgttccatcctagtggagccatcgaaattcgtttctatgcgaccggttatatcagctcggcattcttgttcggagcaactggaaagtatgggaatcaggtcagcgaacataccctgggcaccgttcacacccacagcgcacacttcaaggttgacctggacgtggcaggacttgagaactgggtctgggctgaggacatggtgtttgtacctatggccgtcccgtggtctccagaacaccagctgcagcggcttcaggtcacgaggaaattactggagatggaagagcaggccgcatttctggttggttctgctacaccacgctacctttacctagcgagtaaccatagcaacaaatggggccatccacgaggctatcgtattcagatgttgagcttcgcaggggaacctctgccacaaaattcatctatggcacgcggatttagttgggaacgttatcagctggccgtcacgcagagaaaggaggaggagccctcttccagttccgtgttcaaccagaatgacccttgggcccccacagtggattttagcgacttcataaacaatgagaccatcgcagggaaagacttggtagcctgggtaaccgccggctttctgcatatcccccacgccgaggatatacccaacacagtgaccgtaggaaatggggtcggatttttcctgaggccatacaacttctttgacgaggatccttctttctacagtgctgatagcatatatttccgaggcgatcaggacgccggggcttgtgaggtgaaccctctggcctgtctgccccaagccgccgcttgcgctccggatttacccgcattttctcacggcggtttttctcataactag

SEQ ID NO: 178797 - DNA, 939 bp, synthetic construct
  misc_feature 1..939: note = Description of Artificial Sequence: Synthetic coding sequence
  source 1..939: mol_type = other DNA
atggccaacaacgacgccgtgctgaagcggctggagcagaagggcgcagaggctgaccaaattatcgaatacctcaagcaacaggtgagcctcctgaaagaaaaagcaatcttgcaagcgacactccgtgaggagaaaaaactgcgcgtggagaacgctaagcttaagaaagagatcgaggagctgaagcaggagctgatccaggccgaaattcaaaatggggtaaaacagatacctttcccctctgggacacccctgcacgctaattcaatggtaagcgaaaatgtgatacagagcaccgcggtgactactgtctcgtctggcaccaaggagcaaatcaaaggagggaccggcgatgaaaagaaggccaaagaaaaaattgagaagaagggagagaagaaagaaaaaaaacaacagtcaatcgccggaagcgctgattcaaaacctatcgatgtatctcggttagacctaagaattggatgtatcattacagcgaggaagcaccccgatgctgattccttatacgtggaagaggtagacgtgggggaaattgccccccggactgtggtctctggactcgttaaccacgtgcctctggaacagatgcagaaccgaatggtgatacttctttgtaacctgaaacctgccaagatgcggggtgtcctgtctcaggccatggtaatgtgcgcctccagccctgagaagattgagattctcgctcccccgaacgggtctgttcctggagataggatcacatttgatgcatttcccggcgaacccgacaaagaacttaacccaaagaaaaagatttgggagcagatccagcctgacctccacactaatgacgaatgtgttgctacctacaagggcgttccgtttgaggtgaagggcaaaggtgtttgtagagcccagactatgagcaacagtggtatcaaatag

SEQ ID NO: 178798 - DNA, 1011 bp, synthetic construct
  misc_feature 1..1011: note = Description of Artificial Sequence: Synthetic coding sequence
  source 1..1011: mol_type = other DNA
atgctgcccgccgtggccgtgagcgagcccgtggtgctgcggttcatgatattttgtcgactgctggctaaaatggcaaacaacgatgccgtgctaaagagacttgaacagaagggggctgaggccgatcagattatcgaatatctgaagcagcaggtgagtttactcaaggaaaaggccatcctccaggctacactgagggaggaaaaaaagttgcgtgtggagaacgccaagctcaagaaagagattgaagagctgaagcaagagctaatccaggcagaaatccagaacggcgttaagcagattccatttccctctggcacgcctttgcacgccaattctatggtatccgagaacgttatccaatccaccgccgtgaccaccgtctctagcggtactaaggagcaaatcaagggcggtacaggagacgagaaaaaggccaaagagaaaatcgaaaagaaaggggagaaaaaggagaaaaagcagcagtccattgcgggctctgccgattctaagccaatcgacgtttctcgcttagacctgaggatcggctgcatcattaccgcacgcaaacatccagacgccgattcactctacgtggaggaggtggacgtgggagagatcgccccccgtaccgttgttagcggcctcgtgaaccatgtaccactggaacagatgcagaaccgcatggttatcctgctatgcaatctaaaaccggcgaagatgcggggcgtgctttcccaagctatggtcatgtgtgccagtagtccagagaagatcgaaatccttgcgcccccgaacggttccgttcctggcgaccggattaccttcgacgccttcccaggggagccagataaggagcttaatccaaaaaaaaaaatctgggaacagatccagcctgatctgcatacgaatgatgagtgtgtagcaacatataagggcgtaccgttcgaggttaagggcaagggggtttgccgggctcagacaatgtccaatagcggaatcaaatag

SEQ ID NO: 178799 - DNA, 810 bp, synthetic construct
  misc_feature 1..810: note = Description of Artificial Sequence: Synthetic coding sequence
  source 1..810: mol_type = other DNA
atggccaacaacgacgccgtgctgaagcggctggagcagaagggcgctgaggccgaccaaataatagagtacctcaaacagcaggtgagtctgcttaaagaaaaggccattttgcaggccactctcagggaggaaaagaaactgcgagtggaaaacgccaagctaaaaaaggaaatcgaagagcttaagcaggagctaatacaggccgagatccagaacggagtgaagcagatcccatttccatctggtacgccactccatgcaaacagcatggtttcagagaacgtcattcagtccaccgcagtcacaactgtgtccagtgggaccaaggagcagatcaagggtggaaccggcgatgaaaagaaagccaaagagaaaattgaaaagaaaggtgagaagaaggagaagaaacagcaaagcattgcaccaagaaccgtggtcagcggcctggtgaaccatgtgcccctagagcagatgcagaacagaatggttatcctgctttgcaacctgaaacccgccaagatgcgaggcgtcttatcccaggcaatggtgatgtgcgccagttcccccgagaagattgaaatcctggcacctcctaatggcagcgttccaggggataggatcactttcgacgcttttcctggggagcccgataaggaacttaacccaaaaaaaaagatctgggagcagatccagcctgatcttcatacgaacgacgagtgtgtggctacttataagggcgtgccttttgaggtgaaagggaaaggcgtctgcagagcccagacaatgagtaactccggtattaagtag

SEQ ID NO: 178800 - DNA, 939 bp, synthetic construct
  misc_feature 1..939: note = Description of Artificial Sequence: Synthetic coding sequence
  source 1..939: mol_type = other DNA
atggccaacaacgacgccgtgctgaagcggctggagcagaagggcgctgaagccgatcagatcatcgagtacctgaagcagcaagtgtccctgctcaaggagaaggcaatccttcaggccactctgagggaagaaaaaaagctgcgcgtggagaatgctaaattaaaaaaggagatcgaagagctgaagcaagaactgatacaggccgagatccagaatggggtgaagcagataccctttccatccggcacccctcttcacgccaacagtatggtgtccgaaaacgtcatccaatccacagctgtaacaaccgtaagcagcggaaccaaggagcaaatcaagggtggcacgggagacgaaaaaaaagccaaagagaagattgaaaaaaagggcgagaagaaagagaaaaaacagcaaagcatcgctgggtccgcagattctaagcccatcgatgtctcacgtctcgacctgcgtatcggctgtatcatcacagctaggaagcaccccgatgccgatagtctgtacgtggaggaagtggacgtgggcgaaattgcccctaggactgtggtgtccggactcgtgaaccacgtccctttagaacaaatgcagaatcgcatggtgattctcctgtgtaacttgaagcctgctaagatgcggggcgtccttagccaagcgatggttatgtgcgcatcatctccggagaaaatcgaaatcttagccccaccaaacgggagtgtcccaggggatcgaattacctttgatgcttttcctggtgaacccgacaaggaactgaacccgaagaagaaaatatgggagcagatacaaccggaccttcacactaacgacgaatgtgtggcaacatacaaaggagtcccatttgaagtgaaaggaaagggggtgtgccgggctcagacaatgagtaatagcggcatcaagtag

SEQ ID NO: 178801 - DNA, 453 bp, synthetic construct
  misc_feature 1..453: note = Description of Artificial Sequence: Synthetic coding sequence
  source 1..453: mol_type = other DNA
atggccaacaacgacgccgtgctgaagcggctggagcagaagggcgccgaagcagaccagattattgagtatttaaaacaacaagtctccctcctgaaggagaaagcaatactccaggctaccctgcgagaggagaagaagttacgtgttgagaacgccaaactgaaaaaggagattgaagaactcaagcaggagctgatccaggcagagatccagaatggtgtgaagcaaatcccttttcctagtggcacaccactgcacgccaattccatggtctcagagaacgtgatccagtctacagcagttaccacagtcagtagtgggacaaaggagcagattaagggcggcactggagacgagaagaaggctaaagagaaaatcgagaagaaaggcgagaaaaaagaaaaaaagcagcagtcaatcgcaggatccgctgatagcaagcctatctag

SEQ ID NO: 178802 - DNA, 1227 bp, synthetic construct
  misc_feature 1..1227: note = Description of Artificial Sequence: Synthetic coding sequence
  source 1..1227: mol_type = other DNA
atgaccagcaagggccccgaggaggagcaccccagcgtgaccctgtttcggcagtacttaagaatccgtacagtgcagccaaagccagattatggagccgccgtcgcctttttcgaagagacggcgagacaactcgggctcggctgtcagaaggttgaggtggcccctggctatgtggtgaccgtgctcacatggcccggtaccaaccccacacttagttctatacttcttaacagccataccgacgtcgtgcccgtcttcaaagaacactggagccatgatccttttgaagcttttaaagattccgagggctatatttacgctagaggggcacaagacatgaagtgtgtgtcaatccagtatctggaggccgtgcgaaggctgaaagttgaaggccataggttccccaggaccatccatatgacgttcgtgccagacgaggaggtcggcggtcatcaggggatggagctttttgtccaacggccagaattccacgctctgcgcgctggatttgctctggacgaagggatcgcaaaccccacagatgccttcacagtgttttactcggagaggtcaccctggtgggtgcgagtgacgtcgactgggcgcccaggacacgcttctcgcttcatggaagatacggccgccgaaaagctgcacaaagtggtcaattcaatactggcgtttcgagagaaagagtggcagcgcttacaatcgaaccctcacctgaaagaggggtccgtcacatctgtgaaccttacaaaactggagggcggggtagcttacaacgtgatacccgctaccatgtctgctagcttcgattttcgcgtagcaccggatgtcgattttaaggcatttgaagagcaacttcagtcctggtgtcaggccgcgggggagggggttacgttagagttcgcgcaaaagtggatgcaccctcaggtcaccccgaccgatgatagtaatccatggtgggccgcattttctcgcgtgtgtaaagatatgaacctgactctcgaacccgagattatgcccgctgccacggataaccggtacattagagccgtgggagtacctgccttgggattcagcccaatgaacagaacccccgtcctgcttcatgatcacgatgaacgactgcatgaagctgtgttcctgagaggagtggacatctacacacgtttgctgccagcgctggctagtgtacctgcactgccctctgatagctag

SEQ ID NO: 178803 - DNA, 1497 bp, synthetic construct
  misc_feature 1..1497: note = Description of Artificial Sequence: Synthetic coding sequence
  source 1..1497: mol_type = other DNA
atgtggggctgccaggcccccctgagccggctgcccgccagcggcgaaacccctatgtcccagtcatggctggtgtccccactggctactcggccgtccttcactgctcgctgtagtcattctacccgtcacactggatggcgatggtgttgcttcatggagagacctctgaccctaacccgcggtagtagctgggcacattgctcctattgccatagaggcgctactggcccatggccacttacctttcaactgactacccggagcgccatgacaagcaaaggccctgaggaagagcatcccagcgtgacgctgtttagacagtacttacgcatcaggacagtgcagccgaagcctgactatggagccgcagtcgctttctttgaggaaacggccagacagctcggcttaggatgtcagaaagtagaggttgcgcccgggtacgtcgtcacggtgcttacatggccaggtaccaatcccacacttagctccattcttctgaactcccacaccgatgtggttccagttttcaaggaacattggagccatgaccctttcgaggccttcaaggattcagagggatacatttatgctaggggagcccaagacatgaagtgtgtgtctatccagtatctagaggcagtacggcgcctcaaggtggagggacaccggtttccgcgcacaatacacatgacttttgtccccgatgaagaggtcggcgggcatcagggaatggagctgttcgttcagaggcccgaattccatgcactgagagccggctttgctctggatgagggtatcgccaatcctaccgatgcattcaccgtcttttattcggaacggagcccctggtgggtgcgcgtgacatctacgggtagacccgggcatgcctcacgctttatggaggatacggccgccgagaaattgcacaaggtggtgaatagcatattggcatttagggaaaaagagtggcaacggctgcagagcaatcctcatttaaaggagggttctgtgacaagtgtaaaccttacaaagctggagggcggcgttgcgtataacgtaatcccagctacaatgagcgcgtcttttgacttccgagtggcaccagacgtggactttaaagcttttgaagagcagctgcagagttggtgccaagccgctggagagggggtcaccctggaattcgcacagaagtggatgcatcctcaggtcacccccacagacgacagcaacccttggtgggccgccttcagtagggtttgcaaggacatgaatctgaccctcgagcccgagataatgccggctgctacagataatcgttacattcgagcggtcggagttccagcacttggcttcagtcctatgaatagaacgccagtgttgctccacgatcatgatgagcgcctgcacgaggcggtatttttaaggggcgttgatatttatacgcggctgttgccagctctggcctcagttccagcgctgccatctgattcctag

SEQ ID NO: 178804 - DNA, 1122 bp, synthetic construct
  misc_feature 1..1122: note = Description of Artificial Sequence: Synthetic coding sequence
  source 1..1122: mol_type = other DNA
atgaccagcaagggccccgaggaggagcaccccagcgtgaccctgtttagacagtatcttaggattcgaaccgtgcaacctaaacccgattacggaaccaatcctacactttcctcgatactcctcaacagccataccgatgtagtcccagtgtttaaggaacactggtctcacgacccatttgaggcatttaaagattccgaaggttacatttacgcgcggggtgctcaggatatgaagtgcgtgtctatacagtatttggaggctgtaaggagactgaaagtagagggccaccggttcccccgtacgattcatatgacctttgtgccagatgaagaagtcggaggccatcaggggatggagcttttcgtacagagacccgaattccacgctctgcgggctgggttcgccttggacgaaggcatcgctaatccaacagacgcctttaccgtgttttactcggagagaagtccgtggtgggttagggtgacgagtaccggtcgtcctggccatgcttctcggttcatggaagataccgcagccgagaagcttcataaagttgtgaatagtatactcgcttttagagagaaggagtggcaacgactacagagcaacccacacttgaaggaaggctcagtgacgagtgtcaacctcaccaaactggaagggggtgtcgcttataatgtgatcccagccaccatgagcgcttcctttgatttccgggttgcccctgatgtcgattttaaggcttttgaagaacagctccagtcctggtgtcaggccgccggtgagggcgttacgttggagtttgctcagaaatggatgcatccccaggttacaccaacagatgattccaatccctggtgggcagccttcagtcgtgtctgtaaggacatgaatctgaccctggaacctgaaataatgcccgctgctactgataataggtatattagagcggtaggggtgcctgccttggggttcagcccaatgaacaggacccctgtccttctgcacgaccacgatgaaaggctacacgaggccgtttttcttcgaggagtggatatttataccaggctgcttccggcactggcctctgttccagccctgccctcagattcatag

SEQ ID NO: 178805 - DNA, 1032 bp, synthetic construct
  misc_feature 1..1032: note = Description of Artificial Sequence: Synthetic coding sequence
  source 1..1032: mol_type = other DNA
atgaccagcaagggccccgaggaggagcaccccagcgtgaccctgttccgccaatacctgagaattaggaccgtgcagcccaagcctgattatggggcggcggtggcctttttcgaggagacagccaggcaactcgggctgggatgtcagaaagtggaggtcgctccagggtacgtggtaaccgtgctcacctggccggggacaaatcctacgctgtcttcaattctcctgaacagccatactgatgtggtgccagttttcaaggaacactggtctcatgatccttttgaggcctttaaggacagtgagggatacatctatgctcggggcgcccaggacatgaaatgcgtctccattcagtacttagaggcggtaaggaggctgaaagtggagggccaccgctttcctcgtaccattcatatgaccttcgtgccggatgaggaggtcggtggccaccagggcatggaactgttcgtccagaggcccgaatttcacgcacttcgtgcaggttttgcgttggatgaaggcatcgccaacccaaccgatgcctttaccgttttttacagcgagcgttcgccatggtgggtgagagtcaccagtactggccgccccggccacgcttctcggtttatggaggacaccgctgcagaaaaactcgcttttgaagaacagctgcagagctggtgtcaagcagctggagaaggagtaacattagagtttgcccagaagtggatgcatccacaggttaccccaaccgacgactccaacccttggtgggcagccttctctcgcgtgtgtaaggacatgaacctgactctcgagccggagattatgccagctgccacagacaaccgatatattagagccgtcggtgtcccagctctggggttctccccaatgaatcggacgcctgtgctgttgcacgatcacgacgaacggctgcacgaggcagtgtttctgcgcggtgtggacatttatacacgactactccctgccctggcttccgtgcccgccttaccctctgatagttag

SEQ ID NO: 178806 - DNA, 1011 bp, synthetic construct
  misc_feature 1..1011: note = Description of Artificial Sequence: Synthetic coding sequence
  source 1..1011: mol_type = other DNA
atgaccagcaagggccccgaggaggagcaccccagcgtgaccctgtttcgtcaataccttagaatcaggaccgttcaacccaagccagactatggtgcagccgtggcatttttcgaagagaccgctcgacagttgggtctcgggtgtcagaaagttgaagtggcgccaggctatgttgtcacggtcctgacctggccaggtactaatccaaccctgtccagcatcctgctcaattctcacactgacgttgtcccagtgttcaaggagcattggtctcatgatccatttgaggcatttaaagactccgaaggtatcgccaatccgactgacgcattcactgttttctacagtgagcggtcaccatggtgggtgagagtgactagcacggggaggcctgggcacgcttccaggtttatggaagatactgccgctgaaaagctccacaaggttgtcaactcaatcttagcgtttagagaaaaggagtggcagcggctccagtcaaacccacacctcaaagagggttccgtgaccagtgtcaatcttaccaagctcgaaggcggggttgcctacaacgtgatcccagccaccatgagtgcgtcttttgatttcagggttgcgcccgatgttgatttcaaagcttttgaagaacagcttcagtcctggtgccaggccgccggtgagggcgtgactctcgagttcgctcaaaaatggatgcacccacaagtgacaccaaccgatgacagtaacccatggtgggccgcattctccagggtctgcaaggatatgaacttgaccctcgagcctgagattatgccggccgccactgataaccgatacatccgcgccgtgggtgtacctgctctaggcttctcacctatgaaccggacaccagttctccttcatgaccatgacgagagactccatgaagccgtcttcttacgcggggtcgatatttacacccgtttactgcccgccttagcttccgtccccgccctacccagcgacagctag

SEQ ID NO: 178807 - DNA, 1278 bp, synthetic construct
  misc_feature 1..1278: note = Description of Artificial Sequence: Synthetic coding sequence
  source 1..1278: mol_type = other DNA
atgaactacgcccggttcatcaccgccgccagcgccgcccggaaccccagtcccattcgtaccatgaccgacatactctctcgtggaccaaagtccatgatttcactggcaggcggcctcccaaaccccaacatgttcccattcaagaccgccgtgatcactgtggagaatggcaagacaattcagttcggggaggagatgatgaagagggctcttcagtattccccatctgcaggcatccccgagctccttagttggttaaaacagctacaaattaaactccataatccacctaccatccactaccctccttcccaggggcaaatggatctgtgtgtaacgtccgggagccagcaagggctctgtaaagttttcgagatgatcattaaccccggggataacgtgctactggatgaacccgcctactctggcaccctgcaatcattgcaccccttagggtgcaacattattaatgttgcgtccgacgagagtggcattgtgccggattcgttgagggatattctgtccagatggaagcccgaagatgctaaaaatccgcagaagaatacgcccaagtttctgtacacagtgcccaatggcaacaatcccaccgggaattctctgaccagtgagcggaaaaaagagatttatgagctcgccaggaaatatgatttcttgatcatcgaagatgatccttactattttctgcagtttaataagtttcgcgtgcccacctttttgagcatggatgtggatggtagagtgatccgggccgacagcttcagtaagatcatcagctctggcctccgcatcgggttccttactggtccaaagcccctcattgagagagtgatcctgcatatccaggtatctactcttcatcccagcacatttaaccagctgatgattagtcagttgctgcacgaatggggcgaagaggggttcatggctcacgtcgaccgggtcatcgacttttacagcaatcagaaggacgctatcttagccgctgctgataagtggctgaccgggctcgcagagtggcatgtccctgccgccggaatgttcctgtggattaaagtgaaggggatcaatgatgtcaaggagctcatcgaagagaaggcggtgaagatgggcgttctgatgctccctggcaatgccttctacgtagattcttctgccccttccccatatctgcgggccagcttctcctccgcctcacctgagcaaatggatgtggcattccaggtgctcgctcagctgataaaggagtctctctag

SEQ ID NO: 178808 - DNA, 1278 bp, synthetic construct
  misc_feature 1..1278: note = Description of Artificial Sequence: Synthetic coding sequence
  source 1..1278: mol_type = other DNA
atgaactacgcccggttcatcaccgccgccagcgccgcccggaacccctcaccaatccggacaatgacagatatcctgagtcgcggccctaaaagcatgatatccctggccgggggcctgccaaatccaaacatgtttcccttcaaaacagccgtgattaccgttgaaaatgggaagactatccagttcggagaggaaatgatgaagagggcgctgcaatactcaccctccgcagggattcccgagttgctctcatggctcaaacagctgcagatcaaattgcataaccccccaaccatccattatccaccatcccaaggccagatggatctgtgtgtgaccagcggcagccagcaggggctgtgcaaggtgttcgagatgatcataaacccaggggataatgtgctgctggatgagcccgcttactccggaacccttcagtctcttcaccccctgggttgtaatatcattaacgtcgccagcgatgagtcaggcatcgtgccagactcacttagggacatactctctaggtggaaacctgaagacgctaaaaacccacagaaaaatacgccgaagttcctgtacacggtcccaaacggtaacaaccctacaggcaattctctgacttcagaacggaagaaggaaatctatgaacttgcaaggaaatatgacttcctcatcatcgaggatgacccttactactttcttcaattcaacaaattccgtgtccccacattcctgagtatggacgtagatgggagagtgattcgggccgattctttctctaagatcatcagcagcggcctaagaattggttttctgaccggccccaaacccctaatcgaacgggtaatactgcacattcaggtttcaacgctccatcccagcaccttcaatcagctgatgatttcacagctcctgcatgaatggggcgaagaagggttcatggcgcacgtggacagagtgatcgacttctactctaaccagaaagacgccatattagcagccgccgacaagtggttaaccgggctggccgagtggcacgtgccagccgcgggcatgttcttatggataaaggttaagggaattaatgacgtaaaggagctgatcgaagagaaggctgtcaagatgggtgttctgatgcttccagggaacgcattttatgtcgatagcagcgccccttctccttacctgagggcatcgtttagtagcgcgagtccagaacagatggacgttgcgttccaggttcttgcacagctgatcaaagaatccttatag

SEQ ID NO: 178809 - DNA, 543 bp, synthetic construct
  misc_feature 1..543: note = Description of Artificial Sequence: Synthetic coding sequence
  source 1..543: mol_type = other DNA
atgaactacgcccggttcatcaccgccgccagcgccgcccggaaccccagcccaattcgcactatgaccgacatcctcagtcggggtccgaagagcatgatcagcctagctgggggcctcccaaaccctaatatgtttccgttcaaaaccgccgtaataactgtggagaacggaaaaactatccagtttggggaggagatgatgaaaagggcccttcaatatagtccaagcgcaggcattcctgagctactctcctggctcaaacaactgcagattaaactccacaacccccccaccatccattacccaccttcccaggggcagatggacctctgtgtgacaagtgggagccagcagggcctctgtaaggtgttcgagatgatcataaacccgggggataacgtgcttctcgatgaacctgcttactctggcactctccagtctttacaccctctagggtgtaacatcattaatgttgctagcgatgagagtggcatcgtgccagattcccttagagacatactttcaaggtggaaaccctag

SEQ ID NO: 178810 - DNA, 630 bp, synthetic construct
  misc_feature 1..630: note = Description of Artificial Sequence: Synthetic coding sequence
  source 1..630: mol_type = other DNA
atgaactacgcccggttcatcaccgccgccagcgccgcccggaaccctagcccgattaggacgatgaccgatattctatctagggggcccaagtcgatgataagtctcgcagggggacttcctaacccgaacatgttcccgtttaaaaccgctgtgatcaccgttgagaatggaaagaccatccagttcggtgaggagatgatgaaacgggctctgcaatactctccatccgccggtatcccagagctcctgtcatggctgaagcagcttcagatcaaactgcacaacccacccacaatccattatccaccttctcagggtcaaatggatctctgcgtcacttcagggagtcagcaaggtctctgcaaagtctttgaaatgatcatcaaccccggcgataacgttctgcttgatgaacctgcctattccggtacgttacagtctctccatccactgggatgtaatatcatcaacgtggccagtgatgagagcggaatcgtgcccgattccctccgcgacattctcagtagatggaagccggaggatgccaaaaatccacagaagaacactcctaaattcctctacacagtgccaaacggaaacaacccgacgggcaatagcctgacctag

SEQ ID NO: 178811 - DNA, 1290 bp, synthetic construct
  misc_feature 1..1290: note = Description of Artificial Sequence: Synthetic coding sequence
  source 1..1290: mol_type = other DNA
atgaactacgcccggttcatcaccgccgccagcgccgcccggaacccctcacccatcagaacgatgtccgagaagcgcgcagatatcttgagccgaggccccaagtccatgatcagccttgccggtggcctacccaatccaaacatgttcccctttaagactgcagtgatcacagtggaaaacggcaaaaccattcagttcggagaagagatgatgaagcgtgcccttcagtactctccatccgcaggcatccctgagctactttcatggctgaagcagctgcaaatcaagttgcacaatccacctaccatccactaccccccctcccagggccaaatggacctatgtgttacctccggctcacagcaggggctttgcaaagtttttgagatgatcatcaatcctggcgacaatgtccttctggacgagcctgcatactccgggactctccagtcactgcaccccctgggatgtaacattataaacgtcgcgagtgatgaaagcggcattgtacctgatagccttcgagatatactgtcacgttggaaaccagaagatgctaaaaacccgcagaagaatactccaaaatttctatatacagttccgaatggcaacaaccctaccgggaactctcttacatccgaaaggaaaaaagaaatctacgagctcgctcggaagtatgacttcctgatcatcgaggacgatccgtactacttccttcagttcaacaaatttcgagtgccaacttttcttagcatggatgtggacggaagggtcatacgggccgactctttcagcaagattatttcttctggtctgagaatagggttccttacgggccctaaaccactgattgaaagggtgatcctgcatattcaggtgtcaaccctgcatccctcgaccttcaaccagctgatgattagtcagctgctgcacgagtggggcgaggaaggcttcatggcacatgtcgatcgtgtgattgacttttacagtaatcaaaaggatgctatactggcagccgcagacaagtggttaactggtctggctgagtggcatgtaccagcagctggcatgtttctatggattaaagttaagggtataaatgatgtaaaggaactgattgaggaaaaagccgttaagatgggtgtgctaatgcttcctgggaatgctttctatgtcgattcctccgctccatcgccatacctgcgggcctcattttcaagtgcttccccagagcaaatggacgtcgctttccaggtgctggcccagctcataaaggaatctttatag

SEQ ID NO: 178812 - DNA, 1278 bp, synthetic construct
  misc_feature 1..1278: note = Description of Artificial Sequence: Synthetic coding sequence
  source 1..1278: mol_type = other DNA
atgaactacgcccggttcatcaccgccgccagcgccgcccggaacccctctcccattcggacaatgacagacattctatccaggggacctaaatccatgattagtcttgcagggggcctgccaaatcctaacatgttcccctttaagacggctgttatcacagtggagaacggcaagactatccagtttggggaagaaatgatgaagcgcgctctgcaatattcaccctcagcagggatccccgagttactgagttggctgaagcagctacagatcaaactacataacccacccaccatccactatccaccaagccaggggcagatggatttatgcgtgacctccggcagtcagcagggcctgtgtaaagtgtttgaaatgatcataaatcccggagataatgtgcttctggatgagcctgcttattccggcactctccaatccttgcaccctctgggctgcaatatcattaacgtcgcaagtgacgaatcaggaattgttcctgactctttgcgggacatcctgtctcgttggaaaccggaagacgccaaaaaccctcagaaaaacacaccgaagttcctttatacagtccccaacggcaacaacccaactggtaactccctcacctcggaacgtaagaaggagatttatgagcttgctagaaaatatgattttctgattatcgaagatgatccttactacttcctccagttcaataaattccgagtccccacattcctcagcatggacgtggacgggcgcgtgataagggctgattcattctcaaagatcattagtagtgggctcaggataggctttctcaccgggcctaaaccactcatcgagagggtgattctgcatattcaggtgtccacactgcatcctagcacctttaaccagctaatgatctcccagctgctacatgagtggggcgaagagggctttatggcccatgtggaccgtgttatcgacttctacagcaaccagaaggatgcgattcttgccgccgccgacaaatggctgacggggctcgcagaatggcacgtcccagctgccggcatgtttctgtggatcaaggttaaaggcatcaacgacgtgaaggaactgattgaagaaaaagcggttaaaatgggcgtgttgatgcttcccggtaatgcattctacgtagacagcagtgccccatccccctacttgcgcgcatctttttctagtgcctctcccgagcagatggatgttgcattccaggtgctggctcaactgatcaaagaaagtttatag

SEQ ID NO: 178813 - DNA, 621 bp, synthetic construct
  misc_feature 1..621: note = Description of Artificial Sequence: Synthetic coding sequence
  source 1..621: mol_type = other DNA
atggcccccagccacctgagcgtgcgggagatgcgggaggacgagaagccactggtgctggagatgttgaaggcaggagttaaagataccgaaaacagagttgccctgcatgcactcacccgcccaccagcactcctcctcctggccgccgccagcagcggacttcgcttcgtgttagcatctttcgccctggccctgttactgcctgtgtttctcgctgttgcggctgtgaaactcggcttgcgcgcaagatggggctcgcttcctccacccgggggtctgggaggcccctgggtcgctgtgaggggctcaggagacgtttgtggggtcctggccctggccccgggtaccaacgcgggtgatggagcccgggtgacgcgtctgtcggtgagtcggtggcacaggaggcgaggcgtgggcaggaggctgctcgccttcgctgaagcccgggcccgcgcttgggcaggtgggatgggtgaacccagggcccgactggtcgtgcccgtggccgtcgccgcctggggcgtcggaggcatgctagaaggctgtggctatcaggccgaaggcgggtggggatgtctcggatatacgctagtgcgagagttttctaaggacctttag

SEQ ID NO: 178814 - DNA, 1842 bp, synthetic construct
  misc_feature 1..1842: note = Description of Artificial Sequence: Synthetic coding sequence
  source 1..1842: mol_type = other DNA
atggtgagcaaggacgccagcgtgaaggagtacatcttcaaggagttgcaaaaatacctgcccagccacgctgttccggacgaattagtgctgatcgactccctgccatttacatctcatgggaagattgacgtgagcgagctaaataagatttatctcaactatataaacttaaagagtgaaaacaaattaagtggcaaggaggacctgtgggagaaactgcagtacttgtggaaaagcacattgaatctaccagaggacctgcttcgggtccccgatgaatctcttttcctcaactccggcggagacagtcttaaatctataagattattgagcgagatcgagaagttggtgggaacgtctgtgcctggactcctggaaattatcctgagcagctcaatcctcgagatctacaatcatattctccagaccgtggttccagatgaggacgtaacattccgaaagagttgcgctactaagaggaagctttcggacatcaaccaggaagaggcaagcggtacatcgctccatcaaaaagcaattatgactttcacgtgtcacaatgagataaatgccttcgtggtgctgagcagaggcagtcagattttgagcctcaacagcacaagatttctgacaaaactcgggcactgctcgtctgcgtgccctagcgactccgtttcacaaactaacattcagaacttgaaaggcctcaattccccagtcctgataggcaagagcaaagatcccagttgtgtggcgaaggtttcagaggagggcaagcctgctataggtacccagaagatggaattacacgttagatggagatccgacaccggtaaatgcgttgatgcctcaccactggttgtgattccaaccttcgacaagtcctccacgacagtgtatattggtagccactcacatcgtatgaaggcggtggatttttactctggtaaggtgaagtgggagcagattctaggagaccgcattgaaagctctgcctgcgtgagtaaatgcggaaatttcatagtggtaggctgctacaatgggctggtgtacgtgctgaaatcaaacagtggagagaagtactggatgtttacaaccgaagacgccgttaaaagcagtgctaccatggatcctaccacaggactcatttacatcggtagccacgatcagcacgcttacgcactggacatctaccgcaagaagtgtgtatggaaaagtaagtgcggtggtactgtcttttcatccccttgcctgaacctgatcccccatcatctatatttcgccacactgggcggcctgctcctcgccgtcaatcctgcgaccggcaatgtgatatggaagcactcttgtgggaaaccactgtttagctcaccacagtgctgctcacaatacatttgcattggttgtgtggacggtaatctcttatgttttacacactttggcgagcaggtttggcagttctctacctcggggcccattttctcgagcccctgtacctcaccctcggaacagaagatcttcttcgggagtcacgattgttttatttactgttgtaacatgaaggggcatctccagtggaagttcgagacaaccagtcgcgtttatgccacgccatttgcctttcataattacaacggatcaaacgagatgctcttagcagctgctagcactgatgggaaggtgtggattcttgagagtcagtccggccagctacaatccgtttacgaacttcctggggaggtttttagcagcccagtggtactagagagcatgctgatcatcggatgtcgagacaattacgtttactgtttagaccttctcggaggcaatcaaaaatag

SEQ ID NO: 178815 - DNA, 2574 bp, synthetic construct
  misc_feature 1..2574: note = Description of Artificial Sequence: Synthetic coding sequence
  source 1..2574: mol_type = other DNA
atgaccctgcaggagctggtgcacaaggccgccagctgctacatggatcgcgttgccgtgtgctttgacgaatgtaacaatcaactgcctgtgtactacacgtacaagactgtggtcaacgctgcctccgaattgtccaacttcctcctgctgcactgcgacttccaagggatccgggagatagggttatactgccagcccggcatagacctgccaagctggatcctggggattctgcaggtacctgcagcctacgtgccgatcgaacctgactcaccccctagtctttctacacacttcatgaagaagtgcaatctgaaatatattcttgtggagaaaaaacagattaataaattcaagagcttccatgaaacattgttgaattacgatacctttacagtggaacataacgatctggtgctcttccgtctccactggaaaaacactgaggtgaacctcatgttgaatgatggcaaggaaaaatacgagaaggagaaaattaaaagcatcagctctgagcacgtgaatgaggaaaaggccgaagagcatatggatctgcggttgaagcattgtctcgcctatgtgttgcacacctcagggacgacgggtattcctaaaatcgtccgggttccccataagtgcattgtaccaaacatccaacactttagagtgctctttgacataactcaagaagacgtcctatttttggcatccccattaaccttcgatccctctgtggtcgagatcttcctggcattgtccagtggggcttccttactgatcgtcccgacgtcagttaagcttcttcctagtaaactggcatccgtgttattcagccatcaccgcgtgacagtccttcaggccacccccacactgctgcgtaggtttgggtcccagctaatcaaatcaactgtattgagcgccacaacttccctccgggtcctggcactcgggggcgaagcatttccatcactgaccgttctccgctcatggaggggagaagggaacaagacacagatatttaacgtgtatggtatcaccgaagtgagcagctgggccaccatctataggatccctgagaagaccctgaacagcaccctgaagtgtgagctgcctgtgcagttgggcttcccgttgcttggtaccgtcgtggaggtgcgcgacacaaacggttttactattcaggagggttctggccaggtatttctggggggacgaaatcgggtctgtttcctggacgatgaggtgacggtgccccttggtactatgcgtgccactggggatttcgtcacggttaaagatggagagatcttctttctgggtaggaaggactcacagataaaaaggcacgggaaacgactgaacatcgaactggtgcagcaagttgccgaagagttgcagcaggttgagtcatgtgccgtaacatggtacaatcaggagaagcttattctttttatggtgtccaaggatgcctcggtgaaggaatacatctttaaggaactccaaaagtacctcccttcacacgctgtgcccgatgaactggtgttgatcgactcactgccattcacttcccacggaaagatcgacgtgtcagaactgaacaagatctacctgaactatattaatctgaaatctgaaaacaagctctctggaaaggaggacttatgggagaagctgcagtacctatggaagagcaccctgaacttgcctgaggacctgctcagggtgcctgacgagtctctattcctgaattctggtggggactccctgaaatccattcgattactctcagaaattgagaagctagtcggaacatctgtgcctggactcttggagatcattttaagctccagcatattagagatttataaccacattcttcagaccgtggtccccgatgaggacgtgacgttcagaaagtcctgcgcaacgaagagaaaactctctgacatcaaccaggaggaagcatctggcacatcactacatcaaaaagctatcatgacattcacatgccacaatgaaattaatgccttcgtcgtactgagtcgtggctcacaaatcctgtccttgaactctacccgttttttaacaaagttaggccactgttctagcgcgtgtccctcagactcagtctcccagacaaacattcagaatctgaaggggcttaacagccctgtactcatcggcaagtccaaggacccatcttgtgttgcaaaggtttctgaggaaggcaagccagccattgggactcagaagatggagttgcacgtccgatggcgcagcgacacagggaagtgcgttgatgcctcccctctggtcgtgataccaacttttgacaaatcatctaccaccgtctacatcggctctcacagccataggatgaaggctgtggacttttattctggcaaggttaaatgggagcaaatattaggcgaccggatagagtccagtgcctgtgtgtcaaagtgtggcaactttatcgtggtcggcctggcggtcctgtaccagtggacgaaccttttcatccctgtatatctcactatcagagccaagaatattttctggtttccttag

SEQ ID NO: 178816 - DNA, 2526 bp, synthetic construct
  misc_feature 1..2526: note = Description of Artificial Sequence: Synthetic coding sequence
  source 1..2526: mol_type = other DNA
atgaccctgcaggagctggtgcacaaggccgccagctgctacatggacagggtggctgtgtgtttcgacgagtgcaataaccagctgccggtgtattatacttacaagaccgtcgttaacgctgcaagcgaactatctaatttcttgctcttacattgtgactttcaaggtatccgtgaaatcggactatactgccagcccggtatcgacttaccaagctggatccttggtatcctccaagttccagcggcttatgtgcctattgaacccgattcacctcctagtcttagtacccattttatgaaaaaatgtaacctgaaatacatattggttgaaaaaaaacagatcaacaagttcaagtctttccacgagaccctgttaaactatgatacttttactgtggaacacaatgatcttgtgttgtttcgcctgcactggaagaataccgaggtgaaccttatgttgaatgatggtaaggaaaaatacgagaaagaaaagataaaatccattagctcagagcacgtgaacgaagaaaaagccgaagagcatatggatctacgattaaaacattgcctggcctacgtgctgcacactagcggaacgaccggcattcccaaaattgtccgggtgccacataagtgcatcgtcccgaacatccagcatttcagggttctgttcgacattacccaagaggatgtattattcctcgcatcaccactgacctttgacccttccgttgtcgagatttttttggcgctttcatccggcgcctcactcttgatcgtacccaccagcgtcaaactacttccctccaaattagcatcagtgctgtttagtcaccacagagttactgttttacaagccaccccgacattgctcaggcgttttggatcacaattgattaaaagtactgtgctgagcgccacaacgagcttgcgggtccttgcactgggaggggaagccttcccaagcctgactgtgttgaggtcgtggcggggggaggggaacaaaactcaaatctttaatgtctatgggatcactgaggtctcatcctgggccaccatctatagaatacccgaaaagaccctaaactcaactctcaaatgtgaactaccggtgcagttgggctttccattgctgggcaccgtcgtcgaggttcgcgatactaacgggtttaccatccaggaggggtcaggacaagtgttcctcggcggacgcaacagggtttgtttcctggacgatgaggtgacggtgccactgggaactatgcgtgctactggcgattttgtgacagttaaggatggagagatcttctttcttgggcggaaagattcccagattaagcgccacggtaagcgcctcaacatcgagctggtgcagcaagtcgcagaagaactgcaacaagtggagtcgtgtgctgtcacatggtataatcaagagaagctgatcctgttcatggtttctaaggacgcctctgtcaaggagtatatttttaaagagctgcagaaatacctgccttcccacgctgtgcccgacgagctggttctgatcgacagcctgcccttcacgagccacggaaaaattgacgtcagcgaactgaacaagatttacttaaactatatcaacctgaagtcagagaataaattgtctggaaaggaagacctctgggaaaagctgcaatatctgtggaagagcaccctgaatctccccgaagacctacttcgagtgcccgatgagagcctctttctcaatagtggaggtgacagcttgaagtccatccggctgttgagtgagatcgagaagctggtggggactagcgtgcctggtctccttgagattatcctttcaagttcgatcctggaaatctataaccacatcttgcagacagtggtgcccgatgaagacgtgacgttccggaagtcatgtgcgaccaagcgaaagctgagtgacatcaatcaggaagaagcttccgggacctcactccaccagaaagcaataatgacattcacttgccataacgagatcaacgccttcgttgtcctgagccgggggtcacagattctctccctcaacagtacccggtttctgactaagttaggccattgttcctctgcctgtccgagcgactctgtctcgcagacaaatatccaaaatctgaagggactcaatagcccggtcctaattggcaagagcaaggatccctcatgcgtggcaaaagtgagcgaggaaggcaaacccgctattggtacccagaaaatggaacttcatgtgcggtggagatcagataccggaaagtgcgttgatgcaagcccattggtggttatccccacgtttgataaatcctccaccaccgtgtatataggaagccatagccaccgaatgaaagctgttgatttttatagcggcaaagtcaagtgggaacagattttgggagatcgcatagaatcaagcgcatgcgtctctaagtgcggtaactttattgtggtgggtaaatttttaaatctaaggtttgtcgaactgaactag

SEQ ID NO: 178817 - DNA, 2997 bp, synthetic construct
  misc_feature 1..2997: note = Description of Artificial Sequence: Synthetic coding sequence
  source 1..2997: mol_type = other DNA
atgaagaagtgcaacctgaagtacatcctggtggagaagaagcagataaataagttcaagagtttccatgaaaccttactgaattacgacacttttactgtagagcacaacgatctggtgctgttccggttgcactggaaaaatactgaggtcaatctcatgttaaatgatggcaaagagaagtacgagaaagagaaaattaagtcgatttccagcgaacacgtcaacgaagagaaagcggaagaacacatggaccttagactgaagcactgtctcgcttatgttttacataccagcggcaccacagggatcccgaagatagtgagggtgcctcataaatgcatcgtccccaacattcaacactttagggtgctgttcgatattacccaggaagatgtactgtttctggcatcaccccttactttcgatcctagcgtggtggaaatcttcctggcactctcctcaggcgcttctctgctcatcgttcccacatctgttaaactgctgcccagcaagctcgcgtctgtgcttttttctcatcacagggtgacagtgctccaggcaacccctaccctcctgaggcgctttggatcacagcttatcaagtccactgtgcttagtgccactacaagcctgagggtccttgcattaggcggtgaagcttttccctctctgactgtcctcaggtcatggagaggagagggaaacaagacacagatcttcaacgtctatgggataaccgaagtctcttcctgggctaccatctacagaatcccggagaaaacgctgaacagtaccctaaagtgcgaactcccagttcagttagggtttcccctcctagggacagttgtggaggtccgggatacaaacggatttaccattcaagaaggttcagggcaggtcttcctgggtggacgcaacagggtttgctttttggatgacgaagtgactgttcccttggggactatgagggccacaggcgatttcgtcacggtgaaggatggtgagattttctttttgggccgcaaggattcccagataaagcgacatggcaagaggcttaacattgaacttgtgcaacaggtagcagaagagctgcagcaggtcgagagctgcgctgttacttggtataaccaagaaaaacttatactgttcatggtatctaaagacgctagcgtgaaggagtatatattcaaagagttacagaagtatttaccatctcatgccgtgcctgatgaactggtgcttatcgacagcctgccctttaccagccacggaaaaattgacgtcagcgagcttaataagatctacctcaattacattaacttgaaatctgaaaacaagttatccggcaaagaggatttgtgggaaaagcttcagtacctctggaaatccaccctgaacctgccggaagacctcctgcgcgtgccagatgagtcactgtttttgaacagcggaggggattctctgaagagcataaggcttttatctgaaatcgaaaagctggtcggcacaagcgttccggggctgcttgaaatcatactgtcatcttctattctggagatctataaccacattctacagacggtggtacccgacgaggacgtaacttttcgcaaaagctgcgccaccaagagaaagctctccgacataaaccaggaagaggcatctggtacatcactgcatcagaaagcaataatgacatttacctgtcataacgaaatcaacgcgttcgtggtgttgagccgagggtcacaaatcctctcccttaattccacaagatttctgacgaagctaggtcattgcagctccgcctgcccctctgatagtgtgtctcagacaaacattcagaatctaaaggggctgaatagtccagtcctcattggaaagtccaaggacccatcatgtgttgccaaggtctctgaggagggtaaaccagctattgggacccaaaagatggaactgcatgttagatggagatccgacacaggtaagtgtgtagatgcaagcccattagtggtaatcccaacctttgacaagtcctccactacagtttacataggtagccatagccaccggatgaaggccgtggacttctatagcggaaaggtgaagtgggagcagatcctgggggatcggattgaatcctccgcttgcgtgtcaaagtgcggaaattttatcgttgtaggctgttataatggccttgtctacgtgctaaaaagcaacagcggcgaaaagtactggatgttcaccacggaggacgctgtaaagtccagtgcgaccatggatccaacaacggggttgatctacattggcagccatgaccagcacgcatacgcactggacatttacagaaaaaagtgcgtgtggaagtctaagtgcggcggaacagtgtttagcagcccttgtcttaacctgatccctcaccatctatatttcgccactctgggaggcctcttgctggcagtaaatcctgccactggcaatgtgatatggaaacatagctgcggaaaaccactgtttagctcgccacagtgctgttcacagtacatttgtataggctgtgtcgatggtaacctcttatgctttacacatttcggagaacaggtttggcagtttagtacatccggaccaattttcagctccccctgtactagtccatccgaacagaagatcttttttggctctcacgactgtttcatttactgctgcaacatgaagggacacctgcagtggaagtttgagactacatcaagggtatatgctacgccgtttgcattccataattacaatggctccaacgagatgcttctggccgctgcgagcacggatggaaaggtgtggatacttgagagccagtccggtcagctccagtcagtctacgaacttcccggagaggtgttctcatcccctgtggtgctggagtccatgctcatcattggatgtagagacaattacgtgtattgtttggatctcctggggggcaaccagaagtag

SEQ ID NO: 178818 - DNA, 2781 bp, synthetic construct
  misc_feature 1..2781: note = Description of Artificial Sequence: Synthetic coding sequence
  source 1..2781: mol_type = other DNA
atgctgcaggtgcaccggaccggcctgggccggctgggcgtgagcttgagcaaggggctccatcacaaggctgtcctggctgtgcgccgggaagatgtaaatgcatgggagagaagggcccctctggcacccaaacatattaaggggatcaccaatttaggatacaaggtcctcatccagccaagtaaccgaagggcaattcatgacaaggattacgtcaaagctgggggcatccttcaggaggatatttccgaggcctgtttaatcctgggagtcaaacggcccccagaagagaagctgatgtctcgcaaaacctatgcctttttctcccacaccatcaaagctcaggaggctaatatggggctcctcgatgagatcctgaagcaggagatccgcctgatagattacgagaagatggttgaccacaggggggtgcgtgttgtggcctttggtcagtgggccggagtcgccggcatgatcaatatcctacacgggatgggccttcgtttgctcgcgttgggccatcatacaccgtttatgcacatcggcatggcccataattaccgaaactcttcccaggccgtgcaggccgttcgggacgccgggtacgaaatttcacttgggctgatgcctaaaagtatcgggccattgaccttcgtatttaccggtactggcaatgtgagcaagggagctcaggccatcttcaatgaactgccttgcgaatacgtggaaccacacgaactgaaggaagtgtctcagaccggcgacctaaggaaggtctacgggacggtcttgagcaggcaccatcatctcgttagaaaaacagacgctgtttacgacccagccgagtatgataagcaccccgaaagatacattagcagatttaacactgacattgccccttataccacctgtctcattaacgggatctactgggagcagaatacaccaagactgttaacccgccaggatgcccagtcactcctggctcccgggaagtttagccctgctggagtcgagggttgcccagccttgccccataaactggtcgccatctgcgacattagcgctgataccggcgggtccatcgagtttatgacagagtgtaccaccatagaacacccattttgcatgtatgatgcagatcagcacataattcacgattcagtggaaggcagtggaatcctgatgtgttcaatcgataacctgcccgcacagctccccattgaagcaactgaatgcttcggagatatgctatacccatatgtggaggagatgattctttccgacgctacacagcctctcgaatcgcagaatttctctcctgtagtaagagacgccgttatcacctcaaatggcacactcccagacaagtataagtacattcaaaccctgcgggaatctcgcgagagagcgcagtctcttagcatgggcaccagacgcaaagttctggtgcttggatccggctatatctccgaacctgttctagaatatttgagcagggacggcaacattgaaataacagttgggtctgatatgaagaaccagatagaacagttagggaagaaatacaacatcaatccagtgagcatggatatttgcaaacaggaagagaaactcgggttcctcgtggccaagcaggacctcgtgataagcctgctcccctatgtccttcatccgctcgtggcgaaggcttgcatcacaaacaaggtcaacatggttactgcatcctatatcactccggctctgaaggagctagaaaagtcagtggaagacgccggcatcacaattatcggtgaactcggcctcgacccaggattggatcacatgctcgctatggagaccattgacaaagccaaggaggtgggggccaccatcgaatcctatatttcatactgcggaggcctgccagcccccgaacatagcaacaatcctctcagatataaattcagttggagcccagtgggcgtcctgatgaacgtgatgcagagcgccacatatcttctcgatggaaaagtggttaatgttgcgggtggtatttcatttctggatgccgtgacctcaatggatttttttccaggattaaatctggaggggtacccaaaccgggatagcacaaagtacgctgagatctatgggatttcttcagcccacacactgctgagggggactctgaggtataaagggtacatgaaagcactgaacgggttcgtgaaattggggctcataaaccgggaagcactgcccgcattccgccccgaggcaaatcctctcacgtggaagcagctcctctgcgaccttgttgggatcagcccatcgtctgagcacgacgtgctgaaagaggctgtgctcaagaaattggggggagataatacacagctggaagccgccgaatggctcgggcttttgggcgatgagcaggtgccccaggctgagagcatcctggatgcacttagcaagcatctagtcatgaagctgagctacgggcccgaggaaaaagatatgatcgttatgagagatagcttcggcatccgacatccatctggccatctcgagcacaagacgatcgacctggtcgcttatggggacatcaacggatttagtgcaatggctaaaactgtcggactgccaacagctatggccgccaagatgctcctggacggcgagatcggagctaaaggacttatgggcccttttagcaaagagatctacggacccatcttagaacggatcaaagcagagggtatcatctatacaacgcagtccacgattaagccctag

SEQ ID NO: 178819 - DNA, 2781 bp, synthetic construct
  misc_feature 1..2781: note = Description of Artificial Sequence: Synthetic coding sequence
  source 1..2781: mol_type = other DNA
atgctgcaggtgcaccggaccggcctgggccggctgggcgtgagcctaagtaagggactccaccataaggccgttttggctgttaggagggaggacgtgaacgcatgggaaagaagggcacctttggctccaaagcatatcaagggaatcactaatctcggatataaagtactcatacagccatccaatagaagggcaattcacgataaggactatgttaaagccggaggtatccttcaggaagatatctcagaagcgtgcctcatcttgggcgtaaaacgtcccccagaggaaaaactgatgagtagaaaaacatacgcgtttttctctcataccatcaaagcccaggaggccaacatgggcctgctcgatgagatccttaaacaagagatcaggctgattgattacgaaaaaatggtcgatcatcgcggcgtgcgcgttgttgcttttggtcagtgggcaggcgtcgcgggcatgatcaatattttgcacggcatgggtctgaggcttcttgcactgggccaccacacaccctttatgcacattggcatggcacataactatagaaacagctcccaagccgttcaggctgttagagacgccggttacgaaatcagtctggggctcatgcctaaaagcataggccctctgactttcgtgtttactggcacaggcaacgtgtctaagggcgcgcaggctatatttaacgagttgccctgtgagtatgtggaaccgcatgaactcaaggaggtatcacagaccggggatctgcgcaaggtctacggaacagtgctctctcgacatcatcatctcgtgcgcaaaaccgatgccgtgtacgatccagcagagtacgacaagcaccccgaacggtatattagccggttcaacactgatatcgccccttacacaacatgcctcataaatggcatttactgggagcaaaacacacctaggctactgactcgtcaagatgcacagagcctgctcgcgcctgggaaatttagcccggcaggagtagagggatgccccgctctccctcacaaactcgtggccatctgtgatatttccgcggacactgggggatcgatagaattcatgaccgagtgtacaacgatcgagcacccgttttgcatgtacgacgctgatcagcatatcatccacgacagcgtggagggctcaggtatactgatgtgttcaatcgacaacttacccgcccagctgccaattgaagccacagaatgcttcggagacatgctgtatccttacgtggaggaaatgatcttatctgacgcaacacagccgcttgagtcacagaatttttcacctgtggttcgggatgctgtaatcacatcgaacggtacattgcccgataagtacaagtacattcagaccttgcgtgaatcacgagagcgggcccaatcactaagcatgggaacgcgtcggaaggtgctcgtgttggggtcaggctatatctccgaacccgttctggagtacttgagcagagacggcaatattgaaattaccgtgggaagcgacatgaagaatcagatcgagcagctgggaaagaaatacaacatcaacccagtatctatggatatctgcaaacaggaagaaaagctgggattcctggtggctaagcaggacctggtaatctccctgcttccttacgtgctgcatcccctcgtggcaaaggcctgcattactaataaggtgaacatggtgacggcaagttacatcaccccggccctgaaagaattagagaagtccgtggaggatgccgggattacaataatcggagagctgggtttggatcccggactcgaccatatgctcgccatggagacgatagacaaagccaaggaggtgggcgccaccattgagtcttacatttcttactgcggagggctaccagctcccgagcattccaacaatccactccggtacaaattcagctggtctcccgttggggtgttgatgaacgtcatgcagtctgctacttatcttctggatggtaaggtcgtgaacgtagcaggcgggatatcatttctagacgctgttacgagtatggactttttccccgggctgaacctcgaggggtaccctaatcgcgattccaccaagtacgctgaaatttatggtattagctccgcgcatacgctgcttcgcggcactttgcggtacaaaggatacatgaaggccctgaacggctttgtcaaactcggactgattaatcgcgaagcactgcccgctttcaggcccgaagctaaccccctcacctggaaacagctgctgtgcgacctggttggtatctcacccagttccgaacatgacgtgttaaaggaggctgtccttaagaaactgggaggcgacaacacccagttagaggccgctgaatggctgggtttactgggagacgagcaggtgccccaggcagagtcaatacttgatgccctatcaaaacatcttgtaatgaagctcagctacggcccagaagagaaagacatgattgttatgagagatagctttggaatccggcatccttctggccacctggaacacaagacaatcgacctggtggcctacggtgacattaacggatttagtgccatggccaaaacggtagggcttcccaccgctatggcagctaagatgctgctcgacggagagataggcgccaagggcctaatgggcccatttagtaaggagatttacggacccattcttgagcgaatcaaggctgagggcattatttatacgacacaatcaaccatcaaaccctag

SEQ ID NO: 178820 - DNA, 942 bp, synthetic construct
  misc_feature 1..942: note = Description of Artificial Sequence: Synthetic coding sequence
  source 1..942: mol_type = other DNA
atgcagccccagagcgtgctgcacagcggctacttccaccccctgttgagggcctggcagaccgctaccactacactgaacgcctctaatttgatctacccgatatttgtgacctatggggtaaaacgcctcgaagaaatgctgcggcctctagtggaagaaggcctgcgatgcgtgcttatctttggtgtccctagcagggtccccaaggatgagcggggctctgcggcagactccgaggagtcccctgcaattgaggctatacacctattaaggaaaactttccccaacctgctggtggcctgtgacgtgtgcctgtgcccctacactagtcatggtcattgcggacttctgtctgaaaatggggccttcagggctgaggaatcccgccagcggctggctgaagtcgccttggcttatgccaaagcggggtgtcaggtggtggcaccaagcgatatgatggatggacgagttgaagccatcaaggaggcgctgatggcccacggcttgggaaacagagtctccgtgatgtcttattcggccaagttcgccagctgcttctacggaccctttcgcgacgcggccaaaagttctccagcatttggcgaccgccggtgttaccagctccccccaggcgccagggggctggcactgagggcagtggacagggacgtccgcgaaggcgcagatatgctaatggtaaaacccggcatgccttatctagacattgtgagggaagttaaggacaaacacccggacttgcccttggccgtctaccacgttagcggagaatttgccatgctatggcatggagcacaggctggggcgttcgacttaaaagcagcagtgttggaagccatgacagccttcaggcgcgccggagcagatattatcattacttactatacacctcaactcctgcagtggctcaaggaggaatag

SEQ ID NO: 178821 - DNA, 993 bp, synthetic construct
  misc_feature 1..993: note = Description of Artificial Sequence: Synthetic coding sequence
  source 1..993: mol_type = other DNA
atgcagccccagagcgtgctgcacagcggctacttccaccccctgctgagggcctggcagaccgccacaaccaccctgaatgcatcaaacctcatttatcccatcttcgtgaccgacgtccctgatgacatacaacccataacaagcttgccaggagttgcccgatacggggttaagcggctcgaggagatgctgcggcctctggtggaagaggggctgaggtgcgtactgattttcggtgtaccaagtcgcgtacctaaagatgaacgcgggtccgcagccgactctgaggaaagccctgcaatagaggccattcacctgttgagaaaaacattcccgaatctcctggtagcatgcgacgtgtgtctctgtccttatacctcccatgggcactgcggactgttgtccgaaaatggggcctttagagctgaggagtcacgtcagaggctggctgaagttgcattggcgtatgcaaaagctggctgccaggtggtcgcaccttccgacatgatggatggcagggtggaagcgataaaggaggcccttatggcccatggactgggtaatcgtgtctccgtgatgtcctactccgcaaagtttgcatcctgtttttacggacccttcagagacgcagcaaaaagctctcctgcatttggtgacagaaggtgttaccagcttccacctggagcacgaggcctggccctgcgcgccgtggacagggacgtgcgcgagggggctgacatgctgatggttaagcctggaatgccctacctcgacatcgtcagagaagtcaaagataagcaccccgaccttccccttgccgtctaccacgtgtccggggaattcgccatgctttggcacggcgcacaagccggagcatttgacctcaaggccgcagtactagaggcaatgactgccttcaggagagccggagccgatattattatcacttactatacacctcagctactgcaatggttgaaagaagagtag

SEQ ID NO: 178822 - DNA, 45 bp, synthetic construct; identical to SEQ ID NO: 72628
  misc_feature 1..45: note = Description of Artificial Sequence: Synthetic coding sequence
  source 1..45: mol_type = other DNA

SEQ ID NO: 178823 - DNA, 363 bp, synthetic construct
  misc_feature 1..363: note = Description of Artificial Sequence: Synthetic coding sequence
  source 1..363: mol_type = other DNA
atgcccctgtgccccctggcccacgccatgcagccccagagcgtgctccactccggctattttcacccacttctcagagcttggcaaacagcaacaactacactgaacgcctccaatttgatttaccctatctttgtgactgatgtgcctgatgacattcaaccaattacttctttgccaggtgtagccagatacggtgtgaaacgtctagaagagatgctcaggcccctagtggaagaaggtctccgatgtgtactgatcttcggggtcccctcccgagtaccaaaagacgaacggggcagcgccgccgattccgaggagtcgcccgccatagaagccattcatttactcagaaagacgtag

SEQ ID NO: 178824 - DNA, 180 bp, synthetic construct
  misc_feature 1..180: note = Description of Artificial Sequence: Synthetic coding sequence
  source 1..180: mol_type = other DNA
atgcccctgtgccccctggcccacgccatgcagccccagagcgtgctgcattctggctacttccatcctctgctgcgcgcctggcagaccgctaccaccaccttgaacgcttccaatctcatctaccctatttttgttaccgacgtacctgatgatattcaacccataaccagtctctag

SEQ ID NO: 178825 - DNA, 1923 bp, synthetic construct
  misc_feature 1..1923: note = Description of Artificial Sequence: Synthetic coding sequence
  source 1..1923: mol_type = other DNA
atggagagcgtggtgcggcggtgccccttcctgagccgggtgccccaggcttttctccagaaggctgggaagtctttactgttttatgcacagaattgccccaaaatgatggaagtcggcgccaaaccggcccctagagccctgagcaccgctgcagtgcactaccagcagattaaggagacaccaccagctagcgaaaaggacaagaccgccaaagcgaaggtgcagcaaactcctgacggcagccagcaatcacctgatgggacccaactaccgtcgggccacccgctgcctgcaaccagtcaaggaacagcatcaaaatgtcctttcctcgccgcacagatgaatcaaagggggagctctgtcttttgtaaagcctcactggagctgcaggaagacgtacaagaaatgaacgcagttagaaaggaagtggctgaaacctctgccggcccctctgtggtgtccgtcaagaccgacgggggcgaccctagtggactgctgaagaattttcaagatattatgcagaagcaacggcctgaaagggtttctcacctgctccaagataacttaccaaaaagcgtgtccaccttccagtatgataggtttttcgagaaaaaaattgacgagaagaagaatgatcacacgtaccgagtgtttaagactgtcaaccgacgcgcccatatttttcctatggccgacgattactccgattcattgatcaccaagaaacaggtgtctgtgtggtgttccaacgactatcttggaatgagtcgccacccaagagtttgcggcgccgtgatggacaccctcaaacagcatggggctggtgctggaggaacccgcaatatctccggcacatccaagttccatgtggacctcgaaagagaactcgccgatctgcacggaaaggacgccgcattgctgttcagctcatgtttcgtggccaacgatagtactctattcacactcgctaagatgatgcccggatgtgagatctactcggacagtgggaatcatgctagtatgattcaggggataagaaattctcgggtacctaaatatatctttagacataacgatgtttcgcacttaagagagctattacaacgctctgatccatccgtgcccaagatagttgctttcgaaaccgtacattcaatggacggcgccgtttgtcccctggaagagctgtgtgacgtcgctcatgagttcggggccattacctttgtcgacgaagttcatgccgtgggcctttatggtgcccgcggcggcggcataggtgatagagacggtgtaatgcccaagatggacatcatatcaggcacactgggaaaggccttcggctgtgtgggtggctacatcgcctcgacatcttcattaattgataccgtgcggagctacgctgccggattcattttcaccactagtctacccccaatgcttctggcaggcgctcttgaatctgtgcgcatcctgaagagcgctgaggggagagtcctcaggcgacaacaccaacggaacgtaaagctcatgcgtcaaatgctgatggatgctggcttgccagtggtccactgtccctctcatatcattccggtgcgtgtggcagacgctgcgaagaatactgaagtgtgcgacgaactcatgtctaggcacaacatttacgtgcaggccatcaattaccctactgttcctcgtggtgaggaactcctcaggatcgcccctactccacatcatactcctcagatgatgaattattttctggaaaatctgctggttacttggaaacaagtcggactcgagctcaagccgcatagcagcgcggagtgcaatttttgtcgcagacccctgcatttcgaggtgatgagcgagagagaaaaaagctatttctctggattatcgaaactggtgagtgcacaggcctag

SEQ ID NO: 178826 - DNA, 1923 bp, synthetic construct
  misc_feature 1..1923: note = Description of Artificial Sequence: Synthetic coding sequence
  source 1..1923: mol_type = other DNA
atggagagcgtggtgcggcggtgccccttcctgagccgggtgccccaggcctttctgcagaaggccggaaaatccctgctcttctacgcacaaaattgcccaaagatgatggaggtcggtgctaaacccgccccccgcgctctaagtaccgctgccgttcattaccagcaaattaaggagactcccccggcttccgaaaaggataaaacagccaaggcgaaggttcagcagacccccgatgggagccaacagtcacctgacggcacacagctaccaagtggacacccactgcctgccaccagccagggaacggcctcgaagtgcccatttttggcggcccagatgaaccagcgcggatcgtcagtgttctgtaaggccagcctggagctacaggaggatgtccaagagatgaacgccgttcggaaggaggtggccgagacctctgctggtccttctgtggtttcagtaaagaccgacggcggcgacccctcgggccttctgaagaatttccaagacattatgcagaaacagcgcccagagagggtcagtcatttgctacaggacaatcttcccaaaagcgtgtcaacatttcagtatgatcgttttttcgagaaaaagattgacgagaagaaaaatgatcacacctaccgagtgtttaagactgtaaacagacgtgcccatatattccctatggccgacgattattcagacagcttgataaccaaaaagcaagtgtcagtctggtgctccaatgactacctgggtatgtccagacacccaagggtctgtggtgctgtgatggatacgctgaaacagcatggggcaggtgccggaggcaccagaaacatctccggcacttctaagttccacgtggatctagaacgcgaactcgcggatcttcacggaaaggacgccgccctgttgttttccagttgctttgtggccaatgattctaccctgtttaccctcgccaagatgatgccaggatgcgaaatttattccgattctggcaatcacgcgagtatgatccaaggtatccggaactcacgcgtgccaaaatatatatttaggcacaacgacgtctctcatttgcgggagctgctgcagcgatctgacccgtcagttccaaagatcgtggccttcgaaacggttcatagcatggacggagctgtgtgcccactcgaggaactgtgtgacgtggctcacgagttcggcgctattacctttgtggatgaggtgcacgccgtcggcttatatggcgcgcgtggcgggggtatcggagacagggacggtgttatgcccaagatggacatcattagcggaactttggggaaggcctttggttgtgtcggagggtacatcgcctccacatccagcttgatcgatacagtgaggtcatatgcagctggattcatctttacaacgagtctgccgccgatgctactggccggcgctttagagtccgttcgaatcctgaaatctgctgaggggagagtgctgcgacggcagcatcagaggaatgtgaagctgatgagacaaatgctgatggatgccggactgcctgtcgttcactgcccgagccacatcataccggtcagggtggccgacgctgccaaaaacacagaggtgtgcgacgagctaatgtccaggcacaacatctacgtacaggccattaactatcctacagtgcccagaggcgaggaactgctgcggatcgctcctaccccgcaccacacaccccagatgatgaactatttcctggaaaatcttctggtgacttggaaacaggtgggactcgagctgaagccccattccagcgctgaatgtaatttctgccggagacccctgcacttcgaagtgatgtctgaacgcgagaagtcttatttttccggtctgagcaagctggtctccgcccaggcctag

SEQ ID NO: 178827 - DNA, 345 bp, synthetic construct
  misc_feature 1..345: note = Description of Artificial Sequence: Synthetic coding sequence
  source 1..345: mol_type = other DNA
atggagagcgtggtgcggcggtgccccttcctgagccgggtgccccaggcctttttgcagaaggccggaaaaagtttacttttttatgcccagaactgccccaagatgatggaagtgggcgctaaacccgccccccgggccctgtcaacagctgcggtgcattaccagcagattaaagagacccccccagcttctgaaaaagacaaaaccgcgaaagccaaagtccagcagactcccgacggctcccagcagtcccctgacgggacacagtttaggttggacactccctgtctgccccaggctcgcgccttacaagcaaacgccctctcctggcagcaccgctag

SEQ ID NO: 178828 - DNA, 1923 bp, synthetic construct
  misc_feature 1..1923: note = Description of Artificial Sequence: Synthetic coding sequence
  source 1..1923: mol_type = other DNA
atggagagcgtggtgcggcggtgccccttcctgagccgggtgccccaagcctttctgcaaaaagccggaaagtcactgctcttctacgcccagaactgccctaaaatgatggaggtgggcgcaaaacccgccccacgggcgttgtcaactgcagccgtccactaccaacagattaaggagaccccaccggctagtgaaaaggataaaacagccaaggctaaggtccagcagaccccagacggatcccagcagtcacccgatgggacccagctcccaagtggacaccctctgccagctacctcacagggaactgccagcaagtgccccttcctcgccgctcagatgaaccagagggggagctccgtgttctgcaaggctagtctggagctgcaggaggatgtccaggaaatgaacgccgttcggaaagaggttgctgagacttctgccgggccgagcgtcgtctccgtgaagaccgacggcggagacccatccggcctgctcaagaattttcaggatatcatgcaaaagcaacgacccgagcgagtgtcacacctgctccaggataatttacccaagtctgtgagcactttccagtatgacaggttttttgagaagaagattgacgagaaaaagaacgaccacacctatagggtttttaagacagtgaacaggcgtgcccacatttttcccatggcggatgactacagcgattctctcattacaaagaaacaggtgagtgtgtggtgcagcaatgactacctgggaatgagtcgccatccgcgtgtgtgcggggccgtgatggacactctgaagcagcacggggccggcgccggagggactaggaacatttcagggaccagtaaattccatgttgacttggagcgagagctcgccgatcttcacggcaaggacgctgcactactgttcagctcatgttttgttgccaatgattccaccttgtttaccctggcgaagatgatgccaggctgtgaaatttattctgacagtggtaatcacgcgagtatgatccaaggaatacggaacagccgggttccaaaatacattttccgccacaatgatgtctcacacctcagggaactgctccagcgcagcgatccatcagtccccaagatcgttgcttttgaaactgttcactccatggacggagccgtgtgcccactggaagaactttgtgacgtagctcacgagtttggagccataaccttcgttgacgaagtccatgctgtcggcctgtatggcgctcgtgggggggggataggtgacagagacggagttatgccaaaaatggacattatttctggaactctgggaaaagcgttcggatgcgtgggaggctacattgcttctactagctctctaatcgatactgtccgtagctatgccgctgggtttattttcaccacttctctgccccccatgctattggcaggcgcccttgaatccgttcggatattgaagtcagctgaggggcgcgtactaagacggcagcatcagagaaatgttaagttaatgcgacagatgctgatggacgccggacttccagtggtgcactgcccaagtcacattataccggttcgggtggccgacgccgccaagaatacagaggtgtgcgacgagctcatgtctagacataacatctatgtgcaggcaatcaactacccaaccgtcccacgtggcgaagaactattgcggattgctcctaccccccaccacaccccgcagatgatgaactattttctggagaacctgctggtgacgtggaaacaagtgggcctggaactgaaacctcatagttctgcggaatgtaatttttgtaggagacccctgcacttcgaagtcatgtccgagcgcgagaaaagttacttctcagggctgtctaaactcgtgtcagcccaggcgtag

SEQ ID NO: 178829 - DNA, 1923 bp, synthetic construct
  misc_feature 1..1923: note = Description of Artificial Sequence: Synthetic coding sequence
  source 1..1923: mol_type = other DNA
atggagagcgtggtgcggcggtgccccttcctgagccgggtgccccaggcatttctgcagaaggcaggcaagagtctgttattttacgcccagaattgtccaaagatgatggaggttggggccaagccagccccccgggcgctgagcaccgccgccgtgcactaccagcagataaaggaaacgccccccgcttctgaaaaagataagaccgccaaggcaaaggtgcagcagactcccgatgggagtcaacagtcacccgatggaacccagctcccatctggacacccactaccggcaacatcccaaggtacagcatccaagtgcccctttttagctgcgcaaatgaatcagaggggatctagcgttttctgtaaggcttctctcgaacttcaggaagacgtccaagagatgaacgctgttcggaaagaagtcgcagagacttctgccggcccctccgtagtgtccgtgaagacggacggaggagatccctccgggctgctgaagaactttcaggatataatgcagaagcagcgacctgagcgagtgtcacatctgctgcaggacaatctcccaaagtccgtgtctacatttcaatatgaccgcttctttgaaaaaaaaatcgacgagaaaaagaacgatcatacatacagggtcttcaagacggttaaccgcagagcacacatttttccaatggcagatgattactcagattctctcattactaaaaagcaggtaagtgtgtggtgcagtaacgattaccttggcatgtcaagacacccgcgcgtctgtggagctgtgatggatacgctcaagcagcatggagctggcgctggtggtacaagaaatataagcggcacctccaaattccacgttgacctggagcgcgagttggccgatttgcacggaaaggatgctgcattacttttttctagttgtttcgtggcgaacgattccacactctttacattagccaaaatgatgcccgggtgtgagatctactcagattcgggtaatcacgcttccatgatccagggcatccgaaatagcagggtgccgaagtatatctttcggcacaatgatgttagtcatctgcgggagctcctgcaaagaagtgacccttcagtccccaagatcgtggcatttgaaacagtgcacagcatggatggggctgtttgtcccctggaagagttgtgcgatgtcgcccacgaattcggcgctatcacatttgtagatgaggttcacgccgtgggcctctacggcgcacgaggtggcgggattggtgaccgcgacggagtcatgcctaaaatggacatcatctccggaactcttggcaaggcctttggatgcgttggggggtacatcgcctctacttcaagcttgattgacactgtgcggtcatacgccgctggctttatttttacaacctcactgcctccaatgttgttggccggtgcgctggagagcgtgagaatccttaagagcgcagaaggtcgtgttttacggagacagcatcagcggaatgtcaagctgatgagacagatgttgatggatgctggactgcctgtcgtgcattgcccatcgcacatcatacccgtgagggttgccgacgcagcaaaaaatacagaggtgtgcgatgagctgatgagccgccataatatctacgtccaagccattaattacccaacggtgccccgcggcgaagagctgctgcgtatagccccaactccacaccacacccctcagatgatgaattatttcctggagaacctgctggttacctggaaacaggtaggacttgaacttaaacctcactcctccgccgagtgcaacttctgtcgccgcccactgcatttcgaggtaatgtccgagcgagagaagtcatacttttccgggctctccaagcttgtttctgctcaggcttag

SEQ ID NO: 178830 - DNA, 1764 bp, synthetic construct
  misc_feature 1..1764: note = Description of Artificial Sequence: Synthetic coding sequence
  source 1..1764: mol_type = other DNA
atggtgaccgccgccatgctgctgcagtgctgccccgtgctggcccgcggaccaaccagcctactgggaaaggttgtgaagacacatcagttcttgttcggaatcgggcgctgccctatcctggccacgcagggccccaactgctctcaaatccacctgaaagctacgaaagccggcggggactcaccttcgtgggcaaagggccactgtccatttatgttgtccgaactccaggatggcaagtccaagatcgtccagaaagccgcacccgaagtccaggaggacgtgaaggccttcaagaccgacctgccttcaagcctggtctctgtttccctgaggaaaccattctcaggccctcaggaacaagaacagatttcgggcaaggttactcacctgatccagaacaatatgccaggcaactacgtcttctcctacgaccagttttttcgagacaagatcatggagaaaaagcaggaccatacttatcgcgtcttcaaaaccgttaatcggtgggctgatgcttatccttttgcacagcacttctccgaggctagtgtggccagcaaggatgtgtcagtgtggtgctcaaacgactatctgggtatgagtaggcatccgcaagtacttcaagctacccaggagacactgcagaggcatggagcaggtgccggaggcacacggaacatttctggcactagcaaatttcacgtcgagctcgaacaggaattggccgagctgcatcaaaaagacagcgcgctgctcttttcctcttgcttcgttgctaacgactctacccttttcaccctggccaagattctgcccggctgtgaaatctacagcgacgcggggaatcacgcctcaatgattcaggggatcagaaattctggagcagctaagttcgttttccgtcataacgaccctgaccatctcaaaaagctgctagagaagtcaaatcctaaaatcccaaagattgtagccttcgaaacagtccatagtatggatggcgccatttgccccctggaggaattgtgcgacgtgtcccatcaatacggtgcgctgaccttcgtggacgaggtacacgctgtgggactgtacggatcgcgcggcgcgggtattggagagcgcgacggcatcatgcacaaaatagatattataagtggtacccttggcaaggcgtttggttgtgtcggcgggtacattgcctctaccagagatcttgtggacatggtgcgcagctacgccgcgggattcatctttacgacctctcttcctccgatggttctgtccggcgctctcgagtcagtgagactgctaaagggcgaggagggacaggctctgcgccgcgctcatcaaaggaatgtgaaacatatgcgccagttgctaatggacagaggcctgccggttatcccatgcccatcccatattatccccatcagggtggggaacgccgctctaaattctaaactctgcgacttgctgctgagtaagcatgggatctacgtgcaggccatcaattatcctaccgtacctagaggcgaggaattgctgagactggcaccgtccccccaccactcaccccagatgatggaagactttgtagaaaaattgctgcttgcttggaccgctgtgggtctgccgctgcaagatgtcagcgtggctgcatgcaacttctgtagacgacccgttcactttgagctgatgtccgaatgggagcgctcttactttggcaacatgggcccccagtacgtgactacctacgcgtag

SEQ ID NO: 178831 - DNA, 1653 bp, synthetic construct
  misc_feature 1..1653: note = Description of Artificial Sequence: Synthetic coding sequence
  source 1..1653: mol_type = other DNA
atggtgaccgccgccatgctgctgcagtgctgccccgtgctggccagaggccccactagcctgctgggaaaggtggtgaagacccatcagttcttatttgggataggaaggtgccctatactggctacacaaggcccaaattgctcacaaatccacctgaaggccacaaaggccggcggcgacagcccaagttgggcaaaaggccactgccccttcatgctgtcagaactgcaggacggcaagtcaaagatcgtgcaaaaggccgcccctgaggtgcaggaggacgtcaaggcttttaagaccgggaactacgtattcagctacgatcagttctttcgcgataagatcatggaaaaaaagcaggatcacacatacagagtgttcaaaaccgtgaatcgatgggcggatgcgtacccttttgcccagcatttttctgaggcaagtgtagcctcaaaagacgtaagtgtttggtgttccaacgactacctggggatgtcgagacacccccaggtactgcaggccacacaggagactctgcagaggcacggcgcaggggcaggaggcacgcgcaatatctccggtacttccaagttccacgtcgagctggaacaggagctggcagaattgcaccaaaaggactctgctcttttgttcagctcctgtttcgtagcaaacgactctacgctgttcacactggccaagatcctaccgggatgcgagatctatagcgacgccggcaatcatgcaagcatgatccagggcatccgtaactccggcgccgccaagttcgttttcagacacaatgatcctgatcacttaaaaaagctcttggagaagtctaaccctaagattcctaagatcgtagcttttgaaacagtacactcaatggatggggccatatgcccactggaggaactgtgcgacgttagccaccaatatggcgccctcacattcgtcgatgaggtgcacgccgtgggactctacggctccagaggggcaggcataggggagagggacggcatcatgcacaagatcgatataataagtgggacgctagggaaggctttcggttgcgtcggggggtacatcgcttctacaagagacttggtcgacatggtcaggagctacgctgccggattcatctttacaacaagtctgccacccatggtgttatctggggctctggaatcggtgaggctcctgaagggcgaagagggtcaggccctaaggcgggcacatcagcgcaacgtcaaacacatgaggcaactgctgatggacagaggactgccagtgatcccctgcccaagccacattatccctattcgcgtcggtaatgccgcgctgaactccaaactctgcgacctgcttttgtctaagcacggtatttatgtgcaggccatcaattacccaactgtacctcggggtgaagagctgctcaggctggccccttcaccacatcactccccacagatgatggaggactttgtggagaagctgctgctggcctggacagccgtgggccttccgttacaggacgtgtctgttgccgcttgcaacttttgtcggagacctgtccactttgaactgatgagtgaatgggaaaggtcctactttggcaatatgggacctcaatatgtcaccacttatgcctag

SEQ ID NO: 178832 - DNA, 1725 bp, synthetic construct
  misc_feature 1..1725: note = Description of Artificial Sequence: Synthetic coding sequence
  source 1..1725: mol_type = other DNA
atgcggggcggcgaggtggccctgggctggaacaagaagaagcggctgttttgcgaagactttcgatttaagatggttacggctgccatgctccttcagtgctgtcccgtgttggccagaggacctacttcccttctgggcaaagtggttaagacccatcagtttttatttgggataggaaggtgtccgatcttggcaacgcaggggcccaactgttcccaaattcatttgaaagcaaccaaggctgggggagattccccgagttgggccaagggccattgccctttcatgctctcggagctgcaagacgggaagtctaagatcgtacagaaggccgcccccgaagtccaagaggatgttaaggctttcaagaccggcaattacgttttttcatatgaccagttctttagagacaagatcatggaaaagaagcaggaccatacctatcgggtgtttaagaccgtcaaccgctgggcagacgcatatccattcgcccagcacttctctgaagcgtctgttgccagcaaggatgtgtccgtgtggtgctctaacgattacctcggaatgtcccggcatccccaggtgctccaagccacccaggaaactctgcagcggcacggagcaggcgcagggggtacaaggaatatcagcgggacttcgaagttccacgtggagctggaacaggagctggctgagttgcaccagaaggattctgcactgctgtttagctcttgttttgtggcaaatgatagcacactttttaccctcgctaagatcctgccgggctgcgagatttattcagacgcagggaatcacgcatcaatgatacagggtatccggaactctggcgctgcaaaatttgttttcaggcacaacgaccctgatcacctgaaaaagttactggagaaatctaatccgaagatcccaaagatcgtagccttcgagacagtgcactcaatggacggggcaatttgccctttggaggagctgtgcgatgtgagtcaccagtatggcgcacttaccttcgtggacgaagtgcacgccgtgggcttgtatggatcacggggcgctgggataggtgaacgagacggcatcatgcataaaatagatatcatttctggaactcttggcaaagcgttcgggtgcgtggggggctacatagcatccactcgggatttagttgatatggtgcgttcatatgccgctggtttcatctttaccacatccctccctccaatggttctgtccggcgcactggagtctgtgagactgttaaagggggaggaagggcaggcgctgcgacgggcacaccaacggaacgttaaacacatgaggcagctgcttatggataggggcctcccagtaattccatgtcccagccatatcatcccgataagggtggggaatgccgccttaaactccaagctctgcgatctcctgttaagtaaacacggtatctacgttcaggccatcaactacccaaccgtgcctcgtggtgaggagcttttgaggctggcaccgagccctcaccatagccctcaaatgatggaggattttgtggagaaactgctgctggcctggacagccgttggcctgccactccaagacgtctctgtagcagcctgtaacttttgtagacgtcccgtgcattttgagctgatgagtgaatgggagaggagctactttggcaatatgggccctcagtacgttaccacttacgcttag

SEQ ID NO: 178833 - DNA, 669 bp, synthetic construct
  misc_feature 1..669: note = Description of Artificial Sequence: Synthetic coding sequence
  source 1..669: mol_type = other DNA
tgactgagcttcgtgcggccccagtgccgggccaccgacagcccctcttgggcgaagggccactgtccttttatgctcagcgagttacaggatggaaagagcaagatagtgcaaaaggcagctccagaggtgcaagaagacgtcaaggcctttaaaacagacctgccatcatcactcgtatctgtcagcttgcggaaaccgtttagtggccctcaggagcaggaacagataagcgggaaagtaacacacctgatccagaataacatgcctggaaactacgtcttcagttacgaccagttttttcgggataagatcatggagaaaaaacaggaccatacataccgcgtcttcaaaacagtgaaccggtgggccgatgcctacccattcgcccagcacttctccgaggccagcgttgcctctaaagatgtgagtgtgtggtgtagcaacgactatctggggatgagcaggcacccccaggtactgcaggctacccaagaaacactgcagcggcatggcgcgggcgctggcgggacacgaaacatctctgggacctctaagttccacgtcgagttagaacaggagctggccgaactgcaccagaaggattccgccctcctgtttagcagttgtttcgtggcgaatgactcgaccctttttacattggcatag

SEQ ID NO: 178834 - DNA, 1212 bp, synthetic construct
  misc_feature 1..1212: note = Description of Artificial Sequence: Synthetic coding sequence
  source 1..1212: mol_type = other DNA
atgcagcgggccgtgagcgtggtggcccggctgggcttccggctgcaggcctttcctcccgcactatgccgtcccttgagttgcgcgcaggaggtgctccgcaggacacctctgtacgactttcatctcgctcatggcgggaagatggtagccttcgctggatggagtctgcccgtgcagtatcgcgatagccatactgatagccatctgcacacacggcaacactgtagcctttttgatgtgtcacatatgctacaaacaaagatcctaggcagtgacagagtgaagctgatggaatccctggtcgtcggcgatatcgcagaactgaggccaaatcaggggactttaagtctgtttactaatgaggctggtggaattctggatgaccttatagtgacaaatacctctgagggacacctctacgtggtctcaaatgctggttgttgggagaaagatctggctctaatgcaggataaagtgcgggagctccagaatcagggacgggacgtcgggctcgaagtgctagacaatgcattgctggccctgcaggggcccactgctgcccaggtgctccaagctggcgtcgccgacgatctcaggaaactgccttttatgacttctgctgtcatggaggtctttggagtgtctgggtgtcgagttacccgttgcggctataccggcgaggatggcgtggagatctctgtgccagtcgcgggggcagttcatctggcaaccgccattctgaagaatcctgaggtcaagctcgctggcctggccgcccgggactccttgcgcttagaagctggtctgtgcctgtacgggaatgatatagacgaacacactacgccagtcgagggcagcttgtcttggaccctggggaagaggagacgtgccgcgatggacttcccgggagccaaggtgatcgtcccacaactaaagggacgggtgcagcggcgccgggtggggctcatgtgcgaaggagctcctatgagagcacatagcccgatcctgaacatggaggggaccaaaatcgggacagtgacttccggatgtccaagcccctccctgaagaagaatgtggccatgggttatgtaccatgtgagtattctagaccaggcaccatgctgctggtggaagttaggcgcaaacagcagatggccgttgtgtcaaaaatgccgtttgtgcctacaaactattacacactgaagtag

SEQ ID NO: 178835 - DNA, 1161 bp, synthetic construct
  misc_feature 1..1161: note = Description of Artificial Sequence: Synthetic coding sequence
  source 1..1161: mol_type = other DNA
atgcagcgggccgtgagcgtggtggcccggctgggcttccggctgcaggcattcccacctgccctctgccggccgctttcctgcgcacaggaagtgctcaggaggacgcctctgtacgattttcatctggcccacggcgggaaaatggtggcattcgcaggctggagtctgccagttcaatacagggacagccacaccgatagccatctacatacacgccagcactgttctctcttcgatgtctctcatatgttgcaaacaaagatcctgggtagcgacagggtcaaactgatggagagccttgttgttggcgacatcgccgagctgcggcctaaccaggggacactgtcactttttacaaacgaggctggcgggatcctggatgacttgattgtgacaaacactagtgaaggacatctgtatgtggtctccaatgctgggtgctgggaaaaggatctcgcactgatgcaagacaaagtaagagaacttcagaaccaggggagagatgtaggcctggaggtgctggacaatgccctcctggctctccaaggtcctaccgccgcccaggtacttcaagctggcgttgcggacgatcttcgcaaactgcccttcatgactagcgctgtgatggaggttttcggggtgagcggctgcagagtaacccgttgtggatataccggcgaggatggcgtggagattagtgtccccgtggccggagctgtgcacctcgccacagcaatcctgaagaaccctgaggttaaactagccggactcgccgcacgtgatagtctccgcctggaagccggcctgtgcttatacggcaacgatatcgatgaacatacaaccccagtggaggggtctctaagttggacactcgggaagagacgtagagctgccatggattttccaggcgccaaagttatcgtgccacagctgaaagggcgggtgcaacgacggcgggtgggccttatgtgtgagggagcccccatgagggctcacagtccgattttgaatatggagggcacaaaaataggtaccgttacctctggctgtcccagtccttctttaaagaagaatgttgctatgggctatgtgccctgtgaatactcccgccccggaactatgctcctagtggaactgccatcaggtccatgcttttag

SEQ ID NO: 178836 - DNA, 1155 bp, synthetic construct
  misc_feature 1..1155: note = Description of Artificial Sequence: Synthetic coding sequence
  source 1..1155: mol_type = other DNA
tgagccgtgagcgtggtggcccggctgggcttccggctgcaggccttccctcctgcactgtgtcgacctttgagctgcgcccaggaggttttgaggaggactcctctctatgacttccacctcgcacacggtggaaagatggtggctttcgcaggctggtctttgcccgtgcagtatcgagacagccacaccgatagccatctgcatacacggcagcattgcagcttgttcgacgtgagtcacatgttacagactaaaatcctaggttccgatagggttaagctaatggagtccttggtcgtgggcgatatcgccgaactacggcccaaccagggaaccctgtccctattcaccaatgaggcggggggaatcctagacgatctcatcgtgaccaacacatccgagggccacctatacgtggtctcaaacgccggatgctgggaaaaagacttagccctcatgcaagacaaagtgcgcgagctgcagaatcaggggcgggatgtcggcctcgaagtgctggataatgcccttttagccttgcagggtccgaccgccgcccaagtgctccaggccggcgtcgctgatgacttaagaaagctgccgtttatgacaagcgccgtcatggaagtctttggggtgagtggctgcagggtaacaaggtgcggctatactggagaggacggtgttgaaatatcggtgcctgtggctggcgccgttcacttggccaccgctattctgaaaaatccagaggtgaaactggctgggctagccgctagagacagcctgagactggaagctggcttatgtctttacggcaacgacatagacgagcacacaacgccggtcgaaggatccctctcctggacattgggcaagcggcgaagagctgccatggactttcctggtgccaaagtgatagttccgcagttgaaggggcgagtccagcgacgacgggtaggcttgatgtgtgaaggcgcacccatgcgcgcccacagccctatccttaacatggaaggcacaaagataggtactgtgaccagcggttgcccctcaccaagcctaaagaaaaatgtggctatgggttacgtgccttgtgagtactctagacccggaacaatgctcctcgtggagttgccatccggtccatgtttctag

SEQ ID NO: 178837 - DNA, 1080 bp, synthetic construct
  misc_feature 1..1080: note = Description of Artificial Sequence: Synthetic coding sequence
  source 1..1080: mol_type = other DNA
atgcagcgggccgtgagcgtggtggcccggctgggcttccggctgcaggcctttcccccagcactctgccgacccctgtcttgtgctcaggaggttctgaggcgcactccattgtacgattttcaccttgcgcatggaggcaagatggtggctttcgctggctggagtttgcccgtccagtaccgtgactcccataccgacagccatcttcacaccagacagcactgcagtttattcgacgtgtcgcatatgctgcagaccaagattttggggtccgatagagtgaagctgatggagagtttggtggttggcgacatcgctgagctgaggccaaaccaggacaaggtaagagaactccagaatcagggaagggatgtaggtttggaggttttggataatgctctattagcgctccaggggccgaccgccgcccaggtattacaggccggggtggccgatgatcttcggaagctgcccttcatgactagcgctgtcatggaagtcttcggtgtcagtggctgtagagtcactaggtgtgggtatacaggcgaggacggcgtcgagatctcagtgccagtggcgggcgccgtgcacttggcaactgcgattctgaagaacccagaggtgaaattggctggattggcggcccgcgactctctccggctggaggcaggcctgtgcctctacgggaatgatatcgatgagcacacgacacccgtggagggcagcctgtcatggaccctcgggaaacggcggagagccgccatggattttcctggcgccaaagtgatcgtgcctcagttgaagggacgagtgcaaaggaggcgcgtggggttgatgtgtgaaggcgcaccaatgcgtgcccactctcccattctgaatatggagggaactaagataggcacagtgacatccgggtgtcctagcccctctctgaagaaaaatgtcgctatggggtacgttccttgtgaatacagtaggcctggcaccatgctgctggtagaggtgcgccgcaaacagcagatggctgtcgtttccaaaatgccgttcgtgccaactaattattacacccttaaatag

SEQ ID NO: 178838 - DNA, 1044 bp, synthetic construct
  misc_feature 1..1044: note = Description of Artificial Sequence: Synthetic coding sequence
  source 1..1044: mol_type = other DNA
atgcagcgggccgtgagcgtggtggcccggctgggcttccggctgcaggctttccccccggctttatgccggccactaagttgtgctcagacaaaaatattagggagcgaccgggtgaagttgatggaatcactcgttgtgggtgacatagctgagctgcgccccaaccagggcaccctgagtctttttacaaatgaagccggaggtattctggacgaccttatcgtgaccaacacgtcagaggggcatctgtatgtcgtaagtaatgccggctgctgggagaaggacctggcccttatgcaggataaggtccgagaactgcagaatcagggaagggacgtgggcttggaagtgctggacaacgctctccttgcgctgcagggccctactgccgcccaagtgctccaggctggagtggccgatgacctccggaaactacccttcatgacatccgcagtaatggaggtcttcggtgtgtctgggtgtcgcgtgacacggtgcggatataccggtgaagatggcgtcgagatcagtgtgcccgtggctggggctgtgcacctcgcaacagctatcttgaagaatcctgaagtgaagctggctgggttggcggctagagacagcctgcggctggaggcaggcctttgcctctatggaaatgatattgacgagcacaccactccggttgagggctccttaagctggaccctgggcaagaggaggcgagcagctatggactttccaggcgccaaagttatcgttccccaactcaaagggcgcgttcagcgcagaagggtaggactcatgtgtgaaggcgcacctatgcgcgcccacagtccaatcctcaatatggaaggaacaaaaatagggacagtaacaagtggttgtccatccccttcactcaaaaagaacgtggctatgggatacgtgccctgtgagtactccaggcctggcaccatgctgcttgtcgaggttaggaggaaacagcaaatggccgtagtgtctaaaatgcccttcgtcccaaccaactactacaccctgaagtag

SEQ ID NO: 178839 - DNA, 921 bp, synthetic construct
  misc_feature 1..921: note = Description of Artificial Sequence: Synthetic coding sequence
  source 1..921: mol_type = other DNA
atggagagcctggtggtgggcgacatcgccgagctgcggcccaaccagggtacactctcactgttcacgaatgaggcaggcggcatcctggacgatctgattgtcacaaataccagtgaaggccacctttacgtcgtgtccaacgcagggtgctgggagaaggatctggccttgatgcaggacaaagtgcgggagctacaaaatcaggggcgagatgttggactggaagtgctggataatgcattgcttgccctccagggacctacagcagcccaggtcctccaggcgggcgtcgccgacgacttacgtaaactcccgttcatgacaagcgcagtcatggaggtcttcggcgttagtggctgtagagtgacgcgttgcggctatacgggtgaggatggcgttgaaatcagcgtccctgtcgccggcgctgtacaccttgccacagcaatactcaaaaacccagaggtcaagcttgcaggcttggcagctcgcgattcactgagactggaggccggcctctgtctctacggcaatgatatagacgagcacaccacaccagtggagggctccctttcttggacactcggaaaaaggcgcagagccgccatggattttcctggcgctaaggttattgttcctcagctcaaaggccgggtgcagaggcggcgcgtggggctcatgtgtgagggcgctccgatgagggcacactccccaatcctgaacatggaaggcactaaaatcgggaccgtgacaagcgggtgtccctctccttccctcaagaagaacgtggccatgggatacgtgccttgtgagtattccaggccaggaacaatgctcctggtggaggttcgacgaaaacagcagatggcagtagtctcaaagatgccctttgtacctacgaactactacaccctaaaatag

SEQ ID NO: 178840 - DNA, 2760 bp, synthetic construct
  misc_feature 1..2760: note = Description of Artificial Sequence: Synthetic coding sequence
  source 1..2760: mol_type = other DNA
atgtggctggccgccgccgcccccagcctggcccggcggctgctgttcctcggaccacctcccccacctctcctactcttagtcttttcacgaagctcccgtaggcggctccactctttaggactcgctgcaatgcccgagaaacggccattcgaaagactgccggcagatgttagccccatcaactactcactgtgtctgaagccagacctgctcgactttactttcgagggcaagttggaggccgctgcccaagtgcgccaagctactaaccagattgtcatgaattgtgccgatattgatatcattacagcatcctatgctcctgaaggggatgaagaaatccacgctacaggattcaactatcaaaatgaggacgagaaagttactctttcctttcctagcactcttcaaactggcaccggaacccttaagatagactttgtcggcgaacttaacgataagatgaaaggcttttacaggtctaagtataccacaccatccggagaagtgcgctatgccgccgtgacgcagtttgaggccactgatgcccggagagcttttccttgttgggacgaacccgcaatcaaagcgaccttcgatatatctctcgtggtcccaaaagatagggtggccttgtctaacatgaatgtcatagacagaaagccgtacccagacgacgagaatctggtagaggtgaaattcgctcggactcccgtaatgtcaacctacctggtggcatttgtggtgggggagtacgacttcgtcgagactagatctaaggacggagtctgcgtaagggtgtatacccctgtgggcaaagccgaacagggcaaatttgctctcgaggtggccgcaaagaccctgccgttctacaaggactatttcaatgtaccctaccccttgcccaaaatcgacctgatcgcaatcgcagacttcgcagccggcgccatggagaactggggcctggtgacgtatcgcgaaaccgccttgctcattgacccaaaaaacagctgctcgtcctcaaggcaatgggtggctcttgtagtcggccacgaactcgcccaccagtggtttgggaatcttgtcacgatggagtggtggactcatctttggctgaatgaaggatttgccagctggattgaatacctttgcgtcgaccattgtttccctgagtatgacatctggacacaattcgtgagtgccgattacactcgtgctcaagagcttgacgctctggataatagccatccaatcgaagtgtctgtgggccacccatcggaggtagatgagatctttgatgcgattagctacagcaaaggcgcttccgtgatccgcatgttacacgattatatcggagacaaggattttaagaaaggcatgaacatgtacctgacgaagtttcagcagaagaatgcagcaacggaggacttatgggagtctctggagaatgctagtggtaagcctatcgcagcagtgatgaacacctggactaaacagatggggttccccctaatatacgtcgaggctgagcaagtcgaagacgatagactcctgcgcctgtcccaaaaaaaattctgcgcgggtggatcctacgtgggagaggattgcccccaatggatggttcctataacgatttccacatctgaagaccctaaccaagcaaagctcaaaatcctcatggataaacccgaaatgaacgtagtactgaaaaacgtcaagcccgaccagtgggttaaattaaatctcggcacggtcggattttacagaactcagtatagcagtgccatgctggagtctctcctgcccggaattcgagatttaagcctgcctcccgtggaccggctggggctccagaacgacctgttcagtctcgctagagccgggatcattagtactgttgaagtgctcaaggttatggaggcttttgtgaacgagccgaattataccgtgtggtctgacctgagctgcaaccttggaatcttgtcaacactgctgtcacacacggatttctacgaagaaatccaggaattcgtgaaagacgttttctccccaattggggaaagactgggatgggaccctaaacctggcgagggacacttagatgccctgttaaggggcttagtactgggcaagttagggaaggctggccacaaggcaactctggaggaagcgcggaggcgctttaaggatcatgtcgagggcaaacagatactgagcgctgatctcaggtcacccgtgtatctcacggtgcttaaacatggcgatggcactactcttgatattatgctgaagcttcacaaacaggccgatatgcaggaggaaaaaaatcgaatcgaacgtgttctgggcgctaccctgcttccagacctaatacaaaaggtgttaacctttgccttatccgaagaagttcgaccacaggatactgtcagtgtaatcgggggcgtggccggaggttcaaaacacgggcgaaaggcggcctggaagttcattaaagataattgggaagaactgtataaccgttatcagggcggttttttgattagtcgccttataaagctgagcgtggaagggtttgccgttgacaaaatggcaggagaagtgaaagcttttttcgagtcccatcccgccccctccgctgagcgtacaatccaacagtgctgcgagaatatcttgcttaacgccgcctggctcaagagggacgctgaatcaattcatcagtatcttctgcaaagaaaagcgagtccccccaccgtctag

SEQ ID NO: 178841 - DNA, 1884 bp, synthetic construct
  misc_feature 1..1884: note = Description of Artificial Sequence: Synthetic coding sequence
  source 1..1884: mol_type = other DNA
atgtggctggccgccgccgcccccagcctggcccggcggctgctgtttcttggcccaccgcctcccccattgctgctcctggtgttctcacggagttcacggcgaaggctccactcattgggactggcagatgtttctccgatcaattactcgttatgtctgaaacccgacttgctcgattttacgttcgaggggaagttggaagctgccgcgcaggtacgccaggccaccaaccagatcgtaatgaattgtgccgacattgatatcataactgcctcctacgcgccagaaggcgacgaggagattcacgcgaccggttttaattaccagaatgaggacgagaaggttactttgtccttccctagcaccctgcagacagggaccggtaccctcaagattgatttcgtcggtgaattgaacgacaaaatgaaaggattttacaggtctaaatatacgacacccagtggggaggtccgctatgctgccgtgacacagttcgaggcaacagatgcccgcagggcattcccatgttgggacgaaccagctatcaaagccacgttcgacatttcactagttgttccgaaggatcgggtggcattaagcaatatgaatgtcatagataggaagccctatcctgatgatgagaatttggtggaggtcaaatttgcacggaccccagtgatgtccacttatttggtggcctttgtcgtcggcgagtatgatttcgtggaaacccggtcaaaggatggagtttgtgtcagggtctacactccagtcggtaaggcggagcagggaaagtttgcactggaggttgccgcgaagacgctccctttttacaaggattatttcaacgtcccataccctctcccaaagatagacctgatagctatcgcagacttcgccgccggcgctatggaaaactgggggctggtgacatacagggaaaccgccctcctgatcgatccgaaaaactcttgctccagttcccgacagtgggtggcattggtggtgggtcacgaattggcacatcagtggttcggcaatttagtgaccatggaatggtggactcacctgtggctgaacgagggctttgcgagctggatagagtatttatgtgtggaccattgcttccccgaatatgatatttggacccagtttgtatccgctgattacaccagggcccaggaactagacgctctggacaacagccacccaattgaggttagcgtgggccatccaagcgaggtggatgagattttcgacgctatcagctatagcaagggggctagtgtgatccgcatgttgcatgactacattggggataaagattttaagaaaggaatgaacatgtacctaacaaaattccagcagaagaatgctgctacagaggatctgtgggagtcactagagaacgcttccggcaagcccatagccgctgttatgaacacctggactaagcagatgggctttcccttgatctacgtggaggcggaacaagtggaggatgataggctgctgagactctcgcagaagaagttctgcgcaggcggatcctatgttggcgaggactgtccacaatggatggtgcccattaccatcagtacttccgaagatcctaaccaagccaaactgaagattctcatggataaaccagagatgaatgtggtgctcaagaatgtgaaaccggaccaatgggtcaaactcaacctcgggacagttggcttctatcgtacacaatactccagtgcaatgctggaaagtcttctgcctggcattcgggatctgagccttccccccgttgataggctgggtttgcagaacgacctcttcagtctctttattttatgtgttagagaggtgtctgggaactgctgtcgagcctag

SEQ ID NO: 178842 - DNA, 2520 bp, synthetic construct
  misc_feature 1..2520: note = Description of Artificial Sequence: Synthetic coding sequence
  source 1..2520: mol_type = other DNA
atgcccgagaagcggcccttcgagcggctgcccgccgacgtgagcccaattaactattctctctgcttgaaacctgatctcctcgacttcacatttgaaggtaaactagaggccgcagctcaggtccgtcaggccaccaatcaaattgtaatgaactgcgctgacatagatattattaccgcatcctatgcaccggagggcgacgaagaaattcatgcaacgggtttcaattaccagaacgaggatgagaaggtgaccctgtcctttcccagcaccctccagaccggtacaggaactctgaaaatcgacttcgtgggcgagctgaacgataaaatgaaaggcttctatcggagcaagtacactactccctctggggaggttcgatatgctgcggtcactcaatttgaaaatgtgatcgatcgcaagccgtacccggatgatgagaaccttgtagaggtgaagttcgctaggacacctgtaatgtctacttatctcgtggctttcgtcgtaggagaatatgatttcgtggagaccaggtctaaggatggagtgtgcgtaagggtctacactccggtgggaaaggcagaacagggcaaatttgccttggaggtggctgccaaaacccttcctttctacaaggattatttcaacgtaccatatccactgcctaagatcgacctgatcgccatcgcggatttcgccgctggggctatggagaattgggggctggttacctatcgagagactgccctgctgatcgatcctaagaatagttgttcctccagcagacaatgggtggccctggttgtgggccatgaactggcccaccaatggttcggaaatctggttaccatggagtggtggacacatctctggctgaatgaagggttcgcaagctggattgaatacctgtgcgtcgaccactgtttccctgagtacgacatttggacccagttcgtgagtgcggactacacaagggctcaggaactagatgcattagataattcacatcctatcgaagtgtccgtgggccacccctccgaggtggacgaaatttttgatgccatctcttacagcaaaggagcgagtgtaatccgcatgctgcacgattacatcggcgataaagactttaagaaaggtatgaatatgtacctgacaaagtttcagcaaaagaacgctgcaaccgaagatttgtgggagtcactggagaatgcttcgggcaagcccattgcagcggttatgaacacttggaccaagcaaatgggcttccccctgatctacgttgaggctgagcaggtggaggacgatcggcttctgagactctcacagaaaaaattctgtgccgggggtagctacgtgggtgaagattgtccgcagtggatggttccgattacgatctccaccagcgaggatcccaaccaggctaaactgaagattctgatggataagccagaaatgaatgtggtgctgaaaaatgtaaagcccgaccaatgggtcaagctgaacctgggcacggtggggttctaccgcacacagtacagcagcgcgatgttggagtcgttgctgcctggaattagggacttgagtctcccacctgtggaccgtcttggcctgcaaaatgatctgttttctcttgccagagctgggattattagcaccgtggaggtgctcaaagtgatggaggccttcgtaaatgagcccaattacaccgtgtggtccgacctgtcttgcaatcttgggattttgtccaccctgctaagccatactgatttctatgaagagatacaggagttcgtgaaggacgtgtttagcccaatcggtgagaggctgggctgggacccgaaacccggagaaggccatctagatgcattactacgcggtctggttctgggcaaactaggaaaggcggggcacaaggccacactggaagaggctcgccgacgattcaaggatcacgtagaaggcaaacagatcctgtccgcggacttgagaagccctgtgtatttgaccgttctgaaacatggagacggcaccacactagatataatgttgaaactgcataagcaggctgatatgcaagaagagaagaacaggattgagagagttctgggcgctacattactgcctgatctcattcagaaggtgctgacttttgccctctctgaggaggtccgcccccaggatacagtatcagtcatcggcggcgtcgccggggggtccaagcatggccgtaaggctgcctggaaatttataaaagacaactgggaagaattgtataacagataccagggaggcttccttatctctcgcctcattaagcttagtgtagagggtttcgccgtagacaagatggctggcgaagtgaaggctttttttgagagtcacccagctcccagcgctgaacgcaccattcaacagtgctgcgaaaatatcctcctaaatgcagcctggctcaagcgagacgctgaatccatccaccagtatcttctccaacggaaagcctccccacccaccgtatag

SEQ ID NO: 178843 - DNA, 1125 bp, synthetic construct
  misc_feature 1..1125: note = Description of Artificial Sequence: Synthetic coding sequence
  source 1..1125: mol_type = other DNA
atgcggagccccgccgtgcccacccccgcccggggccagctgggcgtcgccttcgttctgctgccaccccatagtgagggggcaagggtcttcggcgccctggggccaatagggccaagtagtccaggtcttaccctggggggcctggcagtgtccgaacaccgtctgagcaacaaactactcgcctggagtggggtgttggagtggcaggaaaagaggaggccctattctgacagtaccgcgaagttaaaacgaacattgccctgccaggcctacgtcaatcaaggtgagaacctcgagactgatcagtggccccaaaagttgatcatgcagctgattcctcagcagctgctgaccaccctcggcccgttgtttcggaacagtcaacttgcacagttccattttaccaaccgtgactgtgattccttgaagggactctgtagaatcatgggcaacgggttcgctgggtgtatgctgtttccacatatttcaccctgcgaggttcgtgtcctgatgctgctttacagctcaaaaaaaaaaatctttatgggtctgatcccatacgatcagtctgggtttgtttccgccataagacaagtcattaccactcgcaagcaggcggtgggccccggcggtgtaaatagcggccccgtgcagatcgttaacaataaattccttgcatggagtggcgtaatggagtggcaagagccacggcctgaacccaatagccggagtaagagatggctgccatctcacgtctatgtgaatcagggagaaatcttgcggactgaacagtggcctagaaagctatacatgcaacttattccgcaacagttactcacgacgctggtgccactcttccggaacagtcgcttggtgcagttccactttactaaggatttggagacattaaagtctctatgccgaattatggataacggctttcgcagaaagagcagcctagcatcaagtcccatgaccagagcaacactgtccaccgctagcggtgtgagcttgccaacaagctcaaggagttgttccgggacgtggagtcgctcaaactccaacgaaggttggggcgggagtggttaccctggcctgggaccttcaaggtcacatagatag

SEQ ID NO: 178844 - DNA, 594 bp, synthetic construct
  misc_feature 1..594: note = Description of Artificial Sequence: Synthetic coding sequence
  source 1..594: mol_type = other DNA
atgatgttcccccagagccggcacagcggcagcagccacctgccccagcaactcaagttcacaacctcggactcctgtgacagaatcaaggacgagttccagcttttacaagcccagtaccacagcctgaaattagaatgtgataaacttgcaagcgaaaaatccgaaatgcaaagacactatgtcatgtactacgagatgagttacgggttgaatatcgaaatgcacaagcaggccgaaatagtcaaaagactgaatgggatctgcgcacaggtgttgccttatctatcacaggagcaccagcagcaggtcctgggcgccatcgagcgagccaaacaggttactgccccagagctaaatagcattataaggcaacaactacaggcacatcagctgagccagctgcaagctcttgccttgcccctgacaccacttccggtaggcctacagccccccagccttcccgctgtaagcgcaggaacaggactgttatctctgtccgccttgggaagccaggcccacttaagtaaggaggataagaatggacatgacggagacacgcatcaagaagacgatggtgagaagagcgattag

SEQ ID NO: 178845 - DNA, 1362 bp, synthetic construct
  misc_feature 1..1362: note = Description of Artificial Sequence: Synthetic coding sequence
  source 1..1362: mol_type = other DNA
atgggcgtgctgggccgggtgctgctgtggctgcagctgtgcgccctgacccaggccgtcagcaaattgtgggttcccaatacagatttcgatgtagctgcaaactggagccagaaccggactccctgcgccggaggagccgtcgaattccctgccgacaaaatggtgtcagttctcgtgcaggaaggccacgccgtcagcgatatgctattacccctcgatggggaattggtccttgccagtggagcgggtttcggggtaagcgatgttggaagccatctggattgcggtgctggagagcctgcagtgtttcgggatagtgacaggttttcctggcacgaccctcacctatggcgatctggcgatgaggcgccgggcctgttctttgtggacgccgaacgggtaccttgtaggcacgatgacgtcttttttcccccatccgcgtcttttcgagtgggcctggggccgggcgctagcccggtgcgggtgcggagcatctctgccctgggccgtacattcaccagagacgaagacctggccgtgtttctggcgtcaagagccggacggcttaggttccacggccctggagccctctcagttgggcctgaggactgtgctgatcccagcggctgcgtctgcggcaatgccgaggcccaaccctggatttgtgccgctctgcttcagcctctcggcggacgctgtccacaggccgcctgtcacagtgctctgcgtccccaaggacagtgttgtgatctgtgcggggcggttgttcttctcactcatggcccagcgttcgatctggaacgctatcgcgctaggattttagacaccttcttagggctgccccagtaccacggactgcaggttgctgtgtctaaggtaccccgtagttcacggctgagagaagccgacaccgaaattcaagtcgtcctggtggagaatggtcctgagacaggcggagcaggccgcctggcaagggccctgcttgctgatgtcgcagagaatggtgaggccctaggagtcctcgaggcaacgatgcgggaatcgggtgcgcatgtgtggggctcctcagctgcagggcttgctgggggcgtggccgcagccgtgcttttggctttattagtgcttttggtcgctccacctctgctgaggagagcaggacggctccgatggcgcaggcatgaggctgccgccccggccggggcacctttgggcttccgaaatccagttttcgatgtgacagcctccgaggaactgcctctgccacgtcggttaagcctggttcctaaggcagctgcagattcaacatcccacagctatttcgtcaacccactgtttgctggcgctgaggcagaggcctag

SEQ ID NO: 178846 - DNA, 1962 bp, synthetic construct
  misc_feature 1..1962: note = Description of Artificial Sequence: Synthetic coding sequence
  source 1..1962: mol_type = other DNA
atggccgacatcaagaccggcatcttcgccaagaacgtgcagaagaggctcaaccgggcgcaagaaaaagtgttgcagaagctggggaaagctgacgagacgaaagacgaacaatttgaggaatatgtgcagaatttcaagaggcaagaagccgagggtactagactgcagagggaactccgaggctacctcgcagctattaaagggatgcaggaggcctctatgaagctcaccgagagcctccatgaggtgtacgagcccgactggtacggacgcgaagacgtgaagatggtaggcgagaagtgtgatgtgctctgggaagattttcatcaaaagcttgtggatggctcactcctcacgcttgacacttacctgggtcagttccctgatatcaaaaacagaatcgctaagcggtcccgcaaactagttgactacgacagcgccaggcaccatctggaggccctccaatcctctaaaaggaaggatgaatccagaatttcaaaagctgaagaggaatttcaaaaagctcagaaagttttcgaggagttcaacgttgatttacaagaagagctcccgtctctgtggagtcgaagagtgggcttttatgtaaatacctttaaaaatgtcagctccctcgaggccaaattccacaaggagatcgccgtgctctgtcataagctgtacgaggttatgacgaagctcggagatcagcatgcagataaggccttcacgatccagggggctccatccgatagtggccctttgcgaattgccaagacccctagcccgcccgaggagcccagccctctgcctagtccaacggcgagccctaaccatacgctagccccggcgtcaccagctcctgccaggccgaggtcaccctcccagacacgcaaggggccgccggtgccccccctacccaaggttacacccacaaaagaattgcagcaggagaatatcattagcttcttcgaagataatttcgtgcccgagatctcagtaacgactccttcccagaatgaagtgccagaggtaaagaaagaggagacactgctcgacctggacttcgatcccttcaaacctgaggtaaccccagctggaagtgcaggagtgacacatagtcccatgagtcagactctgccctgggacctttggacaacctcaacagacctcgtgcaacccgcttccggagggtctttcaacggattcacccaaccgcaggacacaagcctatttacaatgcagactgaccagtccatgatctgtaatttaataatccccggagccgacgcagacgctgctgtggggaccctcgtctccgcggctgagggcgcccccggggaggaagccgaggctgagaaggccaccgtgccagcaggcgaaggagtcagcctggaggaagccaagatagggacagaaacgaccgagggcgctgaaagtgcacagccagaagccgaagagctggaggccactgtcccccaggaaaaggtgattccctctgtggtgatcgaaccagcctctaaccatgaagaggagggcgagaacgaaataaccatcggcgcggagcctaaggaaaccactgaagacgccgctccacctggtcccacttccgaaacaccggaactcgctaccgagcaaaaacccattcaggacccccagcctacacctagcgctcctgcgatgggcgcggcagaccagctggcttctgcccgcgaggccagccaagagttaccacctggattcctgtataaggtggaaacactccacgatttcgaggccgcaaattccgatgagttgacactacagcggggcgatgtggtgttggttgttcccagcgattctgaggccgatcaggacgccggctggcttgttggagtgaaagagtccgattggctgcagtacagggatctggctacatacaagggcctgttcccagagaactttacgcggaggctcgattag

SEQ ID NO: 178847 - DNA, 1794 bp, synthetic construct
  misc_feature 1..1794: note = Description of Artificial Sequence: Synthetic coding sequence
  source 1..1794: mol_type = other DNA
atgaccaagctgggcgaccagcacgccgacaaggccttcaccatccaaggagcacctagcgacagcggacccctaagaatcgctaagacaccctcccccccagaggaaccgtcacccctgcccagcccaactgcctcccccaatcatactttagcccccgcctcccccgcacccgcgcgcccaaggagcccttcgcagacaaggaaaggacctccggtgccgcctctgccaaaggtgacaccaacaaaagaactccaacaagaaaacattattagtttctttgaggacaacttcgtgccagaaatatcagttaccacccccagtcagaatgaggtccctgaagtgaagaaagaagaaactctcctcgatttggacttcgacccttttaagccagaggtcactccggcagggtcagctggcgtgacacactccccaatgtctcagaccctgccatgggatctatggactacacatacttttaacgatgacattactgattcctcagagtcgttaagcctttgtaacctgatcatggaggagactcctgactccggccttgcagaggaaattcagcgttctcagaacgatatcggcgcgtttacctgggggccagacgcctccaccgatagagtgtcccaggaggtcacgagtggtggctttggtgaagattctgcatgtcccagcgaaactgaacaagatattcggctgtcaacaagtctcctttcctcagccgactggccaactgtggccgaagagtcagagcatgccccaggcccggcattcccaggcggtaatgaacagcttccaccgaaacctgccccggaggccggagtggctatagccgcatgtgtcgaaatggagcagctgtacgaccccctcgatagtgacatgcccgccatggacaccgcggggctgtttaaagagagccacgaggatatgaagaagtccgacgaggaggaggaaaagcaaaagatggaggactctctgtgggcaggcgttgaagcatgccagaaggcctccggcggctccttcaatgggtttacacagccacaggacacttctttattcactatgcagacagatcagagcatgatttgtaacctgatcattcccggcgcggatgccgacgctgcagttgggaccctcgtatcagccgcagagggggctccaggagaggaggcagaagcggagaaagctacggtgcccgccggggagggagtttctctggaggaggcgaaaatcggaactgagactacagaaggggctgagtccgctcagccagaagccgaagaacttgaagcaactgtgccccaggaaaaggttatcccttcagtcgtcattgagcctgcttctaaccacgaggaggaaggggagaatgagattacgattggggccgaaccaaaagagaccaccgaagacgctgctcccccgggtcccacttctgagacccccgagctggcgaccgaacagaaacccattcaagatcctcagccaaccccatcagcacccgcaatgggagctgccgaccagctggcatctgcaagagaagcctcccaggaactccctcctggtttcctttacaaggttgagaccctccacgatttcgaagctgccaactcagacgagcttaccctacaaaggggagatgtcgtactggttgttccttcagactctgaagcggatcaggacgcaggctggctggtgggtgtgaaggagagtgactggctgcagtatagagacctggcgacgtacaaaggtctattccctgaaaacttcacaaggagactggactag

SEQ ID NO: 178848 - DNA, 2088 bp, synthetic construct
  misc_feature 1..2088: note = Description of Artificial Sequence: Synthetic coding sequence
  source 1..2088: mol_type = other DNA
atggccgacatcaagaccggcatcttcgccaagaacgtgcagaagcgtctcaaccgtgcccaggaaaaggtgctgcaaaagctgggaaaagcagacgagaccaaggatgaacagttcgaagaatatgtacagaactttaagcgccaggaggccgaaggcacccggctgcaacgcgagctgcgcgggtacctggctgcgatcaagggaatgcaggaggctagtatgaaactcactgaaagtctgcacgaggtgtacgagccagattggtacgggcgtgaggatgtgaaaatggtaggagaaaagtgtgatgttttgtgggaggacttccaccagaaactggtggacggatctttgctaactctcgacacctatctcggccagttcccagatatcaagaataggattgcaaaacgttccaggaaactggtagactacgactcagccagacaccatctggaggccttgcagtcttccaaaagaaaggacgagtctaggattagcaaggccgaggaggaattccagaaagcacagaaggtgtttgaagaattcaacgtcgacctgcaggaagaattgccctcgctctggtcaagaagagttggtttctatgtcaatacgtttaaaaatgtgtcctcacttgaggccaaattccataaagagattgctgtgctttgccataagctctatgaagtgatgacaaagttgggagaccaacacgccgataaagcctttaccattcagggggccccatccgactccggcccgctccgcattgccaaaaccccttccccacctgaagagccttcaccactccccagcccaactgcctcacctaaccatacgctcgcgcctgcatctccggctcctgctcgccctcgctcgccctcacagacaaggaaagggccccctgtgccaccacttcctaaggttacccctacgaaggaactgcaacaggagaacatcatcagtttttttgaggataatttcgtgcccgagatcagcgtgaccaccccaagccaaaatgaggtacctgaggtgaagaaagaggagaccctgctggacctggatttcgacccattcaagcctgaagttacaccagctgggtcagcgggagtcactcatagccctatgtcccaaacacttccttgggatttgtggacaaccagtactgatttggtacaacctgctagtgggggttcattcaacggttttacccagccgcaggatacttccctgttcacaatgcagaccgaccagtcaatgatctgtaatttggccgaatcggagcaggccccccctacggagccaaaagccgaagagccgttagccgctgtgacaccagcagtgggattggacctcggaatggatacaagggcagaggagccagtcgaggaagctgtaatcatacctggagcagatgctgacgctgctgtaggaacattggtgagcgcagcagagggggcccccggggaagaagccgaagcggagaaagcaactgtgccagccggggaaggcgtctctttggaggaggccaagattggcaccgagaccaccgaaggagctgagtctgcccaacccgaggctgaggagctggaggctaccgtgcctcaggagaaggtgatcccttcagtggtgatcgaaccagcatccaaccatgaagaagaaggcgagaatgaaatcaccattggcgctgagccaaaggagaccacggaggacgccgcccccccaggacctactagcgagacgcctgaactggccactgaacagaagcccatccaagaccctcaaccaacgcccagtgcgcctgctatgggtgctgctgatcaactagcctcagcccgcgaggccagtcaggaactgccaccagggttcctgtacaaagtggagactcttcatgacttcgaggcggcaaatagcgatgaactcacactccaacggggcgacgtagttctggtcgtcccctcagactctgaagccgaccaggatgcaggatggctagtgggcgtcaaagaatcagattggttgcagtacagggaccttgccacgtacaaggggttgtttcccgaaaactttaccagacgccttgactag

SEQ ID NO: 178849 - DNA, 591 bp, synthetic construct
  misc_feature 1..591: note = Description of Artificial Sequence: Synthetic coding sequence
  source 1..591: mol_type = other DNA
atggaggagacccccgacagcggcctggccgaggagatccagcggtctcagaacgacattggtgctttcacctggggccccgatgcctcgacggatcgcgtgagccaggaagtgaccagcggcggatttggagaggattcagcttgtccttctgagactgagcaggatatccgactgagcacgtctctgctgagtagcgccgattggccgaccgtggcggaagagagtgagcatgcgcccggcccggcgttccctggaggtaacgaacagctcccccccaagccagctcccgaggctggagtggcaattgcagcctgcgttgagatggagcaactttacgatcctctggactccgatatgcccgcaatggacaccgctggattgttcaaggagtctcatgaagacatgaaaaaatcagacgaggaggaagagaaacagaagatggaagattcactctgggcgggcgtggaagcctgtcagaaagcaagtggaggttccttcaacggatttacacaacctcaggatacgtcgctgttcactatgcagactgaccagtccatgatatgtaatctggagataaccgtgaactag

SEQ ID NO: 178850 - DNA, 1962 bp, synthetic construct
  misc_feature 1..1962: note = Description of Artificial Sequence: Synthetic coding sequence
  source 1..1962: mol_type = other DNA
atggccgacatcaagaccggcatcttcgccaagaacgtgcagaagaggttgaaccgggcacaggagaaggtgctccagaaactcggtaaggcggacgagactaaggatgaacagttcgaagaatatgttcagaattttaaaagacaagaggctgaagggacacggctgcaaagggagcttcggggctatttggccgcaattaagggaatgcaagaagcctcgatgaaactaaccgagtctctccatgaagtatatgagcccgattggtacggtagggaagacgtcaaaatggtaggcgagaaatgtgacgtgctgtgggaggactttcatcaaaagctcgtcgacggaagtttgctgactctcgacacctatctgggtcagttccccgatatcaagaacagaatcgccaaaagatctaggaagttagtggattatgattctgctcggcaccacctcgaggccctccagtcctcgaagagaaaagacgagagtcgaatttccaaggccgaagaagaattccaaaaagcccagaaggtctttgaagaatttaatgtggacctgcaggaagagctgccaagtttgtggtccagaagagtcggtttttacgtaaatactttcaaaaacgtgtcctcactggaggcgaagttccataaagagatcgccgtgctgtgccacaagctctacgaggtcatgactaaactgggcgaccagcacgctgataaagcgtttactatccaaggggccccgtctgattccggacctctcaggatcgctaagactccctccccccctgaggagcctagccctcttccaagtcctacagcctctcctaatcacacattggctcctgcttcaccggccccggctcgcccccgctctccctctcagacacgcaaaggaccacccgtgccacccctcccgaaagtgactcctacgaaggagctccaacaggagaatatcattagtttctttgaggataatttcgtgcccgagatcagcgtgacaacaccgtcacagaatgaggttccggaagtcaagaaggaggaaacactgttggacttggattttgacccgttcaaaccagaggtcacgcccgccggtagcgcgggggtgacccacagtccaatgagtcagaccctgccttgggacttgtggacagcgggggtggaagcctgtcagaaagcatccggcggatccttcaacgggtttacacagcctcaggatacgtcccttttcactatgcagacagatcagtcaatgatttgcaacctcattatcccaggcgcagacgcggacgctgccgtgggcactctggtctccgccgctgagggggcccctggggaggaggcagaagctgaaaaggctaccgtccccgctggcgagggtgtgagcctcgaggaagcgaaaatcggcaccgagactactgagggggctgagagcgcacaaccagaggccgaggagctggaagccaccgtgcctcaggagaaggtgatacccagtgtcgtaattgagcccgcctctaatcatgaggaggagggggagaatgagattaccatcggagccgagcccaaggagactaccgaggacgcagcaccaccagggcccacaagcgaaacccccgagcttgctacagaacagaaaccaatccaggacccccagcctacccccagtgccccagccatgggcgccgccgaccaactggccagcgcccgcgaggctagccaggaactgccccctggtttcctctacaaagtggagacactgcacgattttgaagccgccaactcggacgagctgaccttgcagagaggtgatgtggtcctggttgtaccatccgactccgaggccgatcaagacgctggatggctcgtgggggttaaggagagcgattggttgcagtacagagacttggccacctacaaaggtctgtttccagaaaacttcacacgaagactggactag

SEQ ID NO: 178851 - DNA, 1158 bp, synthetic construct
  misc_feature 1..1158: note = Description of Artificial Sequence: Synthetic coding sequence
  source 1..1158: mol_type = other DNA
atggccgacatcaagaccggcatcttcgccaagaacgtgcagaagagactgaatagagcacaagagaaagtcctccagaaactaggaaaagcagatgagactaaggatgagcagttcgaggaatacgtgcaaaatttcaagcgccaggaagcagagggtaccagactccagagggagctgagaggctatctagccgctattaaagggatgcaagaagcttccatgaagctgacagagagcctccatgaagtgtacgagcccgattggtacggaagggaagacgtgaaaatggtgggggagaagtgcgatgtcctttgggaagacttccaccagaagctggtggatggatcacttttaacacttgacacgtacctgggccagttccccgatatcaaaaatagaatcgcaaagcggtcccgcaaactggtggactacgacagcgcccggcatcacctggaggccttgcagagcagtaaaagaaaggacgaaagcagaatatccaaggcggaagaagagttccaaaaagcacaaaaggtgttcgaggaatttaacgtcgatctccaggaagaattaccttccctgtggtctcgccgcgtcggcttctatgtgaatacgtttaagaacgtgagctctctcgaggcaaaatttcataaggagattgccgtgctttgccacaaactgtacgaggtcatgaccaagcttggagaccagcacgcagacaaggcttttacaattcagggcgcccctagacagtacctcgattccggtcccctgaggatcgctaagacaccctcccccccagaggagcctagccccttgccctctcctacagcttctcctaaccatactttggcacctgcttcgcccgcccccgctaggcctcgttccccctcacagaccagaaagggtcccccagtgcccccgctgcctaaagtgacacccaccaaggagctgcagcaagaaaatataatctcctttttcgaggacaactttgtgcctgaaatttcggtgacaacaccgtcccagaacgaagtacccgaggtcaaaaaagaggagacactgctggacttagactttgacccattcaaaccggaggttaccccagctgggagcgcgggtgttacccatagtccgatgagtcaaactgtggggtggtag

SEQ ID NO: 178852 - DNA, 759 bp, synthetic construct
  misc_feature 1..759: note = Description of Artificial Sequence: Synthetic coding sequence
  source 1..759: mol_type = other DNA
atgcgggcccccctgctgccccccgcccccgtggtgctgagcctgctcatcttgggatcagggcactatgcggcggggttggacctgaacgacacttatagcggtaagcgggaacctttttccggcgatcattctgccgatggctttgaagtgacatctcggtctgaaatgagctccggtagtgagatttcccctgtctccgagatgccaagttcttctgaaccatccagtggagcagattacgattactccgaagagtacgacaacgagcctcaaattcccgggtacattgtggacgactcagtcagagttgagcaggttgtaaagccaccacagaacaagacagagagtgagaatacctccgacaaaccaaaaaggaaaaagaaaggtggcaagaacggaaaaaaccgacggaacagaaagaaaaaaaatccatgcaacgctgagttccaaaacttttgtatccatggcgagtgtaaatacatcgaacatttggaggcagtgacttgtaagtgtcagcaggagtacttcggcgaacgctgtggcgaaaaaagcatgaagacacattccatgatcgattctagcctgtctaaaatcgccttggccgctatcgcagccttcatgtcggcggttatcctgactgcagtcgccgtcataacggtgcagctccgccgacaatacgtccgcaaatatgagggagaggccgaagaacggaagaaactccgtcaggaaaatggcaatgtgcatgctatagcttag

SEQ ID NO: 178853 - DNA, 759 bp, synthetic construct
  misc_feature 1..759: note = Description of Artificial Sequence: Synthetic coding sequence
  source 1..759: mol_type = other DNA
atgcgggcccccctgctgccccccgcccccgtggtgctgagcctgctgatattagggtctggacactacgctgccggcctggacctcaacgatacttacagtggaaagagggagcctttttccggggatcatagcgctgatgggtttgaagtgaccagtcgatccgaaatgtcaagcggctctgagatctcccctgtttccgagatgcccagttctagcgagccaagctccggggcggactacgactacagcgaggagtacgataatgagcctcaaattccaggatacatcgtcgacgactccgtaagggtcgaacaggttgttaagccaccccagaataagactgaaagtgagaacacgtctgataagcccaagcgcaagaagaaaggaggaaagaacggtaagaaccgtcggaatcgtaagaagaagaacccctgtaacgctgaattccagaacttttgtatacacggtgaatgtaagtatattgagcaccttgaagcggtgacttgcaaatgccaacaagagtactttggcgaacgatgcggtgagaaatccatgaaaacccattccatgatcgactcatctctttccaagatcgcccttgcggcaatcgcagcctttatgtccgccgtaatcctgacagcggtagccgtaataacggtgcagctgcgaaggcagtacgtccggaaatacgaaggagaggccgaagagagaaagaagttaagacaagaaaacggaaatgtgcatgctatcgcttag

SEQ ID NO: 178854 - DNA, 1536 bp, synthetic construct
  misc_feature 1..1536: note = Description of Artificial Sequence: Synthetic coding sequence
  source 1..1536: mol_type = other DNA
atgaagctgttctggctgctgttcaccatcggcttctgctgggcccagtacagttccaacacacaacaggggagaacatccattgtacacttatttgaatggaggtgggtagacatcgcgctcgagtgtgagcgatatctggcacctaaagggtttggaggggtgcaggtatcaccccctaatgaaaatgtggccattcacaatccattccgcccctggtgggagcggtatcagcctgtgtcttacaaactttgcacgagatcgggtaacgaagatgagtttcgcaacatggtcacccgatgcaataatgtgggcgtgcggatatacgttgatgcagtgatcaatcacatgtgtggtaatgcagttagcgcaggaacatcctccacatgcggctcttactttaatcccggatcccgggattttccagcagtcccatacagcggttgggattttaatgatggcaagtgcaaaaccggatctggggacatcgagaattataacgacgctacccaggtaagagactgcaggctgtctgggctcctagaccttgctcttggcaaggactacgtaaggagcaaaatagcggagtacatgaaccacctgatcgatatcggcgtggcgggttttagaattgatgcctctaagcacatgtggcctggtgatatcaaagcgatcctggataagctgcacaatctcaatagcaactggtttccagagggtagtaaaccatttatctatcaggaagtcatagatctgggcggcgaacccatcaaatcttctgattattttggaaacggcagggtgacagaattcaagtacggcgctaaactgggaacggtgataagaaagtggaacggggaaaaaatgagctatttgaagaactggggggaaggctggggtttcatgccttctgatagagctttggtgtttgtggataatcacgataaccagaggggccacggagcgggcggagcttcaatcctgactttctgggacgctcgtctgtacaaaatggccgttggatttatgctggcccacccctacggttttacacgtgtgatgtcctcctaccgatggcctcgttattttgaaaacggaaaagacgtgaatgactgggtcggaccgcccaatgacaatggggtgaccaaggaggttaccattaaccccgacactacctgcggtaacgattgggtgtgcgaacatcggtggcgccaaatccgaaacatggtgaactttcgaaacgtcgtggacggccagccttttaccaattggtacgataacggatccaatcaagtggcctttgggagggggaatagaggctttatcgtattcaacaacgatgattggacgttctccctcacactccagaccggactgcctgctggcacatattgcgatgtcattagtggtgacaagatcaacgggaattgtactggaataaaaatttacgtgtcagacgatggaaaggctcacttctccatctccaactctgctgaggacccctttatcgctatccacgccgaatctaaattatag

SEQ ID NO: 178855 - DNA, 318 bp, synthetic construct
  misc_feature 1..318: note = Description of Artificial Sequence: Synthetic coding sequence
  source 1..318: mol_type = other DNA
atgaagctgttctggctgctgttcaccatcggcttctgctgggcccagtatagtagtaatactcaacaggggcgaacatctatcgtgcatctgtttgagtggagatgggtggacattgcgctggagtgcgagcgataccttgcccctaaaggattcggaggtgtccaggtgagcccacccaatgagaacgtcgctatccacaatcctttcaggccttggtgggagcgctaccagcccgtgtcgtataagctctgcacgcggtcaggcaatgaggacgaatttaggaacatggtaacgcggtgcaataacgtgggatag

SEQ ID NO: 178856 - DNA, 681 bp, synthetic construct
  misc_feature 1..681: note = Description of Artificial Sequence: Synthetic coding sequence
  source 1..681: mol_type = other DNA
atgaagctgttctggctgctgttcaccatcggcttctgctgggcccaatattctagtaacacccagcaaggacgcaccagcatcgtccaccttttcgaatggcgctgggtcgacatagctctggagtgcgaaaggtacctcgctccgaaaggcttcggcggtgttcaggtctcaccccccaatgaaaacgtggccatccataatcccttccgaccgtggtgggaaaggtatcaaccggtttcttataaactgtgtactaggagcggtaacgaggacgaattccgtaacatggtaaccagatgtaacaatgtcggtgtcaggatctacgtggatgctgtcattaatcatatgtgtggaaacgcggtgtccgctggtacatcatctacgtgcggctcttattttaatcctggatccagggatttcccggcagtaccttattcaggttgggacttcaatgatggcaagtgcaagacaggatcaggcgacatagagaattataacgatgccacacaggtgcgagactgccgacttagtggtttattggatctggccttaggcaaagactacgtgagatccaagattgccgagtatatgaatcacttgattgacatcggcgtagcggggttcaggatagatgcatcaaaacacatgtggcctggcgacatcaaggctattctgtag

SEQ ID NO: 178857 - DNA, 1536 bp, synthetic construct
  misc_feature 1..1536: note = Description of Artificial Sequence: Synthetic coding sequence
  source 1..1536: mol_type = other DNA
atgaagctgttctggctgctgttcaccatcggcttctgctgggcccagtatagcagcaatacccagcagggccggaccagtatcgtacacctgtttgagtggcgctgggtggatatcgcattggagtgtgaacggtatctggcccccaaagggtttggcggagtgcaagtttcccctcctaatgagaatgtcgccatccataatccgtttaggccatggtgggagaggtatcagccggtatcctacaaactgtgtacccggtcaggaaacgaagacgagttccgcaacatggttactcggtgtaacaatgtgggggtgcgaatttatgttgacgcagtgataaatcacatgtgtggtaacgccgtaagtgcaggcacctcatccacctgtggatcttacttcaaccctggctccagggatttccctgccgtcccatacagcggatgggatttcaacgacggaaagtgtaagaccggaagtggcgacattgagaactataacgatgccacgcaggtgagggattgcaggctttccggcctgctagacctggcacttggtaaggactacgtacgtagcaagatcgctgagtatatgaatcacctcattgatatcggggtggccggtttcaggatcgacgcatctaaacacatgtggcccggtgatatcaaggcaattctggacaagctgcacaatctgaactctaattggtttccagaagggtcgaagcccttcatttaccaggaagtgatagatctcgggggtgagccaataaagtcatcagattacttcgggaacggcagggtgaccgaatttaagtacggcgctaaattaggcaccgtgatcaggaaatggaacggagaaaagatgtcttatctgaagaattggggcgagggctggggctttatgcccagcgacagggcccttgtgttcgtggacaaccacgacaatcaacgagggcacggcgctggaggagcgagcatcctcaccttctgggacgcgcgtctgtataaaatggccgtcggatttatgctggcccatccctacggattcactcgcgtgatgtccagttacaggtggccacgatattttgaaaatgggaaggatgtaaacgactgggtcggtcccccaaatgacaacggggtgacaaaagaggtcaccattaatccagatacaacctgcgggaacgactgggtttgcgaacatcggtggcgccagattcgcaacatggtgaatttccgaaatgtggtggacggacagccattcacgaattggtacgacaacggctcaaaccaagttgcctttggcaggggtaatagagggtttatcgtgttcaacaacgatgattggaccttctccctcacattgcaaaccggcctgccggcagggacctattgcgacgtgatctcaggggataaaatcaacgggaactgcactggaatcaaaatttacgtctcagacgatggaaaagctcatttctccataagcaactctgcagaagatccattcatagcaatacacgccgaaagtaaactctag

SEQ ID NO: 178858 - DNA, 1536 bp, synthetic construct
  misc_feature 1..1536: note = Description of Artificial Sequence: Synthetic coding sequence
  source 1..1536: mol_type = other DNA
atgaagctgttctggctgctgttcaccatcggcttctgctgggcccagtatagctcgaacacacagcagggaaggacttcaattgtgcacctattcgagtggcgctgggttgatatagcgctggagtgtgagcgatacctggcccccaaaggttttggcggcgtgcaggtgtcccctcctaatgagaatgtggccattcacaatccattccgaccgtggtgggagcgataccaacctgtaagttacaagctctgtactagatccggcaatgaagatgagttcagaaacatggtgactaggtgtaataacgtgggtgtccgcatttacgttgacgcagtgataaatcatatgtgtggaaacgcagtttcagcaggcactagctctacctgcggcagttattttaacccaggcagtagggatttccccgctgtgccctattccggatgggatttcaatgacggcaagtgtaagaccggctcgggagacatagaaaattacaatgacgctacccaggtcagggactgccggctgtctgggttgctggatctggcattaggtaaagactatgtgaggagcaaaattgctgagtacatgaatcatctcattgacatcggtgtggcgggcttccggattgatgcatcgaaacatatgtggcctggcgatatcaaggctatcctcgataaactccacaacctgaacagcaactggtttcctgagggctctaagccatttatataccaggaggttatagacttggggggcgaacctataaagagcagcgactacttcgggaacgggcgggtgaccgagttcaagtacggagcaaagcttggcacagtcatcaggaagtggaacggcgagaaaatgagctatctcaagaactggggagagggatggggctttatgccatcagatagagcgctggttttcgttgacaatcatgataaccagcggggccacggtgccggcggtgcctccattctgaccttttgggatgcacggctgtacaagatggccgtcgggtttatgctggcgcacccttacggcttcaccagggtcatgtccagttaccggtggccaagatatttcgaaaacgggaaagacgtgaatgactgggtagggccaccgaatgacaacggcgtgacgaaggaggttactattaatccagacaccacatgcggcaacgactgggtgtgtgaacacaggtggcgtcaaattagaaacatggtgaattttagaaatgtggtcgatggccagcctttcaccaactggtacgataatggctcgaaccaagtggccttcgggagaggtaacaggggatttatcgtctttaacaatgacgactggactttcagcctgaccttgcagacaggtctgcccgccgggacttactgcgacgtgatcagtggggataagataaacggcaattgtaccggaatcaaaatctatgtcagcgacgatggtaaggcccacttctcaatatccaatagtgccgaagacccctttattgctatccacgcggaaagtaaactgtag

SEQ ID NO: 178859 - DNA, 318 bp, synthetic construct
  misc_feature 1..318: note = Description of Artificial Sequence: Synthetic coding sequence
  source 1..318: mol_type = other DNA
atgaagctgttctggctgctgttcaccatcggcttctgctgggcccagtactcatctaatacccagcaggggagaacaagtatcgtgcacctgttcgagtggcggtgggttgacatcgccctggagtgtgaaaggtaccttgcacctaagggctttggaggggtccaggtctcgcccccgaacgagaacgtggccatccataatccgttccgcccctggtgggagcggtatcagcccgtctcttataagctgtgcacacggtcaggaaatgaggacgagttcagaaacatggtcacgcggtgtaataatgttgggtag

SEQ ID NO: 178860 - DNA, 681 bp, synthetic construct
  misc_feature 1..681: note = Description of Artificial Sequence: Synthetic coding sequence
  source 1..681: mol_type = other DNA
atgaagctgttctggctgctgttcaccatcggcttctgctgggcccagtattccagcaatacgcagcagggacgtacctccattgtgcatctatttgaatggcggtgggtcgacattgcgctcgaatgtgaacggtacttagcgcctaagggcttcggcggggtgcaggtctcacccccaaatgaaaatgtggctattcacaaccctttccgaccctggtgggagcgctatcagccggtcagctataagctctgcacgcggtctggaaacgaggacgaattcagaaatatggtcactcgatgtaacaacgttggagtgagaatctacgttgatgcagtgatcaaccacatgtgtggcaacgctgtctctgctggaaccagctccacttgcggctcttattttaacccagggtcacgcgattttccggccgtgccctactctggctgggactttaatgatggcaagtgcaagaccggctcaggagacattgaaaattataatgatgctacacaggtccgagattgtaggctgtcaggactgttagatctggctctcggtaaagattacgttcgcagtaagattgccgagtatatgaatcacctcatcgatataggcgtggcaggctttaggatcgatgcatcgaagcacatgtggcccggagacattaaggcaattctctag

SEQ ID NO: 178861 - DNA, 1536 bp, synthetic construct
  misc_feature 1..1536: note = Description of Artificial Sequence: Synthetic coding sequence
  source 1..1536: mol_type = other DNA
atgaagctgttctggctgctgttcaccatcggcttctgctgggcccagtatagcagcaacactcagcaaggacgaacatccatcgtgcacttattcgagtggagatgggtcgacatagccttagaatgcgagcggtacctggcaccgaagggcttcggcggcgtgcaggtttcccccccgaatgaaaacgtcgctatccacaacccattccggccttggtgggaaagatatcaaccagtgtcctataagctctgcactaggtctggaaatgaagatgaatttcgtaacatggtgacaagatgtaacaatgtgggcgttagaatttatgtggacgcagtgataaaccacatgtgcggtaatgccgttagtgctgggacctccagcacttgtggctcttactttaatccagggagtagagacttccccgcagtcccgtattccggatgggatttcaacgacgggaagtgtaagaccgggtccggcgatatcgaaaactataacgatgctactcaggtaagagactgccggctatccgggctcctggacctagctttgggaaaagactacgtgaggagcaagatcgctgagtatatgaatcaccttatagacataggggtggccgggtttcgaatcgatgccagcaagcacatgtggcccggcgacataaaggcaattttggataagctgcacaatttaaactctaactggtttcctgaaggttctaaaccattcatctaccaagaggtcattgatctgggaggtgaaccaatcaaatcatccgattatttcggaaacgggcgcgtgacagaattcaagtatggcgctaaactggggaccgtgattaggaagtggaacggggaaaagatgagctacctcaagaactggggagaaggatggggatttatgccatcagaccgcgctttagtgtttgtggataaccatgacaatcagcgtggccacggagccggtggagccagtatactgacattttgggatgcccggctgtataagatggctgtcggctttatgctggctcacccctacggttttactagagtgatgtcaagttataggtggcccagatattttgagaacggtaaggacgtgaacgactgggttggcccccccaacgataatggcgtcacaaaggaggtgaccattaatcctgatactacgtgcgggaatgattgggtgtgtgaacataggtggcgccagatcaggaacatggtcaacttccgcaatgttgtcgacggccagccctttactaactggtatgataacggcagtaaccaggtggctttcggacgggggaataggggcttcatagtgttcaacaacgatgactggacattttctcttaccctccagaccgggctgccagcggggacttattgtgacgttatcagcggagataaaataaatggaaattgcactgggattaaaatatatgtgtccgacgatgggaaagcccattttagcatttccaattcagcagaggaccctttcattgcgattcacgccgagagcaagctgtag

SEQ ID NO: 178862 - DNA, 1536 bp, synthetic construct
  misc_feature 1..1536: note = Description of Artificial Sequence: Synthetic coding sequence
  source 1..1536: mol_type = other DNA
atgaagttcttcctgctgctgttcaccatcggcttctgctgggcccagtacagccccaacacacagcagggacggaccagcatcgtgcatctttttgaatggcggtgggtggatatcgctcttgaatgtgaacgatacctggccccgaaaggttttggcggggtccaggtgagtccgccgaatgagaatgtagcgatttataatccttttaggccctggtgggagcgctatcagcctgtgtcttacaagctctgcacaaggtctggaaacgaagatgagttccggaacatggtgacaaggtgcaacaacgtgggggtgagaatatacgtggatgcggtcataaaccatatgtgcggtaacgctgttagcgccggtacctcctccacttgtggtagttacttcaaccccggctctcgagattttcccgccgtaccatactccggctgggacttcaatgacggcaagtgtaagacaggatcaggcgatattgagaattacaacgacgcgacacaggtgagagactgtagactcacaggattgctggacctggcccttgagaaggattacgtgagatccaaaatcgccgaatatatgaatcacctgattgatattggtgttgccggcttcagattagatgcttctaagcacatgtggcccggggacatcaaggcaatcctggacaagctacataacctcaatagtaattggttcccagcgggtagcaagccctttatttaccaggaagtgatcgatctgggaggcgagcccattaagtcaagtgattacttcggtaatggaagagtgaccgagttcaagtacggcgccaaactgggtactgttatcaggaagtggaatggcgaaaaaatgtcatacctgaagaactggggcgagggctggggatttgtgccatcagatagagccctggtatttgtggacaaccacgacaaccagaggggacacggagccgggggagcttcgattctgaccttttgggacgcaagactgtacaagatggccgtcggctttatgctggcacacccatacgggttcactagggtcatgtcttcctatcgttggcccaggcaatttcagaatggaaatgatgttaacgactgggttggaccacctaataataacggggtgataaaagaagtaactataaatcctgacacgacatgtggaaacgactgggtgtgtgagcatcggtggcgccagatccgaaacatggtcatttttagaaacgtcgtggatgggcagccttttacgaactggtacgacaatggctcaaaccaggtggctttcggcaggggcaacagaggttttatcgtcttcaataatgatgactggtctttctcgctcaccttgcagaccggtctgccggccggcacgtattgcgatgtgatctcaggtgataagattaacggcaattgcaccggaatcaagatctacgtgtcagatgacggtaaagctcatttctcaataagcaattcagcagaagatcctttcattgcaatccacgcagagtccaagttgtag

SEQ ID NO: 178863 - DNA, 1536 bp, synthetic construct
  misc_feature 1..1536: note = Description of Artificial Sequence: Synthetic coding sequence
  source 1..1536: mol_type = other DNA
atgaagttcttcctgctgctgttcaccatcggcttctgctgggcccagtattctcccaatacgcagcaaggccgtacctctattgtgcatctgtttgaatggaggtgggtggatatcgctctcgaatgtgaacgctatctcgcccccaagggattcggcggggtacaagtgtcaccccctaacgagaacgtggccattcacaatccattccgaccttggtgggaacgctatcagcctgtgtcctataaattatgtacaaggagtgggaatgaggacgagtttaggaatatggtaactcgatgcaacaacgtcggtgtccgtatttatgtggacgcagtcataaatcatatgagtggtaacgcagtgtctgcaggaacatcaagcacctgcggaagctatttcaaccccggtagcagggactttcccgccgtcccctatagcggatgggacttcaacgatgggaaatgcaaaaccggttcaggagacattgagaactataatgacgccacccaggttcgtgattgtaggctcgtgggtcttctagatctggccctggaaaaagattacgtgcggagcaagattgccgagtatatgaaccatcttatcgatatcggcgtggccgggttcagactggatgctagtaaacatatgtggcccggtgacattaaggccatcctcgacaaattacacaaccttaactcaaactggtttccagcagggtcaaagccgttcatctaccaagaagtgatagacctcggaggcgaacccattaagagctctgactattttggcaacggacgtgtgacagaatttaagtacggtgccaaactgggaactgtgatacggaaatggaatggtgagaagatgagttatctgaaaaactggggcgagggctggggatttatgccatcagatagagccctcgtttttgttgataatcacgataaccagaggggacatggggccggcggggcatctatcttgacattttgggatgcaaggctgtataaaatggccgtgggctttatgttagctcacccctatggcttcacccgggtgatgagctcctacagatggcccaggcagttccagaacggtaacgatgttaacgactgggtcgggccccctaataacaacggagtcatcaaggaagtaacgataaaccccgataccacctgtgggaacgactgggtctgcgagcaccgctggcgccagatccgcaacatggtgaactttagaaacgtggtggatgggcagcctttcaccaactggtacgataatggttcaaatcaggtggctttcggacgggggaatagaggttttattgtgttcaacaacgatgactggaccttttcactgacgctgcagaccgggctgcctgccggtacctactgcgatgtgattagcggcgacaagattaatggcaattgtactgggatcaagatctatgtgtcagacgacggcaaagctcatttttccatctcaaattctgccgaggaccctttcattgctattcacgctgaatccaagctatag

SEQ ID NO: 178864 - DNA, 291 bp, synthetic construct
  misc_feature 1..291: note = Description of Artificial Sequence: Synthetic coding sequence
  source 1..291: mol_type = other DNA
atgaagttcttcctgctgctgttcaccatcggcttctgctgggcccaatacagcccaaacacccaacagggtagaacttctatcgtccatctgttcgaatggagatgggtcgatatcgcccttgaatgcgaaagatatctggcccctaagggatttggaggtgtccaagtgtcacctcccaatgagaatgtcgcaattcacaatccatttcggccttggtgggagcgctaccagccagtgtcttacaagttatgtacgcgctcggggaatgaagatgaatttaggaactag

SEQ ID NO: 178865 - DNA, 261 bp, synthetic construct
  misc_feature 1..261: note = Description of Artificial Sequence: Synthetic coding sequence
  source 1..261: mol_type = other DNA
atgaagttcttcctgctgctgttcaccatcggcttctgctgggcccagtacagccctaacacacagcagggcagaacgtcaatcgtgcacctgtttgaatggcggtgggtagatatcgcactcgaatgtgaaagatacttggcccctaagggcttcggaggagtccaggtgtcacccccaaatgagaacgtcgcaatccataatccttttcgcccttggtgggagcgctatcagcccgtgagttacaaattgtgcacttag

SEQ ID NO: 178866 - DNA, 2313 bp, synthetic construct
  misc_feature 1..2313: note = Description of Artificial Sequence: Synthetic coding sequence
  source 1..2313: mol_type = other DNA
atgctgcccggcctggccctgctgctgctggccgcctggaccgcccgtgcgcttgaagttcctacagacggtaatgctggtttgctggccgagccccagatagcgatgttctgtggcagactgaatatgcacatgaacgttcaaaacggcaaatgggattccgacccctccgggactaagacgtgcattgatacgaaagaaggcatcctgcagtattgtcaggaggtgtatccagaactacagattacgaatgttgtggaggccaaccagcctgtaactatccaaaactggtgcaagcgaggacgtaagcagtgcaagactcatccacacttcgttattccttaccggtgcctggtgggcgagttcgtgagtgatgcccttttggtacctgacaaatgcaaattcctccatcaggagcgtatggacgtctgtgaaacccacctgcattggcatacagtcgcaaaggaaacctgttccgagaaaagcacgaacttgcatgactatggtatgctactgccctgtggtattgataagttcaggggtgtcgagttcgtgtgttgtcctttggccgaggaatccgataatgtcgattctgctgatgcagaagaggacgacagcgacgtctggtggggtggcgccgatacggactatgcagacgggagtgaggataaggtagtggaggtggcggaggaagaggaagtcgctgaagtggaggaggaagaggcggacgatgatgaagatgatgaagacggtgacgaggtggaagaggaggccgaggagccctacgaggaggcaaccgaaaggactacatccattgccacgactaccacgactacaactgagtctgtggaagaggtggttagagaagtttgctccgagcaggctgaaacgggcccttgcagagccatgattagtcgctggtatttcgatgtaaccgaaggcaaatgcgcacccttcttttacggcggttgcgggggaaatcggaataacttcgatactgaggagtactgcatggctgtgtgtggttctgctatgagccagtccctgcttaagactacacaagagccactggcacgcgaccccgtaaaactacctaccactgcagctagcacacccgatgccgttgacaagtacctcgagacccccggcgacgaaaatgagcacgcgcattttcagaaagccaaagagagacttgaggccaagcatagggagcgcatgtctcaggtgatgcgagaatgggaggaggctgaaagacaggccaaaaatctgcccaaagcagataaaaaagctgtcatacagcactttcaggagaaggtggagtcactggagcaggaggccgcaaatgagcgccagcagttggttgagactcatatggcaagggtggaggccatgctgaacgatcgccgcaggctggctctggaaaattacattactgcgctgcaggcagtgccccctcggccccgacacgtcttcaatatgctgaagaagtatgtaagggcagaacagaaagataggcagcatactttgaagcactttgaacacgtgagaatggtggaccccaaaaaggctgcccaaattaggagccaggtcatgacacacctgcgggtgatttacgagcgaatgaatcagtcgctgagtctgctttataacgtccctgccgtggctgaggaaattcaggacgaagtagacgagctcttgcagaaagagcagaactacagcgacgatgtcttggcaaacatgattagcgagccgcgaatcagctacgggaacgatgcgttgatgccttctctgacagaaacaaagacaaccgtggaacttctgccagtgaatggagagttctctcttgatgatcttcaaccttggcacagttttggagctgacagtgtgccagccaacaccgaaaatgaagtagaacccgttgacgctagacccgccgccgataggggactcaccacaagaccaggcagcggcttgaccaatatcaagacagaagagatttctgaagttaagatggatgctgaattccggcacgacagtgggtacgaggttcaccatcagaagttggtgttctttgcggaggacgtgggcagtaacaaaggcgccatcatcggcctgatggttgggggcgtggtcatagccacagtcatagtcattacccttgtgatgcttaagaaaaagcaatacacgtctatacaccacggagtcgtcgaagtggacgccgcagttactcctgaggagagacatctgagtaaaatgcagcagaatggatatgaaaaccccacttacaaatttttcgaacagatgcagaactag

SEQ ID NO: 178867 - DNA, 2088 bp, synthetic construct
  misc_feature 1..2088: note = Description of Artificial Sequence: Synthetic coding sequence
  source 1..2088: mol_type = other DNA
atgctgcccggcctggccctgctgctgctggccgcctggaccgcccgcgctctagaggtcccaaccgacggcaatgccggactgctggcggaaccacagatcgccatgttttgtggtagactgaacatgcatatgaatgtgcaaaacggcaaatgggatagcgaccccagcggaacaaagacgtgcatagacaccaaggaggggattcttcaatactgtcaggaggtgtatccagaacttcaaataactaatgttgtggaggctaaccagccagttacaatccagaactggtgcaaaagaggccgcaaacaatgtaaaacccatccccacttcgtgataccctacaggtgtctggtcggagagtttgtgagtgatgccttgctggttcccgacaaatgcaaatttctgcatcaggaacggatggatgtctgcgaaacgcatcttcactggcacactgtggctaaggagacctgctcagaaaagagcactaatctccacgactatggcatgcttttgccatgtggaatcgataaatttaggggagtagagttcgtgtgctgtccgctggccgaagaaagtgacaatgttgactctgccgatgctgaggaggatgattccgatgtatggtgggggggggcagacaccgattatgctgacggctctgaagataaggtggtcgaagttgctgaggaagaggaagtggccgaggtcgaagaagaggaggccgatgacgacgaagatgacgaagacggcgacgaagtcgaggaagaagccgaggagccatacgaagaggctacagagagaactacttcaattgccacaactaccacaacaacgacagagtcagtcgaagaagtggttcgggtaccaaccacagctgcttcaacccctgacgccgttgataaatatttggagacgccaggtgatgagaatgaacacgcgcattttcagaaggctaaggagcggctcgaagccaaacatcgcgaacgcatgagtcaggtcatgagggaatgggaagaggccgaaagacaggccaagaacctgcccaaggcggacaagaaagccgttatccagcattttcaggagaaagtcgagtctcttgagcaggaagccgcgaacgagaggcagcagcttgtggagacgcatatggcacgcgttgaagccatgcttaatgatagacggcgactcgcgctcgagaactatattaccgccctgcaggcagtcccgccgcggccgaggcatgtttttaacatgctgaagaaatacgtgcgagcagaacagaaggatcgtcagcacaccctgaagcattttgagcatgttaggatggtagatcccaaaaaagcagcccagatccggagccaggttatgactcacctcagagttatttatgagcggatgaaccaatccctgtcgctgttatataatgtgcctgcggtcgctgaggagatacaggacgaggtggatgagctgctgcagaaggagcagaattattccgacgacgtgctggctaacatgatcagcgaaccgaggatctcatacggcaatgacgctctgatgccatccttgacagagactaagaccacggtggagttgctgcctgtgaacggagaattcagtctcgacgatctgcaaccctggcatagcttcggagccgactccgtgccagccaacaccgagaacgaggtcgaacctgtggacgccagaccggcagccgatcgagggctcactactaggcctgggtcaggcctgactaacatcaagaccgaggaaatcagtgaggttaagatggatgccgaatttcgacacgatagtggttatgaggtgcaccatcagaagttggtatttttcgctgaagatgtcggctcgaacaaaggcgccattattggtttgatggtgggaggggtcgtgatagccaccgtgatcgtcattactctagtcatgctcaagaaaaagcagtatacttcaatacaccatggagtagtggaagtcgatgccgccgtaacgccagaggaacgacacctttccaagatgcagcagaacgggtacgagaatcccacatacaagttttttgagcagatgcagaactag

SEQ ID NO: 178868 - DNA, 1920 bp, synthetic construct
  misc_feature 1..1920: note = Description of Artificial Sequence: Synthetic coding sequence
  source 1..1920: mol_type = other DNA
atgctgcccggcctggccctgctgctgctggccgcctggaccgccagagctttagaagtatatcctgagcttcaaattaccaacgtagtagaagccaatcagccagttaccatccagaactggtgcaagcgcggacggaagcagtgtaagacacatcctcactttgtgattccataccggtgcctggtgggagagtttgtgtccgatgcattgctcgttcctgataagtgtaaatttctccaccaagagcggatggatgtttgtgaaacgcacctccactggcacaccgtcgccaaggagacctgtagtgagaaatctacaaatttacacgactacggaatgctcttgccgtgtggaattgacaagtttcgaggagtagaattcgtctgttgccccctcgctgaggaatccgacaacgtggactccgcagatgctgaggaggacgacagcgacgtgtggtgggggggagctgacaccgactacgccgacgggagtgaagacaaggtggtggaggtggctgaggaggaggaagtggccgaagtggaggaagaagaggctgatgatgatgaagacgacgaagacggcgatgaggtcgaggaggaagccgaggaaccctacgaggaggcaacggaacgcaccaccagcatagccactactacaaccaccacaaccgaatccgtggaagaagtggtacgggttccaacaaccgccgcttcaacacctgacgcagtggacaagtacttggagacacccggggacgagaatgaacacgcgcactttcagaaagcaaaggaaagactcgaggctaagcaccgagagcgtatgtctcaggtaatgcgtgagtgggaggaggccgagcgacaagccaagaatcttccgaaggccgacaaaaaagcagtcattcagcatttccaggagaaggtggagtccctggaacaggaggccgctaatgagaggcagcagctggtcgagacacacatggcgagggtggaggccatgctcaacgatcgccgaaggctcgctctggagaactatataactgccctgcaggcagtgccgcccaggccccggcatgtgttcaacatgctcaaaaagtacgtccgagcagagcagaaggaccggcaacatacactgaaacattttgagcatgtgaggatggtggacccaaagaaggccgcccaaattcgatctcaagtgatgactcacctgcgcgtgatttatgaaaggatgaatcagagtctctccttgctgtacaacgtacctgccgtggcggaagagatccaggacgaagtagatgaattgctgcaaaaggaacagaattactcagacgacgtactggccaatatgattagcgaacctcgcattagctatggcaacgatgctctgatgccgagccttacagaaaccaaaactacagtcgaactgttgcctgtcaacggcgaattctctctcgatgacttgcagccgtggcactccttcggtgccgattcagtacccgccaataccgagaatgaagtggaacctgtggatgctagaccagcagcggataggggtctgactacacgccccggtagcggcctgactaatatcaaaactgaagagatatctgaggtcaaaatggatgctgagtttcgacatgatagtggctacgaagtacatcatcagaaacttgtgttctttgctgaagatgttggctctaacaaaggggccataattgggttaatggtcggcggcgttgtgattgccacagtgattgtcattacattagtaatgctcaaaaagaagcagtacacatcaattcaccatggcgtggttgaagtggacgctgctgtaacccctgaggagaggcacctgagtaagatgcagcagaacggatacgagaatccgacatacaagtttttcgaacagatgcaaaactag

SEQ ID NO: 178869 - DNA, 2256 bp, synthetic construct
  misc_feature 1..2256: note = Description of Artificial Sequence: Synthetic coding sequence
  source 1..2256: mol_type = other DNA
atgctgcccggcctggccctgctgctgctggccgcctggaccgcccgggctctggaagtgccaaccgatggcaacgccgggctgctagcagaaccacagattgcgatgttctgtggcaggctgaacatgcacatgaacgtgcagaacggcaaatgggattctgatcccagcgggactaaaacgtgcattgatacaaaagaaggaatcttacagtattgtcaggaggtatacccagaactccagatcacgaatgtggtcgaagccaatcagccagtaactattcagaattggtgtaagagaggaagaaaacaatgtaaaacccacccccactttgttatcccttaccggtgcctcgtgggggagttcgtatctgacgcgttgctcgtcccggacaaatgcaaattcctccatcaggagagaatggacgtatgtgaaacgcaccttcattggcatacagtagcaaaggagacttgttccgagaaatcgacgaatttgcacgactatggaatgctgttgccctgcggtatcgacaagtttcgtggtgttgagtttgtgtgctgccctcttgctgaagagtccgacaatgtggattcggccgatgccgaggaggacgatagcgacgtgtggtggggcggggccgacacagattacgccgatgggagtgaggataaggtcgtggaagtggcggaagaggaagaggtggcagaagtggaagaagaagaagctgacgatgacgaagatgatgaagacggagatgaggttgaagaagaggctgaggaaccatatgaagaagctacagaacgcacgacatctatagccaccaccaccaccactaccactgagtccgttgaggaggtggtgcgcgaagtttgttcggagcaggctgagactgggccctgcagggcgatgatttcacggtggtacttcgacgttactgaggggaagtgcgccccctttttttacggtggatgcgggggaaaccgaaataattttgatacagaggagtactgtatggccgtgtgtgggtctgcgatcccaacaaccgcggcaagcactccagacgcggtagataagtacttagaaacacccggcgacgaaaatgagcatgcgcactttcagaaagccaaagagaggctcgaggctaagcaccgtgagcgaatgtcccaggtgatgcgagaatgggaggaagcagaacgacaggccaaaaatttaccaaaggccgataagaaggcggtgatacagcatttccaggagaaggtggaatccttagagcaagaggctgcaaatgagcgccagcagttggtggaaacccacatggcacgggttgaagccatgctgaacgaccgaaggagactggccctggagaattatattaccgcgctgcaggcagtgccaccccgaccccgccatgtcttcaacatgctgaagaaatacgtccgggccgagcagaaagatagacagcacaccctcaagcattttgagcacgtccgcatggttgatcctaagaaagccgcacagatccgctctcaggtgatgacacacctgcgtgtcatctacgagcggatgaaccagtccctaagtctattatacaacgtccctgccgtagcagaggagatccaggacgaggtggacgaactcctccagaaggagcagaactattcggatgatgtcctcgccaatatgataagtgagccaagaatcagctatggcaacgatgcactgatgccttctttgactgagaccaaaacgaccgtcgaactcctgcccgtgaacggtgaattttctctcgatgatctccaaccatggcattccttcggcgccgattccgtgccagccaacaccgagaatgaagtggagccagtggacgcacggccagccgccgatcggggactgacaactagacctgggtctggactgacaaatattaagacggaagaaatctctgaggtaaagatggatgcagaattccgtcatgattctgggtacgaagtgcaccaccaaaagctggttttttttgcagaagacgtcggttctaacaaaggagcaattatcggattaatggtgggtggtgtcgttatcgccacagtgattgtcatcactttagttatgttgaaaaaaaagcagtatacaagcattcaccatggggtggtagaagtggatgccgcagtgacgccggaggaacgacacctgtctaagatgcaacagaatggttacgagaatccaacttataagttctttgagcagatgcaaaattag

SEQ ID NO: 178870 - DNA, 2259 bp, synthetic construct
  misc_feature 1..2259: note = Description of Artificial Sequence: Synthetic coding sequence
  source 1..2259: mol_type = other DNA
atgctgcccggcctggccctgctgctgctggccgcctggaccgcccgggctcttgaggtgcccacagacggtaacgccggactgctggctgagccacagatcgctatgttttgtggcagacttaacatgcacatgaacgtgcagaatggcaagtgggatagcgacccaagcggcaccaaaacttgcatcgacacaaaggaggggatactgcagtactgtcaggaggtctaccctgagcttcaaataaccaacgtggtcgaggcaaaccagcccgtgaccattcagaattggtgtaaacgtgggagaaaacaatgcaagacgcatccccacttcgttataccttacaggtgtcttgtcggcgagtttgtgtcagacgccctgcttgtcccagataagtgcaagttcctgcaccaagaaagaatggacgtgtgcgaaacccatcttcattggcacaccgtggccaaagagacctgtagcgagaaatcgacaaacctgcatgactatggcatgctgctaccatgcgggattgataagtttcgcggcgtggaattcgtgtgctgtcccttggccgaggagtccgacaatgttgacagcgccgacgccgaggaggacgacagtgacgtatggtggggtggagctgatacggactacgctgacgggtcagaggataaggtggtcgaagtagcagaggaggaggaggtagcagaagtggaggaggaagaggctgatgacgacgaggacgatgaagatggagacgaagtggaggaggaggccgaagaaccctacgaggaggccaccgaaagaactacatcaatagcaacaaccaccacgactaccaccgagtccgtcgaggaagtggtgagagaggtttgttcagagcaagcagagaccggcccctgtagggctatgatctccagatggtattttgatgttacggagggcaaatgcgcgcccttcttttacggtggttgtgggggcaatcggaataactttgacactgaggaatattgtatggccgtatgcgggagcgctatgtcccagagcctgttgaagaccactcaggaaccattagcgcgcgaccctgtgaagctgcccacaacggccgccagtactcccgatgctgttgataaatatttagaaactcctggggacgagaacgagcacgcgcattttcaaaaagcgaaagaaagattagaagctaaacaccgcgagcggatgtcccaagtgatgcgcgagtgggaggaggctgaaaggcaagctaaaaatctgcctaaggcagataaaaaggctgtgattcagcattttcaagagaaggttgaatccttagagcaggaagctgcaaatgagaggcagcagctcgtggagactcacatggccagggtggaagccatgctgaacgaccgacgaaggctggcactcgagaactacatcacagccctgcaggccgtccctccacgcccgagacacgtgttcaacatgctgaagaaatacgtgagggccgagcagaaagatcggcaacacacacttaagcactttgagcatgtgcgtatggttgacccaaagaaagccgcccaaatccgctcacaggttatgacacacctgagggtaatctacgaaaggatgaaccagtctttgagcctcctgtacaatgtccctgccgtggcagaagaaattcaagacgaggtcgacgagctgttacagaaagagcaaaattatagtgatgacgtgctggctaacatgatcagtgagccacggatctcatatgggaatgacgccctgatgcccagcctgactgaaacaaaaaccaccgtggaactcctgccggtaaacggggaattctctctggatgatcttcagccttggcattcttttggtgctgattctgtgccggcaaacactgagaacgaggggtctggactcactaacattaagaccgaggaaatttccgaggttaaaatggacgcggagttccggcacgattctggatatgaggtacaccatcagaaacttgttttttttgccgaagacgtgggttctaataagggcgctattatcggcctgatggtcggcggggtcgtcatcgcgaccgtcatcgtgatcactctagtgatgctgaagaagaaacaatacacctcaatacaccatggggtggtagaggtcgatgctgctgtgacacccgaagagcgccacctctctaaaatgcagcagaatgggtatgagaacccaacttataaattctttgaacagatgcaaaattag

SEQ ID NO: 178871 - DNA, 2145 bp, synthetic construct
  misc_feature 1..2145: note = Description of Artificial Sequence: Synthetic coding sequence
  source 1..2145: mol_type = other DNA
atgctgcccggcctggccctgctgctgctggccgcctggaccgcccgagctttggaggtgcctaccgacggaaatgcagggctcctggccgaaccacagatcgccatgttttgtgggagactgaacatgcacatgaacgtgcagaacggaaagtgggatagcgacccttcaggtaccaagacttgcatcgataccaaggagggaattcttcagtactgccaagaggtgtacccagaactccaaattaccaatgttgtggaggctaatcagccagtaactattcagaattggtgcaagcgagggaggaagcagtgtaagacccacccccattttgtaattccgtacagatgcctagtcggggagttcgtgagcgatgccctgttggtgcctgacaagtgcaagtttctgcatcaggagcgaatggacgtctgtgagacgcacctgcactggcacaccgtggcgaaagaaacttgctcggagaaatctaccaatctgcacgattacggaatgctgttgccatgcggaattgataagtttcgcggcgtagagtttgtctgttgtccactggccgaggaatctgataatgttgatagtgcagatgcggaggaagatgactccgacgtgtggtggggaggtgccgacacagactatgcagatgggagtgaagataaggtggtcgaggtcgcagaggaagaagaggtggccgaagtagaggaagaagaagcggacgacgacgaagatgatgaagatggagacgaagtggaggaagaggcagaggagccctacgaagaggcaaccgaacgcaccaccagcatagccaccacaaccactacgacgacagaatctgtggaagaagtggtgagagtatctcagtcccttctgaagactacccaagagccactggcacgggatcctgtgaaactgcctaccactgcggcgtccacccccgacgccgttgacaaatatctcgagactccgggagacgagaatgagcatgctcacttccagaaggccaaggagcgactggaagctaagcaccgcgagagaatgtctcaggtgatgagagagtgggaggaggccgagcgccaagcaaaaaatctgccgaaggccgataaaaaagccgttatccagcactttcaggagaaagttgagtccttggaacaggaggcagctaatgagcgccagcagctggtcgagacacatatggccagagtagaggccatgctcaatgacaggcgacgccttgctcttgaaaactatattacagccctacaggcggttcctccccgccctcgtcacgtgttcaatatgctgaagaagtacgtgcgcgccgagcagaaagaccgccagcatacactgaagcatttcgaacacgtccgaatggtggatccaaagaaagctgctcaaatccgttcccaggtcatgacacatttacgagtcatttacgagcggatgaatcagtcactgtctttgctctacaatgtgccagctgtggctgaggaaattcaggatgaggttgacgagctattacagaaggaacagaattacagcgatgacgtccttgctaacatgatcagcgaacctcgaatttcttatggtaacgacgccctcatgcctagccttacagagaccaagacaacagttgagctgctgcctgtgaatggcgagttcagcttagacgatttgcagccctggcattcgtttggcgcagactccgtacctgccaatacagaaaatgaagttgaacccgtggacgcaaggcccgccgctgaccgaggtctgacaacccgaccaggaagtggactgaccaacattaagacagaggaaatttccgaggtcaagatggatgccgagtttaggcacgatagtggttacgaggtccatcaccaaaagcttgtatttttcgctgaggacgtgggaagcaacaagggcgcaattatcggcctgatggtcggcggggtggtgatcgcgaccgtcatcgtaataaccctggtcatgctcaaaaaaaaacagtacacttcaattcatcacggggtggtggaagtggacgcagcagtgacccctgaagagagacacctatcaaagatgcaacagaacggatacgagaaccctacctacaagttctttgagcagatgcagaactag

SEQ ID NO: 178872 - DNA, 2145 bp, synthetic construct
  misc_feature 1..2145: note = Description of Artificial Sequence: Synthetic coding sequence
  source 1..2145: mol_type = other DNA
atgctgcccggcctggccctgctgctgctggccgcctggaccgcccgggcactcgaggtataccctgagctacaaattacaaatgtcgtggaggctaatcagcccgtcaccatccaaaactggtgtaagcggggacggaagcagtgcaagactcatccacactttgtgataccataccgatgcctcgtgggcgaatttgtcagcgatgccctgctggtgcctgacaagtgcaagtttctgcatcaggagcgcatggatgtgtgtgaaacgcatttacactggcatactgttgccaaggagacgtgtagcgagaaaagtactaacttacatgattacggtatgctgctgccctgcggcatagacaaatttcggggtgtcgaatttgtgtgttgcccactggcggaggagagcgataacgttgattctgcggacgctgaggaagacgacagcgacgtctggtggggaggagcagacactgactacgccgacggaagcgaagacaaagtggtggaagtagcggaggaggaagaggtggctgaagtggaagaggaagaggctgacgatgacgaagacgatgaggacggagacgaggtggaggaggaagccgaggaaccatatgaggaagcaacggaacgcaccacatcaatcgccaccacaacgacaaccaccacagagagcgtagaggaggtagtccgggaggtctgttctgagcaggcagaaacagggccctgtagggccatgattagtaggtggtactttgacgtcacggaaggcaaatgcgcaccattcttttacggcggctgtggcgggaaccgtaacaattttgataccgaggagtactgtatggctgtctgtggctccgccatgagccagtctctgctgaagaccacacaggagccactggcccgtgaccctgttaaattgcccaccacagccgcaagtacgcccgatgcagtcgacaaataccttgagactccaggggacgaaaatgagcatgcccatttccaaaaggccaaagagcgcctggaagcaaaacaccgggagaggatgagtcaggtgatgagggaatgggaggaagcagagcggcaggccaagaatcttccgaaggctgacaaaaaagctgtgattcaacactttcaagagaaagtagaatctctggaacaagaggctgcaaacgagcgacagcaacttgtagaaacccacatggctagggtcgaggctatgctgaacgacagacggcgcctcgcccttgagaattacatcacagcattgcaggccgttcccccccggcccagacacgtgttcaacatgctcaaaaagtacgtcagggcggagcagaaagatcgccaacacaccttgaaacattttgagcatgtgaggatggtggaccctaagaaagccgcccagatccgttcccaggtcatgactcatctgcgagttatctatgaaaggatgaatcaatctctctctctgctctacaacgtgccagccgtcgctgaggaaatccaggacgaggtggacgagctgcttcaaaaggaacaaaactacagcgatgatgtcctagctaacatgatctcagaaccgagaataagctatggtaatgatgccctcatgcccagccttacagagaccaaaactaccgtcgaactcctgccagtgaacggggagttctcactagatgacctccagccgtggcacagtttcggcgccgactccgtgccggccaataccgaaaatgaagttgaaccggtggacgctagacctgcggcggatcgcggacttacaacgaggccaggatctggcctgacaaatatcaagacggaggagatcagcgaggtgaagatggatgcggaattccgtcatgactcgggctacgaggtgcatcaccaaaaattagtgttctttgctgaggatgtcggttcaaacaaaggagctattatcggactaatggtagggggagtggtcatcgctacagtcatcgttattacccttgtgatgctgaaaaaaaaacaatatactagtatccaccacggtgtcgtggaagtggacgccgccgtgacgcctgaggaacgccacctgagtaaaatgcagcaaaacggatatgagaacccaacatataaattcttcgagcagatgcagaactag

SEQ ID NO: 178873 - DNA, 2241 bp, synthetic construct
  misc_feature 1..2241: note = Description of Artificial Sequence: Synthetic coding sequence
  source 1..2241: mol_type = other DNA
atggaccagctggaggacctgctggtgctgttcatcaactacgtgcccaccgatggcaacgcggggctgcttgctgagcctcagatagcgatgttctgtggtaggctgaacatgcacatgaatgttcagaatggaaagtgggatagtgacccatccggtacaaaaacctgtattgacacaaaggaaggcattcttcagtactgccaggaggtttatccagagttgcaaattacaaatgtggtggaggctaatcagccagtgactattcagaactggtgcaagcggggccggaaacagtgcaagactcacccccatttcgtcattccttatcggtgcctagtaggtgaattcgtatcagatgctcttctggtcccggataaatgcaagttcttacatcaggagagaatggacgtgtgtgagactcacctacattggcacacagttgcgaaggagacatgcagcgagaagtctaccaatcttcatgattacggcatgctgttaccctgcggcatcgacaagttcaggggagttgaatttgtctgctgtcccctggctgaggagtctgataacgtggacagtgctgatgcagaagaggatgactcagatgtgtggtggggcggagccgatactgactatgccgacggatccgaagacaaggtcgtggaagtggctgaagaagaagaggttgccgaggtagaagaggaggaggccgatgatgatgaggatgacgaggacggggacgaggttgaagaagaggccgaggaaccgtatgaagaagccactgaacgcacaacatcaatcgctactaccaccaccacaaccactgaatccgttgaggaggttgtgagagaggtgtgcagtgagcaggccgagaccggaccgtgtcgcgctatgattagtaggtggtacttcgatgtgacggagggcaaatgtgcaccattcttctacggcgggtgcggcggcaaccggaacaattttgacacagaagagtactgtatggctgtctgtggtagtgctatacctactactgccgccagcacacctgatgcagtcgataaatacctggagacccctggggatgagaatgaacacgctcactttcagaaagccaaggaacgcttagaggctaaacatagggaacgcatgtctcaagtgatgagagaatgggaggaggctgagcgacaggccaagaacctccccaaggcagataagaaagccgtgattcaacacttccaggagaaggtggagagtctggagcaggaggcagctaatgaacgccagcagttggtggaaacacatatggcaagggttgaggccatgcttaacgataggcgacggctagctctggaaaattacatcactgctctccaggctgtcccaccccgcccacgacacgtttttaatatgttaaagaaatacgtgagggctgagcagaaagacagacagcacaccctgaaacatttcgaacatgtgcgcatggtggatccaaagaaggctgctcagattaggagccaggtaatgacacatcttagggtcatctatgagcgaatgaaccagtcactgagtctgctgtacaacgtcccagctgtggcagaggaaattcaggatgaggtcgatgagctcctgcagaaggagcagaactatagtgatgatgtgctcgccaacatgatcagtgagccaagaatcagctatgggaacgacgcgctcatgccatccctgactgaaacaaagaccaccgtggaactgctacctgttaacggcgagtttagtctggacgatctccagccctggcactctttcggcgctgatagcgtcccagcaaatactgagaacgaggtagagcccgtcgatgcccgcccagccgcggaccgcggcctcacaactagacctggatcaggacttactaacattaagactgaggaaatttccgaagtcaagatggacgcggaattccgacatgacagtggctatgaagttcatcaccaaaaactagtcttttttgctgaagacgtgggcagcaacaaaggtgcaataattggcctgatggtggggggtgtcgtgattgctaccgtgattgtgatcactctggtcatgctgaagaagaaacagtacaccagcatccatcatggcgtagtggaggttgatgcagctgttactcccgaagagcgacatctgtcaaagatgcaacagaacggatatgaaaacccaacgtataagttctttgagcagatgcaaaattag

SEQ ID NO: 178874 - DNA, 1983 bp, synthetic construct
  misc_feature 1..1983: note = Description of Artificial Sequence: Synthetic coding sequence
  source 1..1983: mol_type = other DNA
atgttctgcggccggctgaacatgcacatgaacgtgcagaacggcaaatgggactccgacccatccggcactaaaacgtgtatcgacactaaagagggcattctgcagtactgccaggaggtgtatccagagctgcagatcactaacgttgtagaggccaatcaacccgtaactatccagaactggtgcaagaggggacggaagcaatgcaagacgcaccctcatttcgtaataccgtaccggtgcctcgtgggtgaatttgtctccgacgctctcctggtgcccgataagtgtaaattccttcaccaggagcgcatggatgtgtgtgagacccacctgcactggcacacagttgcgaaggagacttgttctgagaagtccactaatctgcatgactatgggatgctgctgccatgcggcattgataagtttcgaggcgttgaatttgtctgttgccccctggccgaggagagcgataacgtcgatagtgcggatgccgaggaagatgacagtgacgtgtggtggggtggtgcggatacagattacgccgatggaagtgaggataaggtcgttgaagtggctgaagaagaggaagtcgctgaggtggaggaagaagaagctgacgatgatgaggatgacgaggatggtgacgaagtcgaagaggaagccgaagagccctacgaagaagctactgagcgcacaacctccatcgccacgaccactacgactaccacagagagcgtcgaagaggtggtgagagtgccaacaacggcagcctctactccagacgcggtcgataaatacctggagactcctggcgatgaaaatgaacacgcacactttcaaaaagcgaaagaacgcttagaagcaaagcacagagaaaggatgtcgcaagtgatgagagaatgggaggaagctgaacggcaggcaaagaacctgcctaaggcagataaaaaagcagttatccagcatttccaagaaaaggttgaatctttggagcaggaggccgctaacgagagacagcagttggtggagacacacatggcacgcgtggaagcaatgctgaacgatcggcgccgtctggccctggagaactatattaccgcactccaggccgtcccaccccggcccaggcacgtctttaacatgctgaaaaagtatgtccgggccgaacagaaagaccgccagcacaccttgaagcacttcgagcacgtccgcatggtagaccctaagaaagctgcccagatccgatcccaagtgatgacacacctgcgggtgatatacgagcgcatgaatcagtctctgagtttactgtataacgtgcccgccgtcgctgaagagatccaggacgaggtcgatgaactgctgcagaaggaacaaaactacagcgatgatgtgctggctaatatgatctctgagcctaggatctcttatggtaatgacgctcttatgccgagcttaacagaaaccaagaccacagtagagctactccccgtgaacggtgaattctccttagacgacctacagccctggcacagcttcggagctgacagcgtccccgccaatactgaaaacgaagttgagccagtggacgcacgcccggcagctgaccgggggctgacaactcggccaggatccgggctgaccaacatcaagactgaagagatcagcgaggtgaagatggatgccgagtttcggcacgactccggatacgaagtgcaccatcagaagctcgtatttttcgccgaggatgtgggaagtaacaaaggggccattatagggcttatggtggggggtgtagtgatcgctactgttattgtcataacactagtcatgcttaaaaagaaacagtacacctccatccatcacggggtggtggaagtagacgccgctgtcacgcctgaggagcgccatctgagcaagatgcagcagaacgggtatgaaaaccctacctacaagtttttcgaacaaatgcagaattag

SEQ ID NO: 178875 - DNA, 789 bp, synthetic construct
  misc_feature 1..789: note = Description of Artificial Sequence: Synthetic coding sequence
  source 1..789: mol_type = other DNA
atgcgggtgcaggacaccagcggcacctactactggcacatccccactggcaccactcaatgggaaccacctggccgtgcctcgccaagtcaaggatctagtcctcaagaggaatcacagctcacatggaccggttttgcacatggtgagggcttcgaggatggcgagttttggaaggacgagccaagcgacgaggcacctatggaattgggcctgaaggaacctgaggagggcaccctgacctttccagcccagtccttaagccccgaacccttgcctcaggaagaagagaagctccccccaagaaacaccaaccccggcattaaatgttttgcggtccgttccctgggctgggtggagatgaccgaggaagaactggcccctggaaggtcatcagttgcggttaataactgcatacgacagttatcttatcacaagaacaatttgcacgatccaatgtccggggggtggggagagggtaaagacctactgctgcagttagaggacgagacacttaaactggtagagccacagtctcaggccctgttgcacgcccagccgattatctccattcgagtgtggggtgtcggacgtgactcaggccgggactttgcttacgtggcgcgcgataaattgactcagatgctaaaatgtcatgtgttccgttgcgaagctcccgccaaaaatatcgctacctcactgcacgagatctgcagtaaggcaaggccacctccactgcccggcctggtagctacttttgcactgcaggggtgcggttggggccattag

SEQ ID NO: 178876 - DNA, 1482 bp, synthetic construct
  misc_feature 1..1482: note = Description of Artificial Sequence: Synthetic coding sequence
  source 1..1482: mol_type = other DNA
atgctgggcaaggactacatgctggccatcatcctggtgaactgcgatgatgacttgtggggtgatcacagccttgaagtggaagctgggctgccgcccggctggcggaaaatccatgacgcagcagggacatattactggcacgtgccttcagggtctacccagtggcagcgcccaacctgggagttgggcgatgccgaggatcctggcacagggacggagggcatttgggggctacggccaccaaagggcagatcattcagcagtttggagtcatcattagaccgatcaaatagcctgagttggtacggaggggagtcctatatccaatctatggagccgggggctaagtgctttgctgtcagatccctgggatgggtggaggtgccggaggaggacttagcacctgggaaatcatcaattgcggtgaacaattgtatccagcaactcgcgcagactaggtcacggagccaacccccagatggagcatggggagagggccagaatatgctcatgattctgaaaaaagacgcgatgtccctggtcaaccccttggaccacagtttgatacactgccagcctctcgtgcacattcgcgtgtggggggtgggctcctctaaaggccgggacagccctatatccgcccctgcacgggactttgcattcgtggcgtccgataaagacagctgtatgcttaagtgtcatgtgttttgctgtgatgtgcctgctaaggccatcgcttcggcgctccatggactgtgcgctcagatcctgtctgagcgagttgaggtctctggggatgcatcttgctgctcaccagatccaatcagccccgaggacctccctagacaggtcgagctgctggacgctgtttctcaggccgcccaaaagtacgaggccctgtacatgggcactctcccagtgaccaaggctatgggcatggacgtgctgaatgaagctatcggaactcttacagcgcgtggcgacagaaatgcctgggtaccaaccatgctttccgtgagtgattccctgatgaccgcccaccccattcaggccgaggcctccactgaagaggaaccgctgtggcaatgtccagtgcgcctcgtcactttcattggagtcggacgcgatccccatacattcggattgattgcggatctgggcaggcaatcgtttcagtgcgctgccttttggtgtcagccgcacgctggcggattatccgaggccgtccaggctgcttgcatggtgcagtaccagaaatgccttgtcgctagtgccgctaggggaaaagcttggggagcccaggcaagagctaggctgcgactgaagcgcactagttctatggacagtccggggggccctctgccattgcccctgctgaaagggggcgtcgggggagccggagctacgccacggaagagaggagtgttctcatttctagacgcctttaggctcaagccttctcttttacatatgccttag

SEQ ID NO: 178877 - DNA, 1377 bp, synthetic construct
  misc_feature 1..1377: note = Description of Artificial Sequence: Synthetic coding sequence
  source 1..1377: mol_type = other DNA
atgatcaccaagacccacaaggtggacctgggcctgcccgagaagaaaaaaaaaaaaaaggtggttaaggagccagaaactcgctactcagtgctcaataacgacgactatttcgcagacgtgagtcctctgcgcgcaaccagcccctcgaagagcgtggcgcatggccaggcacccgagatgcctctggtgaaaaaaaagaagaaaaaaaaaaaaggagttagcacattgtgtgaggaacacgtcgaaccggaaactactttgcccgcacgtcgcaccgaaaagtctccttcactgagaaaacaggttttcggacatctggaattcctgtcgggggagaagaaaaataaaaaatcgccattagcaatgagtcacgccagcggggtcaagacttctcctgatcctaggcagggcgaggaagagacccgggttggaaagaagctgaaaaagcacaagaaagagaaaaaaggagcccaggacccaacagctttttctgtgcaggatccgtggttttgcgaagcccgggaggcacgggacgttggtgacacttgctctgtgggaaagaaggacgaagaacaagcggctctgggacagaagcgcaagcggaagagtccaagagagcacaacggaaaggtgaagaagaaaaaaaaaatacaccaggaaggggacgcgctcccgggtcacagcaagcccagccgcagtatggagtcctctccccggaaaggcagcaaaaagaagcccgttaaggtggaagcacccgagtacatccctatttccgacgatccaaaggccagtgccaagaagaaaatgaagtctaagaagaaggttgagcagcccgtaatcgaagagcctgctctgaagagaaagaaaaaaaagaagagaaaagagtcgggagtagccggggatccatggaaggaagagaccgacacggatctggaggttgtgctcgagaaaaagggcaacatggatgaagctcatatagaccaagtacgcagaaaggctctccaggaggaaatcgaccgggagtctggcaaaactgaagctagtgagactaggaaatggacaggaacgcagtttggacaatgggatactgccggcttcgagaatgaagaccagaaattaaagttcctgcggctgatgggagggtttaaaaacttgtcaccttcctttagtaggcctgcaagtacaatcgcgagacctaacatggccctcgggaagaaggcggctgattcactccagcagaacctgcagagggattacgaccgcgccatgagctggaagtattcgcggggtgccggccttggatttagtactgcaccgaacaagatattttatatagaccggaacgcttctaaaagcgtcaaactggaggactag

SEQ ID NO: 178878 - DNA, 2214 bp, synthetic construct
  misc_feature 1..2214: note = Description of Artificial Sequence: Synthetic coding sequence
  source 1..2214: mol_type = other DNA
atggcccaccggaagctggagagcgtgggcagcggcatgctggaccatcgagtaaggcccgggccagtgcctcacagtcaggagcccgagagcgaggacatggagctaccactggaaggctacgtgccagagggcctcgaactggccgccttaaggcccgagtcccccgccccagaagaacaggagtgccataaccattcccccgacggcgactcctcaagtgattacgtgaacaatactagcgaagaagaagactatgacgaaggactgccagaggaagaggaggggattacttactatattcgttactgcccagaagatgatagttacttggagggtatggattgtaatggagaggaatacctagcacacagtgcccatcctgtggataccgatgaatgtcaggaggcagtagaggaatggactgactctgccgggccacacccacatggacacgaggcagaaggcagccaagactaccccgatggccaactccctatccctgaagacgagccctcagtcctggaggctcacgaccaggaagaagatggacactactgcgccagcaaggaaggatatcaggactattaccccgaagaggcaaatggcaatactggtgccagtccctatcggcttcggcgaggagacggtgacctggaggaccaggaagaagatatcgaccagattgtcgccgaaattaaaatgagcctgtccatgactagcatcacaagtgcgtcagaagctagtcccgagcatggtcccgaacccgggcctgaggattccgtggaggcttgtcctccaatcaaggccagctgctcaccgagtcggcacgaggcgcgacctaagtccctgaacttgcttcctgaagccaagcaccccggcgatccccagcgtgggtttaagccaaaaacccgcacacctgaagaacgactcaaatggccacacgaacaggtctgcaatgggttggagcagccacgcaaacaacaacgctcagatctgaacggtcccgtcgacaacaacaacatccccgagacaaagaaggtggcctcctttccttcttttgtagccgtaccgggtccttgtgaacctgaggatctgattgacggaattatttttgccgccaattatctgggatccactcaattgctgtccgaaagaaatccctccaaaaatattaggatgatgcaggcccaagaagctgtgagcagggtaaaaaactccgaaggagatgcacaaaccctaaccgaagtcgatctcttcatttccacccaaagaatcaaggtgctcaatgccgacacccaggagacgatgatggatcacgcgttgcgcaccatctcatatatagcagatattggaaacatcgtagttctcatggctcggaggcgaatgccccgtagcgcctctcaggattgcattgaaaccacgcccggagcacaggaaggcaaaaagcagtacaagatgatatgccatgtcttcgagtctgaagacgcccagctgatcgcccagtcaatcgggcaggccttttccgtggcctaccaggagtttcttagggctaacgggatcaatccagaggatctatcacagaaagagtacagtgacatcatcaacacccaggagatgtataatgacgaccttatccacttcagtaattccgaaaactgcaaagagctccagttggaaaagcacaaaggggaaattctcggtgtggtagtggttgagagcggctgggggtccatcctacccactgttatcctggccaacatgatgaatggaggccccgcggcccggtctggaaaactttctatcggtgatcagatcatgagtattaacggcacaagcttagtgggtctgcctttggccacatgccagggcatcataaaaggtctcaagaaccagacacaggtcaagctgaacatcgtctcatgccctcccgttacgacagttcttataaaacgacctgatttaaagtatcagctggggttcagtgtccagaacggcattatatgcagcctcatgaggggaggcatcgcagaaagaggcggcgtccgcgtagggcataggatcattgaaataaatggtcagagcgttgtggctacagcccacgagaaaattgtgcaagctctttccaactctgttggggagattcacatgaaaactatgccagccgctatgttcagattgttgacaggtcaggaaaccccgctatacatttag

SEQ ID NO: 178879 - DNA, 84 bp, synthetic construct
  misc_feature 1..84: note = Description of Artificial Sequence: Synthetic coding sequence
  source 1..84: mol_type = other DNA
atggcccaccggaagctggagagcgtgggcagcggcatgctggaccacagggtgagacccggtcccgtcccccactctcagtag

SEQ ID NO: 178880 - DNA, 2250 bp, synthetic construct
  misc_feature 1..2250: note = Description of Artificial Sequence: Synthetic coding sequence
  source 1..2250: mol_type = other DNA
atggcccaccggaagctggagagcgtgggcagcggcatgctggaccaccgcgtccggcccggacccgtcccacattctcaggagccagaatccgaagatatggaacttcctctggagggatacgttcccgaaggcttggagcttgctgcgctccggccagaatcccccgccccagaagagcaggagtgccacaaccactcacctgacggagactctagttcggattatgtgaataatactagtgaggaagaggattacgacgagggactgcctgaagaggaagaaggcatcacctattacatacggtactgtcccgaagatgatagttacctcgaagggatggattgtaacggcgaggagtatcttgctcactccgcccatccagtggatacagatgaatgccaggaagccgtggaggagtggacagattctgctggacctcacccccacggtcacgaagctgaaggcagccaggactacccggatggccagctgccaataccggaggacgaacccagcgtattagaggcccacgaccaagaggaagatggccactattgtgctagcaaagaagggtatcaagactattatcctgaagaggctaacggcaataccggggcatccccctatcgcctgcgccgaggcgacggagacctggaggaccaggaggaagacattgaccagatcgttgcagagattaaaatgtctctgagtatgacaagtattacctcagcgagcgaagcctctccagagcatggcccagaacccggccctgaggacagcgtggaggcctgtccacctattaaagccagctgttccccttctagacacgaggctaggcctaaatccttaaatctgttgcctgaggcaaagcatcccggcgaccctcaacgggggttcaagcccaaaacccgcacacctgaggagcgattaaagtggccgcatgagcaggtttgcaacggactcgagcagccaagaaaacaacaacggtctgatttgaacgggcccgtggataacaataacatacctgaaactaaaaaagttgcctcctttccaagcttcgtggccgtaccagggccctgcgagccagaagacttgattgatggaatcatttttgcagcaaactacctgggctccactcagttgctgtcagaaagaaaccctagtaagaacatccgaatgatgcaggcacaagaagcagtctccagggtaaaaaggatgcagaaagccgcaaaaatcaagaagaaagccaatagcgagggtgatgcacagactttaaccgaggtggatctgtttatcagcactcagcgtataaaagtgcttaatgcggacacacaggaaacaatgatggaccatgcactaaggacgattagctatattgccgatatcggcaatatcgtggttttaatggcgaggcgccgcatgcctcggagcgcctcccaggattgcatcgaaactaccccgggagcgcaggagggcaaaaagcagtacaaaatgatttgtcatgtctttgaaagcgaagatgctcaattaattgcgcagtctataggccaggccttctccgttgcatatcaggaatttctgcgtgctaatgggattaatcccgaggatttgtcccagaaggagtactcagacattattaatacacaggagatgtacaatgacgatctcatccacttctctaattctgagaactgtaaggagttgcagttggagaaacataagggcgagattctaggggtggtggtcgttgagtctgggtgggggtctatcttgcccaccgtcatactagctaacatgatgaacggaggcccggcagccagatccggcaaactgagtatcggggaccagatcatgtccatcaacgggacttccctggtgggcctcccgctggctacgtgtcaaggcatcatcaaaggattaaagaatcaaacccaggtaaaactgaacattgtgagctgccccccagtgaccaccgtcctcattaaacggccagacctgaagtaccaattggggttcagcgtgcagaatggcatcatctgctcgctgatgcgcggaggaattgctgaaagaggtggcgtaagggtgggacacagaattatcgaaattaatgggcagtcagtcgtagcaacagctcacgaaaagatcgtgcaagctctgtccaacagcgtaggggaaattcatatgaagaccatgccagccgccatgttccggctgttgacagggcaggaaactcctctttatatctag

SEQ ID NO: 178881 - DNA, 2214 bp, synthetic construct
  misc_feature 1..2214: note = Description of Artificial Sequence: Synthetic coding sequence
  source 1..2214: mol_type = other DNA
atggcccaccggaagctggagagcgtgggcagcggcatgctggaccacagagtgcgtcctggacccgtcccgcacagccaggagccagagtctgaggatatggaattaccactggaaggatacgtgcctgaaggcctcgagctggctgctttgcgtcccgagtcccctgctcctgaagagcaggagtgccacaatcactcacccgatggagacagcagctccgattacgtgaacaacacaagtgaagaagaagactatgatgaaggtcttcctgaggaggaggagggcatcacttattacataaggtattgtccagaggacgattcttatctggagggcatggattgtaatggcgaggagtacctggcacacagtgcccaccctgtggatacagacgaatgtcaggaggccgttgaggagtggactgattccgctggaccccatccacatggccatgaagctgagggcagccaggactatcctgatggccagctgccgattcccgaagatgaaccttcggtccttgaagcacatgatcaggaggaggatggccattattgcgcatcgaaagagggctatcaagattactatcccgaagaagccaatggcaacacaggcgcctccccttatcgcctgagaaggggcgatggcgatttagaggatcaggaggaggatatagaccagatcgttgctgagataaagatgtctctctctatgacatccattactagcgctagcgaggcaagtcccgagcatggtcccgagcctgggccggaggatagcgtggaagcatgcccccccattaaggcctcttgtagccctagcaggcatgaggcccggcccaagtcccttaacctcctacccgaggctaagcatcctggggaccctcagagaggattcaagcctaagacaagaactccagaggagaggcttaaatggccccacgagcaggtatgcaacgggcttgaacagcccaggaaacagcagcgcagtgacctaaacgggccagtggataataacaatattcccgagacaaagaaggtcgcatcctttcctagtttcgtcgccgtgccaggcccctgtgaaccagaggacctgatcgatggcatcattttcgcagctaattatttggggtcaacacagctgctgtccgagcgcaacccaagtaagaatattaggatgatgcaggcacaggaggccgtatctagagtgaagaattcggagggtgatgcgcagacccttactgaagtggacttatttatctctacccagcggattaaagttctaaatgctgacactcaggaaactatgatggaccacgccctgcgcaccatctcttatatcgctgacatcgggaacatagtcgttctgatggcgcggaggaggatgcctagatcagcaagtcaagactgcattgaaactacaccaggcgcccaggagggcaaaaaacaatacaaaatgatatgtcacgtgttcgagtccgaggatgcccagttgatcgctcagtcaattggccaggcttttagcgtggcctaccaggagtttcttagagcaaacggtatcaatccggaggatcttagccagaaggaatatagcgatataatcaacacacaagaaatgtacaacgatgatctgatccacttcagtaattctgaaaattgtaaagagctccagctggaaaaacataaaggtgagattctgggggttgttgtggtcgaatcaggatggggatctatcctgcccacggttattctggcaaatatgatgaacggcgggcctgcagccaggagtggtaaattgtcgatcggagaccagatcatgagtataaatggcacatcactggtggggctgccactcgcaacctgccagggcatcataaaagggttgaagaatcagacgcaggtcaagctgaacatcgtgagctgtccaccagttaccaccgtcctcattaaacggcctgaccttaagtaccagctgggattctctgtccagaatggcatcatctgttctctgatgagaggaggcattgctgagcgtggaggggttcgagttggccaccgaatcatcgagattaacggccaatcagtggttgccaccgcccatgaaaagattgtgcaagctctcagcaactcagtgggcgagatacacatgaagaccatgccagccgccatgttcagattgctgaccggacaggagacaccactctacatttag

SEQ ID NO: 178882 - DNA, 795 bp, synthetic construct
  misc_feature 1..795: note = Description of Artificial Sequence: Synthetic coding sequence
  source 1..795: mol_type = other DNA
atggcccaccggaagctggagagcgtgggcagcggcatgctggaccatagagtgcgcccagggccagttcctcactcgcaagaacctgagagtgaggacatggaactgcccctggaggggtatgtgccggagggcctcgaacttgccgccctgagaccagagtctcctgcaccggaggagcaagaatgtcataaccacagccccgatggcgactcctcttcggattatgttaataatacttctgaagaggaagattacgatgagggcctcccagaagaagaagagggtattacctattatattcgatattgtccggaagacgacagttatctggagggtatggactgcaatggggaggagtacctggctcacagcgcacatcctgtggatacagatgaatgccaagaggccgtcgaggaatggaccgactccgcaggcccgcacccccatggccatgaagcagaggggagtcaggactacccagatggccaacttcccattcctgaggatgaaccaagcgtactggaggcacacgaccaggaggaggacggacactattgtgccagtaaagagggctatcaggactactatccggaggaagctaacggaaatacaggagcatcaccctacagattaagacgaggcgatggagatctcgaagaccaggaggaagacatcgatcaaattgtggcagaaattaaaatgtcactgagtatgacaagcattactagcgctagtgaggctagtcctgaacacggccccgaacctggccccgaagattctgtcgaggcttag

SEQ ID NO: 178883 - DNA, 2250 bp, synthetic construct
  misc_feature 1..2250: note = Description of Artificial Sequence: Synthetic coding sequence
  source 1..2250: mol_type = other DNA
atggcccaccggaagctggagagcgtgggcagcggcatgctggaccatagggtgagacctggccccgtgccccactcgcaggagcctgagagcgaggacatggagctccccctcgagggctacgtaccagagggcctggagttagccgctctgcgaccagaaagccccgcccctgaggagcaggagtgtcataatcatagcccagacggcgacagctcctcagattacgtcaacaatacaagtgaggaagaggactatgacgaaggtctcccagaagaggaagaagggataacatattacatccggtattgccctgaagacgattcttatttagaagggatggattgcaacggtgaggagtacctcgcccacagtgctcatcccgtcgatacagatgaatgccaagaggcagtggaagagtggaccgacagcgccggaccccatccacacggccatgaggcggagggttctcaggactacccagatggccaactacccatccctgaagacgagccttctgtgttggaagcacacgaccaggaggaggatggccactactgcgcctcgaaagagggctaccaagactactaccccgaagaggccaatggcaataccggggcttctccttacagactcaggcgcggcgacggggatctggaggaccaagaggaggacattgatcaaattgtggcagagatcaagatgtctctctctatgaccagcattacttccgccagtgaagctagccccgagcatggccccgaaccaggacctgaagattccgtggaagcatgtcctcctataaaggcaagctgctccccatcccggcacgaggcccgcccaaagtcgctgaacctgctgcctgaggcaaagcacccgggtgacccacaacggggcttcaagcccaagacacggacacccgaggagaggcttaaatggcctcacgagcaggtgtgtaacgggctggagcagccacggaaacagcaacgctcagatttaaacggccccgttgataataacaacatccctgagaccaaaaaggtggcgtcttttccatcttttgtagccgtgccaggcccgtgcgaacccgaagacctgattgatggcatcattttcgctgccaactatctagggtccactcaacttctctccgagagaaatccctccaaaaacatcagaatgatgcaagcccaggaagcggtgtctcgggtaaaacgtatgcagaaggctgccaaaatcaagaagaaagctaatagcgaaggagacgctcaaacactaactgaagtagatctatttatctcgacgcagaggattaaggttctgaacgcagatacccaggaaactatgatggatcatgccctccggacaatcagctatatcgccgatattggcaacatagttgtgctaatggctcgccgaagaatgcctagaagcgcaagccaggattgcatcgaaaccactcccggtgcccaggagggtaaaaaacagtataaaatgatatgtcacgtcttcgaatcagaggacgcccaactcatcgcgcaatcaatcggccaggctttctcagtagcctatcaggaattcctgcgggcaaacggaattaatcccgaggacctgagccagaaagaatactccgacatcatcaacactcaagagatgtacaatgacgatttgattcatttcagtaattcagaaaactgtaaagagctccagttggaaaaacacaagggagagattctgggcgtggtggtcgttgagagtggttggggttccatcttgcctactgttatcttggccaatatgatgaatgggggtccagcagcacgctctggcaaactgtctatcggcgatcagatcatgtcgattaatgggacctccctggtcgggctgcccctcgcaacatgtcagggaattatcaaagggctgaaaaatcagactcaggtaaagctgaatatcgtctcctgtccacccgtgacgacggtgttgattaaacgcccagaccttaagtaccaattgggcttttcagtccagaacgggattatctgtagtctgatgcggggaggtatcgccgaacgcggtggagtgagggtgggccaccgcatcatagaaattaacggccaaagcgtcgtagcgactgcacacgaaaagatcgtgcaagcactctccaattcagtgggcgagatccacatgaagacaatgcccgccgccatgttccgtctgctcacgggacaggagacacctctgtacatatag

SEQ ID NO: 178884 - DNA, 213 bp, synthetic construct
  misc_feature 1..213: note = Description of Artificial Sequence: Synthetic coding sequence
  source 1..213: mol_type = other DNA
atggcccaccggaagctggagagcgtgggcagcggcatgctggaccacagggtccgccctgggcctgtgccccactctcaggagcccgagagcgaagatatggagctcccattggaaggatacgtgccagagggccttgagttagccgctttaagacccgaatctcccgcccctgaagaacaagagtgtcacaaccacagtccagatggctag

SEQ ID NO: 178885 - DNA, 15 bp, synthetic construct
  misc_feature 1..15: note = Description of Artificial Sequence: Synthetic coding sequence
  source 1..15: mol_type = other DNA
atggcccaccggtag

SEQ ID NO: 178886 - DNA, 339 bp, synthetic construct
  misc_feature 1..339: note = Description of Artificial Sequence: Synthetic coding sequence
  source 1..339: mol_type = other DNA
atggcccaccggaagctggagagcgtgggcagcggcatgctggaccaccgtgttcgccccggacctgtgccacattctcaggaacctgagagcgaggatatggaattgccgttggagggctatgtgccagaaggactggagctggccgcccttaggcctgaaagtcctgctcctgaggaacaggagtgtcacaatcactcaccagatggagattccagcagcgactacgtcaacaatactagcgaggaagaagattatgatgaaggactgcccgaagaggaggaggggatcacatattatattaggtattgcccggaagacgactcctatttggagtag

SEQ ID NO: 178887 - DNA, 2250 bp, synthetic construct
  misc_feature 1..2250: note = Description of Artificial Sequence: Synthetic coding sequence
  source 1..2250: mol_type = other DNA
atggcccaccggaagctggagagcgtgggcagcggcatgctggaccaccgggtccggcctggcccagttccgcacagccaggaaccggaatcagaagatatggagctgccccttgaaggttatgttccagaaggtctcgaactcgccgcactgagacctgaatcgcccgcaccagaagaacaagagtgtcataatcattctcccgacggcgattctagcagcgactacgttaataatacttccgaggaagaagattacgacgagggcctacccgaagaagaggagggcataacatactacattcgctattgccccgaggatgactcttatctcgaggggatggactgcaacggtgaggaatacctcgctcactcggcacaccccgtcgacactgacgagtgtcaggaggctgtggaggagtggactgactccgcgggtcctcatcctcatggtcacgaggccgagggatcccaggactaccccgatggacagctccctattcctgaggacgagcccagtgtcctggaagcccacgaccaggaggaggatggtcattactgtgcgagtaaagagggctatcaggattattatcctgaagaagcaaatggaaacaccggcgccagcccctaccgccttcgcaggggtgacggagacctggaggatcaggaagaagatatcgaccagatagtcgctgagattaaaatgagcttgtccatgactagtattacaagcgcatctgaggcctctcctgaacatggccccgagccaggccccgaggacagcgtggaggcctgcccaccgattaaggctagctgttctccctctcgccacgaagctagacctaaatccctcaacctgctgcccgaggccaagcacccaggggatccacagagaggattcaaacccaagactagaacccccgaggaaagactgaagtggccccacgaacaggtgtgcaacggtctggagcaaccccgcaagcagcagcgttccgatctgaatggtcctgttgataataataacattcccgagaccaagaaagtggctagctttccgtcatttgtagcagtgcctgggccttgtgagcctgaagacctgatcgacggcattattttcgccgcgaactacctgggttccacccagctgctcagcgagaggaaccctagcaagaatatcagaatgatgcaggctcaggaagcagtttctagagtgaagcgcatgcagaaggcagctaaaatcaaaaaaaaagctaattctgagggggatgcgcaaacactgaccgaagtggacttgttcatctccacccagcgaataaaagtgttgaacgccgatacacaggagacgatgatggatcatgcactgcgaacgatatcttacatagcggatattgggaacatcgtcgtcctgatggcccgacgtaggatgcctcgttcagcgagccaggattgcattgaaacgacccccggtgctcaggagggaaagaagcagtataaaatgatctgccacgtgttcgagtcggaagacgctcagctaatcgcccaatcaataggacaagccttttcagttgcctatcaagagttcctacgggccaatgggataaacccagaggacctgtcacagaaggagtacagtgacattatcaacacccaggagatgtataacgatgatttaatacacttttctaactctgagaactgcaaagaactgcagctggagaagcataagggagagattctgggtgtcgtggtcgtggagtctggatgggggagcatcctgcccactgtcatcctcgctaacatgatgaacggtggacctgcagccaggtccggcaagctgtccattggagaccagataatgagtatcaatggaaccagcctggtgggcttacccctggccacatgccagggtatcatcaaaggcctgaagaaccagactcaagtgaagctcaatatcgtaagttgcccacctgtcacaacggtgctgataaagcgtcccgatcttaaataccagcttggattttcagttcagaacgggatcatctgttctttgatgcggggtgggatcgccgagaggggcggcgtccgggtcggccatcgaattatagaaatcaatggccagtcagtagtagcgactgcccacgaaaagattgtgcaggctctaagcaattccgtgggtgagatccatatgaaaactatgccagcggcaatgttccgcctactgaccggacaagagaccccactctatatctag

SEQ ID NO: 178888 - DNA, 2127 bp, synthetic construct
  misc_feature 1..2127: note = Description of Artificial Sequence: Synthetic coding sequence
  source 1..2127: mol_type = other DNA
atgagcgtgcccagcagcctgagccagagcgccatcaacgccaactcacacggagggcccgccctgtctctgcctctccctctgcacgcagcacacaaccagctgttaaacgccaaactccaagccactgcagttggcccaaaggatttgcggtctgccatgggagagggaggagggcccgagcccgggccagctaatgccaagtggctgaaggaaggccagaatcagttacgccgcgcggccactgcccatagagatcaaaatcgcaatgtgacgctcacgctggccgaggaggctagccaggaacccgagatggcacccttgggacctaagggcctgattcatctgtatagcgagttggagttgagtgcccacaacgccgccaatagggggctaagggggccaggactcatcatatctactcaggagcaaggtcctgatgagggcgaagaaaaggccgcaggggaagcagaagaagaggaagaagatgatgatgacgaagaggaagaggaggacctgtcttccccgcccggtctccccgagcctttggagtccgttgaggcaccacccaggccgcaagccctgacggacggacccagagagcattccaagtcagcgtcactccttttcggaatgcgcaacagcgccgccagtgacgaggattccagttgggctactctgagccaagggtctcctagttacgggtctccagaggacaccgacagcttctggaatcccaacgcatttgaaactgattctgacctcccagccggctggatgcgtgtccaagacactagcggcacttactactggcatatccctacgggtacaacccagtgggaaccccctggtagagcctcaccgtcacaagggtcaagcccccaggaggaaagccagctgacttggaccggtttcgctcacggagagggatttgaagacggggagttttggaaggacgagccgtctgacgaggcacccatggagctaggtcttaaggagcctgaggaggggacgctaactttcccggctcaaagcctatcccccgagccactgcctcaggaggaggaaaaactgccacctcgaaacaccaaccccggaatcaaatgtttcgctgtaagatctctaggctgggtcgagatgacagaggaagaactcgctcctggccgcagctctgtagccgtgaacaactgtatcagacaactctcataccataaaaacaacttacacgacccaatgagcggaggctggggagagggaaaagatctcctgttgcaactcgaagatgagactttgaaactggtagagccacagtcgcaagccctgctgcacgcgcaaccaattatatcaatccgagtgtggggcgtgggccgcgacagtggacgcgattttgcctacgtcgccagagataagttaacacaaatgctgaaatgccatgtattcaggtgcgaagcacccgctaagaacatcgccacatcattgcacgaaatctgcagtaaaatcatggcagaaagaagaaatgctcgatgcctggttaacggactgagcttggaccatagtaagcttgtagacgtgcctttccaagtcgaattccccgcacccaagaacgagctggtgcagaagttccaggtctactatctcggtaacgtgccagtcgctaaacctgtaggggtggatgtcattaacggagccttggaatctgtcctttcaagctcatcccgcgaacagtggacgccaagccacgtgtccgtggcacctgcaacgttgaccattctgcaccaacagacagaagccgtgctgggagagtgtcgcgtgcggttcctcagctttctcgccgtgggcagggacgtgcacactttcgcattcattatggctgccggacccgccagtttctgctgccatatgttttggtgtgaaccgaacgccgcctcattgtctgaagcggtgcaggccgcttgcatgcttcgctatcaaaagtgcttggacgcacgatcccaggcatccacaagttgcctaccggcacctccagctgaaagcgtcgcgcggagggtgggctggaccgtgagacggggcgtccaatccctgtgggggagcctcaagcccaagcggcttggcgctcacaccccatag

SEQ ID NO: 178889 - DNA, 2127 bp, synthetic construct
  misc_feature 1..2127: note = Description of Artificial Sequence: Synthetic coding sequence
  source 1..2127: mol_type = other DNA
atgagcgtgcccagcagcctgagccagagcgccatcaacgccaactctcacgggggcccagctctcagcctgccgctgcctctgcacgctgcacacaatcagcttctgaacgcaaagttacaagcaaccgctgtgggtcccaaggacctgagatctgcaatgggagaaggtggaggtcctgagcccggcccagcaaacgctaagtggctcaaggaggggcaaaaccagctgcgcagggccgcaactgcccatcgcgaccagaaccggaatgtgacccttactctggcggaagaagcatcccaagaacctgagatggcccccctgggacccaaagggctcatccacttgtactctgagcttgaactgagcgcccataacgcagctaatcgtggtctgcgggggcccggccttataatctccacccaggagcagggacctgatgagggtgaggaaaaagctgcgggagaagcagaggaggaggaggaggacgacgacgatgaagaggaggaggaagatctctcctctcctccaggactgcccgagcctctagagagtgtggaagcgcctccacgcccgcaggctttaacagatggaccacgcgagcattcaaaaagtgcctcactgctcttcggtatgagaaactcggcagcgtctgacgaagactcctcctgggctacactttctcaagggtccccctcctatggatcacccgaggacacggatagcttctggaacccaaatgccttcgaaaccgactccgatctccccgctggatggatgcgcgttcaggataccagcggaacctactactggcatattcccacgggaaccacccagtgggaacccccaggccgggccagcccctcacagggctctagtcctcaagaggagtcacaactgacctggaccgggttcgcgcacggggaaggttttgaggatggagaattttggaaggatgagccttccgatgaagccccaatggagttgggtctcaaagaaccagaggagggcaccctaaccttccccgctcaatcactttcacctgagccactcccccaagaagaggagaaattaccgccgaggaataccaacccaggaattaagtgttttgctgtgcgaagtctagggtgggtggagatgaccgaggaggagcttgctccaggcagaagttcagtggcagtgaacaattgcattaggcagttgtcctatcataaaaacaaccttcatgatccaatgtcaggcggctggggggaaggtaaagacctcctgctgcagctggaagatgaaactctcaagttggtggaaccccaaagccaggcgctactccatgcacaacctatcattagtattcgagtatggggcgttggccgagacagtggaagggactttgcttacgtagccagagacaaactgacccagatgttgaagtgccacgtttttagatgcgaagctccagccaaaaacattgctacatcactccatgagatttgctccaagattatggccgaaagacggaatgctcgctgtctggtgaatggcctgtctttggaccacagcaaactggtggatgttccctttcaagtcgaattccctgccccaaaaaacgagcttgtccaaaaattccaagtgtattacttgggaaatgtacctgtcgccaagcctgtgggggtggacgttatcaatggagccctcgagagtgtcctctcttcctcgagcagggaacagtggacgccgtcccacgtatcagtcgccccggctacactgaccatccttcaccagcagaccgaagcagtgctgggggagtgtagagttaggtttctcagcttcctcgccgtgggaagagacgtgcataccttcgcctttatcatggccgccggtcctgctagtttctgttgtcatatgttttggtgcgagcctaacgctgcctccttgtccgaggctgttcaggccgcgtgtatgctgcgctatcagaaatgcctcgacgcgcgctcacaggcgagcacaagctgtctgccagcgcccccagccgaatcagtggctaggagagtaggatggacagtgaggcggggcgttcagtccctgtggggaagcttaaagcccaagaggcttggcgcccatactccctag

SEQ ID NO: 178890 - DNA, 2133 bp, synthetic construct
  misc_feature 1..2133: note = Description of Artificial Sequence: Synthetic coding sequence
  source 1..2133: mol_type = other DNA
atgagcgtgcccagcagcctgagccagagcgccatcaacgccaactctcatgggggcccagccctgtcactaccactgccactgcatgcagctcacaatcagttacttaatgccaagcttcaagccaccgctgtgggtccgaaagacttgcgctctgccatgggtgaaggtggcggacctgagccaggccccgccaacgctaagtggctgaaagaagggcagaaccagctgcgccgggccgcaaccgcccatagagaccagaatcgtaacgttacactgactctggctgaggaggccagtcaggagccggaaatggcccctctgggtccaaaaggactgatccacctctacagcgagctggagctcagcgctcataatgcagctaaccggggcctgagagggcccggcctgataataagcacgcaggagcagggcccagatgagggtgaggagaaggccgcgggggaggcagaggaggaagaggaggatgacgatgatgaagaggaagaggaagacctttcaagtcccccggggttgcccgagcccctggaatcagttgaggcccccccccgtccccaggctcttactgatggaccacgggagcactctaagtccgcaagcctgttgttcggaatgcggaacagcgctgcctcagatgaggatagtagctgggccaccctgtcacaggggtccccctcctacggaagccctgaggatactgactcattctggaatcctaacgcctttgagacagactccgacctgccagccggctggatgcgtgtccaagatacttctgggacatactattggcacatcccaaccggcacaactcaatgggagcctcccggaagagcttccccatcccagggttcttcgccacaagaggagtcccagctgacgtggaccggctttgctcatggagaaggatttgaggacggggagttctggaaggatgagccttccgatgaggccccaatggaattaggactgaaggaacctgaagagggcaccctgactttccccgcacagtcattgtctccagaaccgctccctcaggaggaagaaaagcttccgccacgtaataccaatcccggtatcaaatgtttcgcagtgaggagcctgggctgggtggagatgaccgaggaggagctagcgcccggtcgtagctcagtagccgtgaacaattgtataaggcagctgagctatcacaaaaacaatttacacgatcccatgagcggcggatggggggaaggcaaggatctgctgctgcaactggaagatgagaccctgaaactcgtcgagcctcaaagccaggcccttttacatgctcaacctattatcagtatccgggtgtggggggttggcagagattcagggtctaacagagacttcgcttacgtggcaagagataagctgacgcaaatgctgaagtgccacgtgtttaggtgcgaagccccagctaagaacattgccacttccttgcacgaaatctgctcaaagataatggccgaacgtagaaatgcaaggtgtctggtaaacgggttgagccttgatcactctaaactggtcgacgtgccttttcaggtggagtttcccgccccgaagaatgagctggttcagaagttccaggtatattatctgggcaatgtgccggtagcaaagccagtgggagtagatgtgatcaacggcgccctagagtccgtgctatcttcctcctctcgcgagcaatggacaccgtctcatgtcagcgtcgctccagccacactcaccatcttacatcaacagaccgaagccgtgcttggagaatgccgggttcgcttcctgtccttcttagccgtgggccgggacgtccatacgttcgcctttatcatggccgctggaccagcctccttctgctgtcacatgttctggtgcgagcccaacgctgccagtctgagcgaagcagtccaagccgcatgcatgcttcgctaccagaagtgcctggacgcaaggtcacaagccagtaccagttgcctccctgcgccaccagctgagtccgttgcacgacgcgttggatggacagtgagaaggggcgtacagagcctttggggaagcctgaaacctaaacgactgggagcccatacgccatag

SEQ ID NO: 178891 - DNA, 1356 bp, synthetic construct
  misc_feature 1..1356: note = Description of Artificial Sequence: Synthetic coding sequence
  source 1..1356: mol_type = other DNA
atgcgggtgcaggacaccagcggcacctactactggcacatccccaccggtaccacccagtgggagccccctggccgggcatctccctcccagggttcctctccccaggaggagtcccaactcacgtggacagggttcgcacatggcgaggggtttgaggatggggagttttggaaggacgagccatctgacgaggcacctatggaactgggcctcaaggaacccgaggaggggacgttgacctttcccgcacaatcgctgagccctgaacctcttccacaggaggaggaaaagctgcccccaaggaatacaaacccaggaattaagtgtttcgccgtccgaagcctgggatgggtagagatgactgaggaagaactcgctccaggccgatccagcgttgccgtgaacaattgcattcgccagcttagctaccacaagaacaacctccacgatccaatgagtggtggatggggcgaagggaaagatcttcttcttcagctggaggacgagactctgaagctcgtggagccccagtcccaggctctgctccatgcccagccgattatcagcattcgagtctggggcgtgggaagagactctggttccaaccgagacttcgcctacgtggcgagggataagctcactcagatgctgaaatgccatgtcttcaggtgtgaggccccagctaagaacattgctacctctttgcacgagatttgctcaaagattatggcagaaagacggaacgcacgctgcctcgtcaatggattatccctcgatcatagtaaattggtcgacgtgccatttcaggtggaattccctgcccccaaaaacgagctggtacagaaatttcaagtctattatcttggaaatgtgcctgtagcaaaaccagtgggtgtagatgttattaacggtgctctggaaagcgttctctcttcgagcagtcgggagcaatggaccccctctcatgtcagcgtagctcccgccactctgacaatactgcaccaacagacagaagcggttctcggcgaatgtagggttcggttcctttcatttctcgccgtcggaagagatgtgcatacctttgcatttattatggctgccgggccagcctccttctgttgtcacatgttttggtgtgagcctaacgccgcctctctctctgaggccgtgcaggcggcgtgcatgctcagatatcagaagtgtttggatgctcgctcccaggcatccaccagctgtctgcccgctcccccagcagagtcagtcgcccgtagagtgggatggactgttcgtcgcggggtccagagcctttgggggagcctaaaacctaaacggctgggagcccataccccctag

SEQ ID NO: 178892 - DNA, 1680 bp, synthetic construct
  misc_feature 1..1680: note = Description of Artificial Sequence: Synthetic coding sequence
  source 1..1680: mol_type = other DNA
atgagcgtgcccagcagcctgagccagagcgccatcaacgccaactctcacggcgggccagcactttctctcccattacccctgcatgcagcccataaccaactcctgaacgcaaagctgcaagcgactgctgtggggccgaaggacctccacagcaagtcagcttcgctgcttttcgggatgcgcaattctgcggctagcgatgaggactcaagctgggcgacactgtcccagggcagccccagctacgggagtccagaggacaccgactcattctggaatcctaacgcatttgaaaccgactcggatttgcctgctggatggatgcgtgtacaagacacaagtgggacatactattggcatattccaactggcacgacgcaatgggagcctcccggcagggcgtccccctctcaaggatcaagtcctcaggaagagagccagctcacatggactggctttgcccacggcgagggatttgaagacggtgaattttggaaggatgaacctagtgatgaagcccccatggagctggggcttaaggaaccagaagaaggcactctcacctttccggcccaatcactgtcgcctgagccgttgccacaggaagaagagaagctgcccccgagaaacacaaacccggggatcaagtgcttcgctgttcggagcctgggttgggtggaaatgactgaagaggaactggcacccggccggtccagtgttgccgtcaacaattgtataagacagctgtcctatcataagaataatctccacgaccctatgagcggcgggtggggcgagggtaaagaccttctgctccaacttgaggacgaaaccttgaaactggtcgagcctcagagtcaggctctgctccatgcacagcccataatctctattagagtttggggtgttgggcgagattcaggctcaaatcgagacttcgcctacgtggcccgcgataagctgacccagatgctgaaatgtcatgtttttcgctgcgaggcacccgcaaagaacatcgctacaagtctgcatgagatctgctcgaaaataatggccgagcgccgaaacgctcgatgtctcgtgaatgggctgagtctggatcactctaaactggtagacgtccctttccaggtggagtttcccgcgcccaagaacgaactggttcagaaatttcaggtttactacctggggaacgtgccagtggcaaagccggttggcgtcgatgtaattaacggcgctctggagtccgtgctatcctccagtagcagggagcagtggaccccttcccatgtcagcgtggcacccgccaccctgactattctccatcagcagactgaagccgtgctcggtgagtgccgggtacggttccttagctttctagctgtcggcagggatgtgcacacatttgcattcattatggcagccgggcccgcatctttctgctgccacatgttctggtgtgagccaaatgcagcctccctaagcgaagccgtgcaggcagcatgcatgctgagataccaaaaatgcctggacgcacgatcccaggcatccactagttgcttacctgcccccccagcagaatctgtggcgagacgggtgggatggaccgtgaggcgcggtgtacagtccctgtggggaagcctgaagccaaagagactgggcgcccacacaccttag

SEQ ID NO: 178893 - DNA, 1428 bp, synthetic construct
  misc_feature 1..1428: note = Description of Artificial Sequence: Synthetic coding sequence
  source 1..1428: mol_type = other DNA
atgacccagatgcgggacagcttctggaaccccaacgccttcgagactgatagcgacttgcctgcgggctggatgcgtgttcaagatacaagcggaacttactattggcacatcccgaccggcaccacacagtgggagcccccaggtcgagccagtccatctcaaggaagctcccctcaggaagagtctcagctgacctggacaggatttgcacacggtgagggctttgaggacggcgaattctggaaggacgagcccagcgatgaggccccaatggaactgggcctgaaagagccagaagaaggcaccctgacattcccggcccagtccttatctcctgaaccactgcctcaagaggaggaaaagctcccccctcggaatacaaatccaggtattaagtgctttgccgtgagatctctggggtgggtggagatgacggaggaagaactggccccagggagaagttctgtggcggttaataattgtatacggcagctctcctatcacaagaacaatctccacgaccctatgtcgggagggtggggcgagggaaaagacttgctgctccagcttgaagatgagaccctaaagcttgtcgaaccacagtcacaagccctgctgcacgcacagcccataatctccataagggtgtggggggtcggacgagactcaggaagcaatcgggattttgcttacgttgctagagacaagttaacgcagatgctgaagtgccacgtattcagatgcgaagcgccagcaaaaaacattgcgacatcccttcacgagatctgctcaaagatcatggcagaaaggcgaaatgcacggtgtctagtgaatggattgtccttggaccattcaaaactcgtcgacgtgcccttccaggtcgagtttccggcaccaaaaaacgaactggttcagaagttccaggtgtactatctagggaatgttcctgtagcaaagccagtgggagtggacgttatcaatggtgccctggaatcagtgcttagcagtagtagcagggagcagtggacgccttctcacgtgtccgtagcacccgccactctcacaatcctgcaccagcagacagaagctgtccttggggaatgcagagtgcggttcttgtcgtttctggccgtgggccgcgatgtgcacacttttgcctttatcatggctgctggcccagcctctttctgttgccacatgttttggtgcgaacccaatgctgctagcttatcagaggcagtgcaggcggcttgtatgctaaggtaccaaaaatgtctggatgctaggagccaggctagcacaagctgcctccctgccccccctgccgaaagcgtggcaaggagggttggctggactgtacgtaggggggtgcaatccctgtggggttctctgaagcccaaaaggctcggcgcccacaccccgtag

SEQ ID NO: 178894 - DNA, 2277 bp, synthetic construct
  misc_feature 1..2277: note = Description of Artificial Sequence: Synthetic coding sequence
  source 1..2277: mol_type = other DNA
atgagcgaggtgctgcccgccgacagcggcgtggacaccctggccgtgttcatggccagcagcgggactacagatgtgaccaacaggaactcccccgccactcccccaaataccctgaacctccgcagcagccataacgagctgctaaacgccgagatcaagcacacggaaacaaagaactcaactccccctaagtgccgtaagaaatatgcattaaccaatattcaggctgctatgggactgtctgatccagcagctcagcccctgcttgggaatgggtccgccaatatcaagctggtgaaaaacggagaaaaccagcttcggaaggctgcagagcagggccagcaagacccaaataagaaccttagtccaactgccgttatcaatattacttcggagaaactggaaggcaaggaaccgcatccacaagactcttccagttgcgagatacttcccagccaaccccggcggacgaagtcctttttgaattattacgccgatctggagacttctgcccgcgagctggagcagaatcgcggtaaccaccatgggacagctgaagaaaaaagtcaaccagttcaaggtcaagccagcaccattatcggaaacggagacctgctgcttcagaagccgaataggccccagtcatcacccgaagatggacaggtcgcgacagtatcaagtagcccagagacaaagaaagaccacccaaaaaccggagcaaaaacagactgtgcactgcacagaatccagaacttagcaccttctgatgaagagtcttcttggaccacacttagccaggacagcgcatctccttctagcccggacgaaacagacatctggagtgaccactctttccagaccgatcctgaccttccccccggttggaaaagagtttcagatatcgctggcacatactattggcacatccccaccggtaccactcagtgggagcgacctgtcagtattcccgctgacttacaggggtcccgaaagggctccctgagctctgtaacacctagtcccacccccgaaaatgaaaagcagccctggtctgacttcgccgtcctgaacggtggcaaaatcaattccgatatttggaaggacctccatgccgccacagtcaacccggacccatctctgaaggagtttgaaggcgcaaccttacgctacgcaagcctgaagctccgcaacgccccccaccccgacgacgacgattcatgttctatcaacagtgaccccgaagcgaagtgtttcgccgtacggagtctcgggtgggtggaaatggctgaagaagatttggctcccggaaagtccagtgtggccgtcaacaactgtatcagacagttgagctactgtaagaatgacattagggacacagtcggtatctggggcgaaggaaaggatatgtatcttatcctggaaaacgacatgctgtctcttgttgaccctatggaccggtcagtcctgcacagtcagcccatcgttagtatacgcgtctggggggtgggccgcgataatggacgtgatttcgcttatgtggcacgggacaaagatactaggattctgaagtgtcatgtctttcggtgtgacacgcctgccaaagccattgcaacctcattacatgagatttgttctaagattatggctgaacgcaaaaacgccaaggccttagcgtgttcgtcactgcaagagcgcgccaacgtgaatctagacgtcccactacaggtggatttcccgacaccaaaaacagagttagttcagaaatttcacgtgcagtatctgggaatgctgccagtagacaaaccagtggggatggatattcttaactcggctatcgagaaccttatgacgtctagcaacaaagaggattggcttagtgtgaacatgaacgttgctgacgctacagtaactgtcatctcagaaaagaatgaagaggaggtgctggtcgagtgtcgtgtgaggttccttagttttatgggggttggtaaagatgttcacaccttcgcctttattatggacacaggaaatcagagattcgagtgccatgtgttttggtgtgaacctaacgccgggaacgtctccgaagccgtgcaggctgcctgtatgctgcggtatcagaagtgtctggtggctagacccccaagccagaaagtgcgccccccacctccccccgcggactctgtgactcgcagggtgaccactaacgttaaacgcggtgtcttgagcctgatcgatacactgaaacagaaacggcctgtcacagagatgccgtag

SEQ ID NO: 178895 - DNA, 2274 bp, synthetic construct
  misc_feature 1..2274: note = Description of Artificial Sequence: Synthetic coding sequence
  source 1..2274: mol_type = other DNA
agccactgcatccccgccgacagcggcgtggacaccctggccgtgtttatggcttcatccggaaccacagacgtcactaaccggaacagccccgcgactcctccaaatacactgaatctccgctcgtcccataacgaactgcttaatgctgagattaagcacaccgagaccaaaaattctacacctcccaagtgccgcaaaaagtatgcgcttacaaatatccaagcggccatgggcttatccgatcctgccgcccagcctcttctgggcaacggaagcgctaacataaaactggtaaaaaacggagagaatcaactgcggaaggcagccgaacagggccagcaagacccaaataagaatctcagtccgaccgctgtaattaatattaccagcgaaaaactggaaggcaaggagcctcaccctcaagatagctccagttgcgaaatactccccagccagccccggcgtacgaaaagctttcttaactattatgccgatttggaaaccagtgcccgagaactggaacagaaccggggtaatcaccacggcacagcagaagagaagagccagccagttcagggccaggccagcactattattggtaatggtgatttgctgttgcaaaagccaaatcgaccacagtcgagtccggaagatgggcaagtggcaaccgtcagttcctcacccgagaccaagaaagaccacccgaagacaggggccaaaacggattgcgctctgcatcggattcagaatcttgccccgtccgatgaggaatctagctggactactttgtcacaggattccgcgagcccctcttcaccggacgaaaccgatatttggagcgatcactctttccaaacggatccagacctcccacccggctggaaacgggtgtccgatatcgctggtacatattattggcacatcccaacaggcaccacacagtgggagcgcccagtttccatccctgcggacctacagggatccagaaagggtagtctatctagcgttacacctagcccaacccctgagaatgaaaagcagccatggagtgactttgcagtactcaatggcgggaaaatcaactccgatatctggaaggacctccacgcagcaaccgtgaatcccgacccttcactgaaggagttcgagggcgccacattgcgttatgcctcacttaagctccggaacgccccccaccccgacgacgatgattcttgttcaattaattctgaccctgaagctaagtgtttcgccgtgagatctctggggtgggtcgaaatggccgaggaggacctggcccccgggaagtcttccgtcgccgttaacaactgcataaggcagttgagttattgcaagaatgatatccgggatactgttggaatctggggagaaggtaaggacatgtatctcattctcgaaaatgacatgctgagtctggttgacccaatggaccggagtgtcttacatagccaaccaatcgtctcaatcagggtgtggggtgtggggagagataacggtcgggattttgcctatgtggcccgggataaagacacacgcatactgaagtgtcacgtgtttcgctgtgatactcctgcaaaagcgatcgccacgtccctacacgaaatttgcagtaaaataatggccgagcggaaaaatgccaaggctctggcctgttctagcctccaggaacgtgcaaacgtgaatctcgatgtgccactccaagtcgatttccccacccccaagactgagctggttcaaaagttccatgtgcagtacctgggcatgctccctgtggacaagcctgttggcatggacatcctcaacagcgcaatcgaaaacctgatgaccagcagcaataaagaggactggctcagcgttaacatgaacgtagccgatgcaactgtgacggtgatttctgaaaagaatgaggaagaggtcctcgtggagtgtagagtacgattcctgtccttcatgggcgtgggtaaagacgtccacacttttgcctttattatggacaccggcaatcagcgcttcgaatgccatgtcttttggtgtgagcctaatgcaggcaatgtgagtgaagctgtgcaagctgcctgcatgttgaggtatcagaagtgtctggtagcccgacctccctcacagaaggtgcgccctccccctccacctgctgatagtgtgacccgtcgtgtcaccactaacgtgaagcgcggtgtcctctctctcattgataccctaaaacagaagaggccagttactgagatgccctag

SEQ ID NO: 178896 - DNA, 633 bp, synthetic construct
  misc_feature 1..633: note = Description of Artificial Sequence: Synthetic coding sequence
  source 1..633: mol_type = other DNA
atggccgagcggaagaacgccaaggccctggcctgcagcagcctgcaggagcgcgcaaacgtgaacctcgatgtgcccctccaggtggacttcccgacgccaaaaacggagctcgttcagaagttccacgtgcagtatctcggcatgctcccggttgataagcctgtgggaatggacattctaaacagtgccatagagaacctgatgactagcagcaacaaggaagactggctctccgttaacatgaacgtggctgatgcaacagtaaccgtgattagcgagaagaatgaggaagaggtgctggtggaatgtcgggtgcgtttcttatcctttatgggagtcggaaaggatgttcataccttcgctttcatcatggatacagggaaccaacggttcgaatgccacgtgttctggtgcgaaccaaacgctggtaacgttagcgaggccgttcaagcagcttgcatgctgaggtaccagaaatgcttggtggcccggcccccgtcacagaaggtgcggcctcctcccccgccagcagacagtgtgacccggagggtcactaccaacgttaagcggggtgttctcagtctgatcgacacccttaagcagaagcggcccgtcacagagatgccatag

SEQ ID NO: 178897 - DNA, 33 bp, synthetic construct; identical to SEQ ID NO: 72703
  misc_feature 1..33: note = Description of Artificial Sequence: Synthetic coding sequence
  source 1..33: mol_type = other DNA

SEQ ID NO: 178898 - DNA, 633 bp, synthetic construct
  misc_feature 1..633: note = Description of Artificial Sequence: Synthetic coding sequence
  source 1..633: mol_type = other DNA
atggccgagcggaagaacgccaaggccctggcctgcagcagcctgcaggaacgcgcaaatgttaatttagacgtgcccttgcaggtggacttccccacaccgaaaactgaattggtgcagaagttccacgttcagtacctgggaatgcttccagtagacaagcccgtcgggatggacatcctgaattctgccatcgaaaatttaatgacatcttcaaataaggaagactggcttagcgtgaatatgaacgtagcagatgctactgtgaccgtaatttcggaaaagaacgaggaggaagtgctggtggagtgccgggtccgttttctgtccttcatgggagtgggcaaagacgtgcatacatttgcgtttattatggatactggcaaccagcgcttcgagtgccacgtcttctggtgtgaacccaacgctggaaacgtctcagaggcagtgcaagcggcttgtatgctgagataccagaaatgtctcgttgcacgccctccctcccagaaggtcagaccaccaccgccacccgcagactcggttacccgtagagtgactacaaacgtcaaaagaggggttctctctctgatagacactcttaagcaaaagagacccgtgactgaaatgccctag

SEQ ID NO: 178899 - DNA, 2214 bp, synthetic construct
  misc_feature 1..2214: note = Description of Artificial Sequence: Synthetic coding sequence
  source 1..2214: mol_type = other DNA
atgagcgaggtgctgcccgccgacagcggcgtggacaccctggccgtctttatggcctcctcagggaccaccgacgtcacgaaccgtaactcgcccgccactccacccaatactctaaatctgaggagtagtcacaacgaactgctgaatgctgagatcaagcatacggaaaccaaaaatagcacgccaccaaaatgcaggaaaaagtatgctctgaccaatattcaggcagccatgggactctctgatcccgccgcgcagccccttctgggaaatggaagcgccaacatcaagctagtgaagaacggcgaaaaccagttaaggaaggctgcagagcaaggacaacaggatcctaataagaatctcagtccgaccgcagtgattaacattaccagtgaaaaactagagggtaaggaaccacacccacaggatagctcctcatgcgaaattctcccctcacagcctcgcagaacgaagagcttcttgaactattacgccgatctcgaaacgtcagctagggagctggagcagaaccggggcaaccaccatggcaccgcagaggaaaaaagtcagcctgttcaggggcaggcgagtactatcatcggaaatggcgacctgttgttgcaaaagcctaataggcctcagtcaagccctgaagatgggcaggtggccaccgtcagttcctctcctgagactaaaaaagatcatcctaaaacaggagctaaaaccgactgtgcgttgcatcgtattcaaaatctggcaccctccgacgaggaaagttcttggacaactctgtcccaagacagcgctagcccaagctcacctgatgaaacagatatctggtccgatcattccttccagacagatccagacttacccccaggctggaaacgcgtgtctgatatagccgggacatactactggcacattccaacagggacgactcagtgggaacgacccgtcagtatacctgccgacctccaggggagccggaagggcagtcttagtagcgtcaccccctcacccactccagaaaatgaagacctgcacgccgcgacagtgaaccccgaccccagcttgaaggagtttgaaggcgctactctccgatacgcttcactcaagctgagaaacgcacctcatccggacgacgacgatagctgctccattaatagcgacccagaagcaaaatgtttcgcagtgcggtccctcgggtgggttgaaatggcggaggaagatctggctccaggcaaatcctcagtggcagtaaataactgcatccgacagttgagctattgtaaaaacgatattcgcgataccgtgggcatttggggcgagggcaaggatatgtatttgatcttagagaatgacatgctatctctagttgatccgatggaccggtctgtcctgcacagtcagccaatcgtctcaattcgcgtgtggggggtggggcgagacaatggaagggacttcgcctatgtcgcccgagataaagatactcgcattctcaaatgccacgtgtttaggtgcgacacgcccgccaaggcgatcgctacttccttgcacgaaatatgcagcaaaataatggctgagcggaaaaatgccaaggcccttgcttgttctagcctacaggagcgtgctaacgtaaacttggacgtcccattgcaggtggattttccaactcctaagaccgagctcgtgcagaagttccacgttcaatatctgggaatgctgcctgtcgataaacctgtggggatggatatactcaactcagccatcgagaatcttatgacgtcttccaacaaggaggattggttgagcgtgaacatgaacgtagcggacgcaaccgttactgttataagcgagaaaaatgaggaggaagtgctcgtcgaatgtcgggtgcgcttcctcagttttatgggcgtcggcaaggacgtgcatacattcgctttcattatggacactggcaaccagcggttcgagtgccacgtgttttggtgcgaacctaatgctggtaatgtcagcgaggccgtccaagccgcatgtatgctgcggtatcaaaaatgcctggtcgctcgtccaccatcacagaaagtcagaccacccccaccgcctgccgattccgtgacccggcgggtaaccactaatgtgaagcgcggggtgctctcactcatcgacacactgaaacagaagcggcctgtgactgagatgccttag

SEQ ID NO: 178900 - DNA, 2280 bp, synthetic construct
  misc_feature 1..2280: note = Description of Artificial Sequence: Synthetic coding sequence
  source 1..2280: mol_type = other DNA
atgagcgaggtgctgcccgccgacagcggcgtggacaccctggccgtcttcatggctagctccggaaccacggacgtaacaaacaggaattcgcctgcaacacccccaaataccttgaatctgcgttcttcccacaacgaactactcaacgcggagatcaagcatactgagacaaagaacagcaccccacccaagtgcagaaagaagtatgctttaaccaacattcaagcggccatggggctgagcgatcctgccgcacagcctctgctgggcaacggaagcgccaatatcaagctggtcaagaacggtgaaaatcagctgagaaaggccgccgagcaggggcagcaggacccaaataaaaatctcagccctacggcagttatcaacataacatctgagaagctggaggggaaggagccgcatccccaggactcttcgtcctgtgagattctcccctcgcagcccaggagaacgaagagtttcctgaactactacgcagacctcgaaacttccgcacgcgagctcgagcagaatcgcggcaaccaccacggcacagccgaagagaagtcacaacccgtacaggggcaagcgtcaaccattattggcaacggtgacctgttgttgcagaagccgaatcggccacagagcagtccggaagatgggcaggtggctactgtgagtagttccccagaaactaagaaagaccacccaaagactggggctaagactgattgtgctctgcatagaatacagaacctggccccatctgacgaagaatcatcttggaccactttgtcacaagatagcgcaagccctagttcaccagacgaaacggccgacatttggagtgatcattctttccagacagaccctgacctcccgcctggctggaaacgagtgagcgatatcgcgggtacctactattggcacatccccacgggcacaactcagtgggaacgcccggtgtctatccccgcggacctacaaggcagcaggaaaggttccttgtcctcggtgacccccagcccaacccctgaaaatgaaaaacaaccctggtcggatttcgctgtgctcaatggggggaagataaactctgatatttggaaggatcttcatgcagctactgtcaacccagatccctccctgaaggaatttgaaggcgccacattaaggtatgcgtctctgaaactgcggaacgccccgcacccagatgacgatgatagctgtagtatcaatagcgacccggaggctaaatgcttcgcagttcgatcactgggctgggtcgagatggccgaggaggaccttgctccgggaaaatcatctgttgctgtcaataactgtatcaggcaactgagttattgcaagaatgatattagagacaccgtgggtatctggggagagggcaaagacatgtaccttattctcgagaacgatatgctgagtctcgtggatcccatggaccggagtgtgctccattctcagccaattgtgtccattagagtctggggggtgggccgggataatggtagggactttgcttacgtcgctagggacaaagataccagaatcttgaagtgtcacgtgtttcgctgtgatacacctgcgaaagcaatcgccactagccttcatgagatctgctctaagattatggctgaacgcaaaaatgcaaaggcgcttgcctgttcatctctccaggagcgggccaatgtgaacttggatgtcccactccaagttgactttccaacccctaagaccgagttagtccaaaaatttcacgttcagtatctaggcatgctgcccgtcgacaaacccgtgggcatggacatactgaattctgccattgaaaacctcatgacatcctcaaacaaggaggactggctcagcgttaatatgaacgtggccgatgccactgtgaccgtgatatccgaaaagaacgaggaggaagttctggtggaatgcagggtgagattcctcagttttatgggtgtgggaaaagatgtgcatacattcgcattcatcatggacaccggcaaccagaggttcgagtgtcacgtgttctggtgtgagcccaatgctggcaacgtaagtgaggctgtgcaggctgcctgtatgttgcggtaccagaagtgtctggtggccaggccaccctcgcagaaagtgaggccaccccctccgcctgctgactctgtcacaagacgagtaaccacaaatgtcaagcggggagtcctttcactaatcgacacactgaagcagaaacgacctgtgacagagatgccatag

SEQ ID NO: 178901 - DNA, 84 bp, synthetic construct
  misc_feature 1..84: note = Description of Artificial Sequence: Synthetic coding sequence
  source 1..84: mol_type = other DNA
atgagcgaggtgctgcccgccgacagcggcgtggacaccctggccgtgttcatggcctcgagcggtacaacagatgtgacctag

SEQ ID NO: 178902 - DNA, 207 bp, synthetic construct
  misc_feature 1..207: note = Description of Artificial Sequence: Synthetic coding sequence
  source 1..207: mol_type = other DNA
atgagcgaggtgctgcccgccgacagcggcgtggacaccctggccgtttttatggcctcctcagggaccactgacgtgactaacaggaactcccccgcaacacccccaaataccctcaacttgcgttcttcccacaacgagttgttgaacgctgaaatcaaacacacagaaaccaagaactcaacgcctccaaagtgcaggaaatag

SEQ ID NO: 178903 - DNA, 2211 bp, synthetic construct
  misc_feature 1..2211: note = Description of Artificial Sequence: Synthetic coding sequence
  source 1..2211: mol_type = other DNA
atgagcgaggtgctgcccgccgacagcggcgtggacaccctggccgtgttcatggccagtagcggaacaaccgatgtgacaaatcggaattcccccgcgacccctcccaacacgctcaatttacgaagttctcacaatgagctcctgaacgcagagattaaacatacagaaaccaaaaatagcaccccccccaagtgccggaagaagtatgccctgactaacattcaggcagccatgggactctctgaccctgccgcccagccccttctgggcaacggtagcgccaacataaagctggttaaaaacggagaaaaccagctgaggaaggcagccgagcagggtcaacaggaccctaacaagaacttgtcaccaaccgcggtaattaatatcactagcgagaagctcgagggcaaggagccgcaccctcaggattccagcagttgcgagatcctaccctctcagccaagaagaaccaagtcattcttgaactactatgcagatctcgaaaccagcgcacgcgagcttgagcaaaaccggggcaatcatcacggtacagctgaggaaaaatcccaacccgtccaggggcaggcaagtactattatagggaacggtgacctcctgctgcagaagccgaacaggccacaatcctcacccgaagatggacaggttgccactgttagcagttccccagagaccaagaaggatcaccctaagacgggcgccaagaccgactgtgcactgcacaggatccagaacctggccccaagtgacgaggagagctcatggacaactctctcacaagatagcgcgtcaccctcctctcccgacgagacggacatttggtctgaccacagctttcagaccgatccggacctgcctcccggctggaaaagagtgagtgacatcgccggcacttactactggcatatccccacgggaacaacgcaatgggagaggcctgtcagcatcccggctgacctgcagggaagccgaaaaggatcgttgtcgtcagtgaccccttctccgacacctgaaaacgaagatctgcatgcagctaccgttaatccagatccgagtctgaaggagtttgagggggcgacactgcggtatgcaagcttaaagctgcgcaatgccccacaccctgatgacgatgactcatgctctattaacagtgaccctgaagctaagtgctttgccgtgagatctctagggtgggtggagatggctgaagaagatctggctcccggaaaaagttctgtggcagtgaataactgcattcgccagttgagctattgcaagaatgatatcagagacactgttggtatatggggagaggggaaggacatgtatctcattctggaaaacgacatgctgtccctcgtggaccctatggatcgctctgttctgcatagtcagcctattgtgtctattagggtatggggggtgggccgggacaacggccgggactttgcgtacgtggcacgggataaggacacccgcattctgaaatgccatgtgtttagatgcgatacacccgcaaaggctattgcaacttccttgcatgagatatgcagcaaaataatggccgagagaaagaatgccaaggctctggcatgctcgtctttacaggagagagctaacgtgaatcttgacgttccactgcaggactttcccactcctaaaaccgaattggtgcagaaattccatgttcagtatctgggtatgctgcccgtggacaagccagtcggcatggatatccttaacagtgccatagagaatctgatgactagtagcaataaagaggattggttaagtgtgaatatgaacgttgcggatgcaactgttactgtgatttcggagaagaatgaagaagaagttcttgtggagtgtagagtacgctttctaagttttatgggagtgggtaaagatgtgcatacatttgcttttatcatggacaccggcaatcaaagattcgagtgtcacgtgttctggtgtgaaccaaacgcaggcaacgtcagtgaggccgtacaggccgcgtgcatgctgaggtatcagaagtgtctggtcgcgagacccccctcgcagaaagtgcggcctccacctccaccagcagactcagtgacccgacgcgtgaccaccaacgtgaaacggggggtgttgtcactcattgatactctgaagcagaaaagacccgtgaccgagatgccttag

SEQ ID NO: 178904 - DNA, 2187 bp, synthetic construct
  misc_feature 1..2187: note = Description of Artificial Sequence: Synthetic coding sequence
  source 1..2187: mol_type = other DNA
tgagacaccctggccgtgttcatggccagcagcggcaccaccgacgtgaccaacagaaattcccctgccaccccgccaaacaccttgaatttacggagctctcacaacgagctgttaaacgccgaaatcaagcatacggaaaccaagaatagcactccgccgaagtgtagaaaaaagtatgctctgactaatatccaggccgccatggggctgagcgatcctgcagcccagccactcctcggtaacgggagcgcgaacattaagttagttaagaatggggagaatcagctgcggaaggccgctgaacaggggcagcaagatcctaacaagaacctgagcccaaccgccgttattaacataacctccgagaaactcgagggaaaagagccacatccccaggactctagctcatgtgagatcttgcctagccagccaaggcggaccaagagcttcctcaattattatgccgaccttgagaccagcgctagagagctcgaacaaaaccggggcaaccaccacggcactgccgaggagaaaagtcagcccgtacaggggcaggcctccaccataattggtaatggagacttactcctgcaaaagccaaacagaccacagagcagtcccgaagacggccaggtggcaacggtgtccagtagtcctgaaaccaagaaagatcaccccaagacaggtgccaagaccgactgcgcccttcacaggattcaaaacctggctccttctgatgaagaatcgtcctggacgaccctgtcacaggacagtgcctcaccctcgtccccggatgaaaccgccgatatatggagtgatcacagttttcagacagacccagacctgccccctggatggaagagggtgagtgatatagccggaacatattactggcacatccccactggtacgacccagtgggaacgtccagtcagtatcccagccgatctgcagggaagtcgcaagggctcactctccagcgtgacacctagccccacccctgaaaatgaggatctacatgctgcaactgtgaatcctgacccgtctttaaaggagtttgagggagcaaccctgcgctacgccagcttgaaacttcgtaatgcacctcaccctgacgatgatgatagctgtagtattaacagcgaccctgaggctaagtgctttgccgtacgttcactggggtgggtggaaatggccgaagaggacttggcccccggtaaaagcagtgtggctgtgaataattgcatccgccagctgagttattgcaagaatgacatccgggacaccgtcggcatctggggagaaggcaaagacatgtacctgatcttggagaatgacatgttatccttggtcgaccctatggatcggagcgttttgcactcccagcccatcgtgagcattagagtctggggtgtcggtagagacaacggcagagactttgcttacgtcgctcgcgacaaagacacccggatactgaagtgccacgtatttcgatgcgacacccccgctaaagctatagccacgagcctgcatgagatatgtagcaaaataatggctgagagaaagaatgctaaagctctagcttgtagctcgttgcaggagagggctaacgttaatttggacgtgccgctacaggttgactttcctacccctaagaccgaactcgtacaaaagtttcatgtgcagtatttgggaatgctgcctgtggacaagcctgtggggatggacattctcaactccgccatcgaaaatctcatgacgtcttctaacaaggaggactggctgtctgtcaacatgaatgttgcagatgccacagtgaccgtaatcagcgaaaaaaatgaggaggaagtgcttgtagaatgcagggtgagattcctaagtttcatgggggtcgggaaagatgtccacacctttgcatttatcatggacaccggtaaccagcgatttgaatgtcatgtcttttggtgtgagcctaatgccgggaatgtctctgaagccgtgcaggcagcctgtatgttgcgttatcaaaaatgccttgtggccaggcctccgtcacagaaggtccggccacctcccccacccgcagactcagtgacaagacgggtcactaccaacgttaagcgaggggtgctgtcattgatagatactctgaagcagaaacggcccgtgactgaaatgccttag

SEQ ID NO: 178905 - DNA, 633 bp, synthetic construct
  misc_feature 1..633: note = Description of Artificial Sequence: Synthetic coding sequence
  source 1..633: mol_type = other DNA
atggccgagcggaagaacgccaaggccctggcctgcagcagcctgcaggaacgggcgaatgtcaacttggacgtcccgctccaggtggattttcccacaccaaaaacggaactcgtgcagaagttccacgtgcaatatttgggcatgctgccggttgacaagcccgttggcatggacatcctgaacagcgctattgaaaacttgatgacgagctctaacaaggaagactggttgtcagttaacatgaatgtagcagatgcaactgtcactgtgatcagcgaaaaaaatgaagaagaagttctagtggaatgcagggtcaggttcctctcgttcatgggagtgggtaaagacgtgcatacttttgcattcatcatggacacaggtaatcagcgcttcgaatgccacgtgttttggtgcgagcctaacgccggtaatgtttcagaggcagtccaggcggcctgtatgctccgctatcagaagtgtctcgtcgcccgcccaccgtcgcagaaggtgaggcctccccccccaccggcagattctgttacccgtagggtgactactaatgtcaaaagaggggtgcttagcttgatcgacactctaaagcagaaacgccctgtgactgagatgccctag

SEQ ID NO: 178906 - DNA, 1476 bp, synthetic construct
  misc_feature 1..1476: note = Description of Artificial Sequence: Synthetic coding sequence
  source 1..1476: mol_type = other DNA
atgctgggcaaggactacatgctggccatcatcctggtgaactgcgatgatgacctttggggtgaccactcgctagaggtggaagcaggcttgcctcctggttggcggaagatccacgacgcagctggtacctattactggcacgtacctagcggcagcacgcagtggcagcggccgacatgggagttgggcgatgcggaggatccgggtactggaactgaaggtatctggggcctcagaccacctaaagggcggtcattttccagcctggagtcctctctcgatcgatccaatagcttatcatggtatggcggtgaaagttacattcaatctatggaaccaggcgcgaagtgtttcgccgtacggtcactggggtgggtcgaggtgcctgaagaggaccttgcacccgggaaaagttctatcgccgttaacaactgcattcagcagctggcacaaacccgctctaggtcgcaaccccccgacggagcttggggcgaaggccagaatatgttaatgatccttaaaaaagacgccatgtccctggtgaatcctttagaccacagtctgatccattgtcagcccctggtgcacatccgggtgtggggagtgggatcgagcaagggaagacctatatccgcccctgcccgagatttcgcctttgtcgcaagtgataaggactcttgcatgctcaagtgtcacgttttttgttgtgatgtgcctgcgaaagccattgctagcgccctgcatgggctctgcgctcaaatactcagcgaacgggtggaggtgagcggggacgcttcttgttgcagtcccgatcccatctcaccagaggacttgcccaggcaggtcgaacttctggacgccgtgtcacaggctgcacagaagtatgaggctttgtatatgggcactctgcccgttacaaaggccatgggaatggacgtactaaatgaggccataggtaccctgacggcccgcggcgatcgcaatgcctgggtgccaacaatgctttcagtgtcagatagtctgatgactgcccaccccatacaggccgaggcaagtaccgaggaagaacctctgtggcagtgtccggtgcggctggtgacatttataggcgtcggaagagatccacacacattcggtctgattgctgacctgggccgccaatcatttcagtgcgccgccttttggtgtcagccacacgctggcggcctatccgaggctgtgcaagccgcttgcatggttcaataccagaagtgcctggtagccagcgctgcgcgggggaaagcctggggagctcaggcgcgggctaggttaaggctcaagagaacgtcaagcatggactctcctggaggcccacttccgcttcctctgttgaaggggggagtgggtggggccggggcaacccctcgtaagcgcggagtgttttcattcctcgacgcgttcagacttaaaccctccctgttacacatgccttag

SEQ ID NO: 178907 - DNA, 1461 bp, synthetic construct
  misc_feature 1..1461: note = Description of Artificial Sequence: Synthetic coding sequence
  source 1..1461: mol_type = other DNA
atgctgggcaaggactacatgctggccatcatcctggtgaactgcgacgacgatttgtggggagatcactccctggaggtagaggctggtttaccgcctggatggcgtaagattcatgatgctgctggtacctactactggcacgtgccctctggttccacccagtggcagcggccaacttgggaattaggcgacgccgaagaccccggcaccgggactgaaggcatttggggactgcggcctccgaagggaagaagtttttcaagtctagagtcttctcttgatagatctaactcactgtcctggtacggtggggagagctacatccaaagcatggaacccggggccaaatgcttcgccgtcagatccctaggctgggtcgaagtccctgaggaagatctggccccgggaaagtcttctatcgctgtgaacaattgtatccagcaactggcacaaacgcgcagcaggtcccagccccctgacggtgcatggggcgaagggcagaacatgcttatgatactcaagaaagatgcgatgagcctggtgaatccactcgaccactccctgatacactgtcagccactcgtgcatattagagtgtggggcgtgggtagcagtaagggaagagaccgggactttgccttcgtggccagtgataaagacagttgtatgctgaaatgccacgtgttttgctgtgatgtcccagccaaagcaatcgcatctgcccttcatgggctgtgtgcacagatacttagcgaacgggtggaagtgtccggcgatgcatcttgttgcagcccggacccaattagtcctgaggatctgccccggcaggtggagctcctcgacgctgtgtcccaggcagcacagaaatatgaagcgctttacatgggtaccctccctgtaactaaagctatggggatggatgtcctcaacgaggccatcggcaccttaaccgcccgcggggaccgcaacgcttgggtacctaccatgttgtctgtgtcggactctctgatgacagctcaccccattcaggctgaggcttctacggaggaggaacccttgtggcaatgtcccgtccgcctcgtaacatttatcggcgttggccgcgacccccacacttttggcttgatcgctgatctcggcaggcagtctttccagtgcgccgccttctggtgccagcctcacgctggaggactgagcgaagccgtccaggctgcttgcatggtgcagtaccaaaaatgtcttgtcgcttctgcagcccgaggaaaggcttggggcgcccaggcacgagcaaggctcaggctgaaaagaacctcttctatggatagccccggaggccccctccctctgcctcttctgaaagggggagttggtggcgccggtgctaccccaagaaaacggggagtgtttagctttctggatgcgtttaggctgaagcctagccttctacacatgccatag

SEQ ID NO: 178908 - DNA, 1020 bp, synthetic construct
  misc_feature 1..1020: note = Description of Artificial Sequence: Synthetic coding sequence
  source 1..1020: mol_type = other DNA
atgctgggcaaggactacatgctggccatcatcctggtgaactgcgacgatgatctctggggtgaccactcgctggaggtagaggctggactccctcctgggtggcggaagatccacgacgctgccggaacatactattggcacgtcccttccgggtcaactcagtggcagagaccaacgtgggaattgggggatgcggaagaccccgggacaggaacggaaggaatatgggggctcagacctccaaaaggaaggtcattcagttcactggagagcagcttggaccgttccaattctctgagttggtacgggggggagagttatattcagtctatggagccgggagccaagtgttttgctgtccgctctctgggctgggtggaggttcctgaggaagacctggccccgggaaagagctctatcgccgttaataattgcattcaacagctcgcgcagacgaggtctagatctcagcctcctgacggagcctggggcgaaggacagaatatgctcatgatacttaaaaaggacgccatgagtctagtgaatcctctcgatcacagtctgattcactgccagccacttgttcacatccgtgtgtggggtgtaggatctagtaagggccgtgacagagactttgcctttgtcgcctcagacaaggatagctgtatgctaaaatgtcacgtgttctgctgcgacgtcccagcaaaagctatagcctcagcactgcacgggctgtgcgcacaaattctttcagaacgggtggaagtttccggcgacgcctcatgttgctctccggacccaatcagtccggaggacctgccacgtcaggtggagctgctcgatgccgtgagtcaggcagcccaaaagtatgaagcactgtatatgggaactctgccggtaaccaaagccatggggcgaggccaataccgcggcggagcaattgtggccgtcccctgcgccccctgcgatatctactggtgctggcctaggccgacacatctctggcctcaccgatag

SEQ ID NO: 178909 - DNA, 1455 bp, synthetic construct
  misc_feature 1..1455: note = Description of Artificial Sequence: Synthetic coding sequence
  source 1..1455: mol_type = other DNA
atgctgggcaaggactacatgctggccatcatcctggtgaactgcgatgatgacctttggggggatcactccttggaggtagaagcaggtctaccaccagggtggcggaagatccatgatgctgccggcacatactattggcacgtgcccagcggttccacccagtggcagaggcccacatgggagctgggcgacgctgaagatcccggaacgggcacggagggaatctgggggctgaggccacccaagggccggagtttctcaagtctagagagcagcctagaccgctctaacagtctttcatggtacgggggagagagctacatccaatctatggaaccaggggccaagtgtttcgcagtgcgttcgttaggatgggttgaagttcctgaggaggatcttgcccctggaaaatcctccatcgctgtgaacaactgcatccagcagttggcccaaaccagatctcgatctcagccgccggacggcgcctggggcgagggtcagaatatgcttatgattctgaagaaagatgcaatgtccctggtgaatccactggatcactctctcattcactgtcagcctctggtgcacatccgtgtgtggggagtggggtcctcgaaagggcgcgatttcgccttcgtcgccagcgataaagatagttgcatgttgaagtgccacgtgttctgttgtgatgtgcctgccaaggccatcgcctcggcactacacggactttgtgcccaaattctcagtgaacgtgttgaggtctcaggggacgcctcctgttgttcccccgaccccatttcaccggaggacctccctcgccaggtcgagctcttggacgccgtgtctcaagctgcacagaaatatgaggcactgtacatggggacgctgccagtgacaaaagccatgggcatggacgtgttgaacgaggcgattggtaccctcaccgccaggggggataggaatgcttgggtcccaacaatgctatcagtcagcgatagcctcatgacggcacaccctatacaagctgaagcctctactgaggaggagccactgtggcagtgccccgtgcggttggtaacatttattggtgtggggagggatccccacacattcggattaattgcggatctgggccgccagtcattccagtgcgccgcattctggtgtcaaccacacgccggaggtctgtctgaggctgtccaagccgcatgtatggtccagtaccagaaatgcctcgttgcctctgcggcacgcggtaaggcgtggggcgctcaagctcgggcccgcttacggctgaagcgcaccagcagtatggactctcctggcgggcctttgcccctcccgttactgaagggcggtgttggcggcgccggggccaccccaaggaagcggggagtgttttcattcctggacgcttttagacttaaaccttctcttctgcacatgccttag

SEQ ID NO: 178910 - DNA, 738 bp, synthetic construct
  misc_feature 1..738: note = Description of Artificial Sequence: Synthetic coding sequence
  source 1..738: mol_type = other DNA
atgctgggcaaggactacatgctggccatcatcctggtgaactgcgacgatgatttatggggtgaccactcacttgaggtagaggcggggctgcctccaggctggcgcaaaattcatgatgccgctgggacctattactggcatgtgccatccggctcaactcagtggcagcgcccaacgtgggagttaggagacgcagaggaccccggaaccggcactgaggggatatggggcttaaggcctcccaagggcaggtccttttcctcccttgagagctcattagaccgatccaatagcttgagttggtatgggggcgagtcatacatacagagcatggagccaggcgcaaaatgcttcgccgtaaggagtctggggtgggtggaggtcccagaggaggatctggcccctggaaaaagcagcatcgcggtcaacaattgcattcagcaattggctcaaacgagatccagaagtcagccccccgatggagcctggggcgagggtcagaacatgctaatgatactcaagaaggatgccatgtctctggtcaatcccctcgatcactcactgattcactgccagccactggtccatatccgcgtctggggagtaggttcctctaaggggaggtctagtgacgtggatcccggcctgctgccactccccggcccagccctggtcggcgaaggcggaccctcaagtgcgggcaccgtttggggggaaagtgaacgactaggctag

SEQ ID NO: 178911 - DNA, 792 bp, synthetic construct
  misc_feature 1..792: note = Description of Artificial Sequence: Synthetic coding sequence
  source 1..792: mol_type = other DNA
atgctgaagtgccacgtgttctgctgcgacgtgcccgccaaggccatcgcatccgctctccacggtttatgcgcccaaatcctctccgaaagagtcgaggtgagtggggatgctagttgctgctcacccgatcccatctcccccgaagatttacccagacaggtcgaattgctcgatgcagtctcccaggcggcccaaaaatacgaagccctttacatgggcacactccctgtcacaaaagcgatgggcatggacgtgctgaacgaggccattggaaccctgacagcacgcggagacaggaatgcctgggttcccacaatgctctccgtgagcgacagcctcatgaccgctcaccccatacaggccgaggcatccaccgaggaagagcctctctggcagtgcccagtgaggcttgtaaccttcattggcgttgggagggatccccacactttcggcttgatcgccgatctgggcaggcaatcctttcagtgcgcagccttttggtgccagccacacgccggtggactctcagaagcagtgcaggcagcttgcatggtacaataccagaaatgtctggtggcaagtgctgcgcgcgggaaagcctggggggcccaggcccgcgcaaggctgagactcaagcgtacatccagtatggattcaccaggcggccctctcccgctgccactcttaaagggtggggttggcggcgcaggggcgacccccagaaaaagaggggtattctctttcttggatgcctttcggcttaagccatcactgttacacatgccttag

SEQ ID NO: 178912 - DNA, 645 bp, synthetic construct
  misc_feature 1..645: note = Description of Artificial Sequence: Synthetic coding sequence
  source 1..645: mol_type = other DNA
atgctgggcaaggactacatgctggccatcatcctggtgaactgcgatgacgatctgtggggcgaccacagtctggaagtggaagcaggcctccctccaggatggcggaagatccacgatgccgctggaacttattactggcacgtaccttctgggtctacacagtggcagagacccacatgggagctgggtgacgcagaggatcctggaaccggaacagagggcatctggggcctacgcccccccaaaggccggagcttctcctcacttgagagctccctcgaccgatcaaatagtctcagctggtatggaggtgaatcttatatccagagtatggagcctggagcaaaatgctttgccgtgcgtagtctgggctgggtcgaagtccccgaggaagatctggctcctggaaaatcctcaattgcagtgaacaattgcatacaacagttggctcagacccgttcaagaagccagcctcccgatggggcgtggggagaaggacagaatatgctaatgattttgaagaaagacgcaatgagtctagtcaatcctttggaccactctcttatacattgtcaaccacttgctgtgatcccaactgatgccgacccccagtaccttaacccgtggactcagattctttag

SEQ ID NO: 178913 - DNA, 378 bp, synthetic construct
  misc_feature 1..378: note = Description of Artificial Sequence: Synthetic coding sequence
  source 1..378: mol_type = other DNA
atggagcccgacggcacctacgagcccggcttcgtgggcatccggttctgccaggagtgcaacaacatgttataccctaaagaggataaggaaaataggatcctcctctacgcttgccgaaattgcgattaccagcaagaagccgataactcatgcatttatgtgaataagatcacccacgaggtcgatgaactgacgcagataatcgcagacgtctctcaggacccaactctgccgagaaccgaggaccacccatgtcagaagtgtggccacaaggaagcggttttcttccagtcccatagcgcacgggcagaggatgcaatgcggctgtattatgtgtgtaccgcgcctcactgcggccacagatggaccgagtag

SEQ ID NO: 178914 - DNA, 1836 bp, synthetic construct
  misc_feature 1..1836: note = Description of Artificial Sequence: Synthetic coding sequence
  source 1..1836: mol_type = other DNA
atgctggccagcctggagaaggacaagaccgcccccggcagcgcccaggttgccgggctttgtggcagactcactcttcatcgagatctacgcactgggcgatgggagcctgaccctcaaagatcaaggcggtgcctgagggacccgcagagggttctcgagtactgccgccaaatgtaccctgaactgcagatagctcgggtcgaacaggctacacaagcgatcccaatggaacggtggtgtggcgggtcacgaagtggttcttgcgctcaccctcatcaccaggtcgtccccttcaggtgcctaccaggcgagtttgtatccgaggctctgcttgtgccggaggggtgcaggtttctgcaccaggagcgtatggaccaatgcgagtcgagcacaagaagacaccaggaggcccaggaagcctgttcttcacagggcctgatacttcatgggtcgggcatgctactaccttgtgggagcgaccggtttagaggtgtggagtacgtgtgctgtccacctccaggcacaccagaccccagcggcacggccgtgggagatcccagcacaagatcatggcccccgggaagccgggtggagggcgccgaagatgaggaagaagaagagtccttcccccaacctgttgacgattattttgtagagcccccgcaagcggaggaggaggaagagaccgtgcctcccccatcatctcatacccttgctgttgtgggaaaggttacgccaaccccaagaccaacagatggagtggacatttacttcggtatgccaggggagatctccgagcatgagggattcctgcgggctaagatggacctggaggagagaagaatgcgacagataaatgaggtgatgcgggagtgggccatggctgacaaccaatcaaagaatctgcccaaggccgatcgccaggcattaaatgaacactttcagagcatcctgcagacactggaggaacaggtgagcggagagaggcagcggctggtggagacccatgctacccgagttatcgccctgatcaatgatcagcgtcgcgcggcacttgaaggattcctggcggcactgcaagcggatcccccccaggctgaaagagtcctgttagctctgaggcggtatctgcgcgcggagcagaaagagcagcgacatactctgagacactatcagcacgtagccgcagtggatccagagaaagcccaacagatgcgatttcaggtgcacacccacttgcaggtaatcgaggagagggtaaaccagagcctcgggctgctggatcagaatccccatctcgctcaagagctaagacctcaaatccaagaactgctccattccgaacatctcggtccctcagaacttgaggccccagccccaggtgggagcagcgaggataaaggtggattacaacctcctgatagcaaagacgatactcccatgaccctgccaaagggaagcacagagcaagatgccgcttcacctgaaaaagaaaagatgaatcctttggaacaatatgagagaaaggtgaacgcgagcgtgcccaggggcttccctttccacagctccgagattcaacgcgacgagttggctccagctggcaccggagttagccgagaggcggttagcggcctgctgatcatgggagctggaggtggtagcttgattgtcctttcaatgctgttgctgcgccggaaaaagccatatggtgcgatctcacatggtgtggtggaggtggatccaatgctgacgcttgaggagcagcagctgagagagctgcagaggcacggatacgaaaatccgacttacagattcctggaggaaaggccctag

SEQ ID NO: 178915 - DNA, 2292 bp, synthetic construct
  misc_feature 1..2292: note = Description of Artificial Sequence: Synthetic coding sequence
  source 1..2292: mol_type = other DNA
atggccgccaccggcaccgccgccgccgccgccaccggccggctgctcttgctactgttagttggtctgacagcacctgctcttgcactcgctggttatatcgaggcccttgccgctaacgcaggaacaggattcgctgtggcagaaccccagattgccatgttctgcggaaagctcaatatgcatgtcaatattcagacaggcaaatgggaacctgacccaaccggcaccaagtcttgcttcgagactaaggaggaagtcctccaatactgtcaagagatgtacccagagctgcagattaccaatgtcatggaggctaatcagcgggtgtctatcgataactggtgccggagagacaaaaaacagtgcaaaagtcgtttcgtaaccccattcaagtgcctagtgggtgagttcgtgagtgacgtgcttttggtacccgagaaatgccagtttttccacaaggagcgaatggaggtgtgtgagaaccaccagcactggcataccgtggtgaaggaggcctgcctgacacaaggcatgacgctttactcatacggcatgttgctgccatgtggagtggatcaatttcatgggactgaatacgtgtgttgcccgcaaaccaaaattataggctccgtgtccaaggaggaggaagaggaggacgaagaggaggaggaagaggaggacgaggaagaggactacgatgtgtacaagtcagagttccctactgaagcagatctggaggactttactgaggcagccgttgacgaggatgatgaagacgaggaagagggcgaggaggtcgtcgaagaccgcgattattattacgatacctttaaaggcgatgactataacgaggagaacccaaccgaacccgggtctgacgggaccatgagcgataaggagataactcatgacgtgaaggccgtctgttcacaagaggcaatgacgggcccatgtcgagcggtgatgcctagatggtacttcgacttgtcaaaaggaaaatgtgtgcggttcatatacggtggctgcggcgggaatcggaataactttgagtccgaggactattgcatggccgtgtgtaaagccatgattcccccaacccctttacctaccaacgacgtcgacgtctacttcgagacctcagctgatgacaatgaacacgccaggtttcagaaggccaaggagcagctggaaattcggcaccggaataggatggaccgcgtcaagaaggaatgggaggaagccgagttgcaggctaagaatctgccaaaagctgagcgacaaactctaatccaacatttccaggcgatggtaaaggcgcttgagaaagaagccgcctcagagaaacagcagcttgtcgagacacacctggcaagggtcgaggccatgttaaatgataggcggagaatggctttagagaactacctggccgctttgcagagcgaccctccaagaccacaccggatcctgcaggccctccgccgctatgtgagagccgaaaacaaggataggctgcatacaataagacattaccaacacgtgctggcggtggatcccgagaaggccgcccagatgaagtctcaggtgatgacacacctgcacgtgatcgaagagcggcgcaatcagtcgctcagtcttctatataaagtgccatatgtggcacaggagattcaggaggagattgacgaactgctgcaggagcaacgcgcagatatggaccagttcacggccagcatcagcgaaaccccagtggacgtgcgggtgtcctcagaagaatcagaagaaatcccacccttccacccttttcaccccttcccagccctgccagagaacgaggatacccaaccagagctttatcacccgatgaaaaaaggctcaggtgtcggagagcaggacggcggtttgatcggggcagaggaaaaggtcataaactccaaaaacaaggttgacgagaacatggttatcgatgagacactggatgtgaaggagatgatcttcaatgcggagcgagtgggaggcctggaagaggagagggaatcagtcggaccgctgcgggaggactttagcctgagcagctctgctcttatcggccttctagtaattgcagtggcaattgctaccgtcattgtgatttcgctcgtaatgttgcgcaagcgccagtacggtacaattagccacgggatagtggaggtggacccaatgctcacacctgaggagcggcatctcaacaagatgcagaatcatggctacgagaaccctacctataagtacttggaacaaatgcaaatttag

SEQ ID NO: 178916 - DNA, 2286 bp, synthetic construct
  misc_feature 1..2286: note = Description of Artificial Sequence: Synthetic coding sequence
  source 1..2286: mol_type = other DNA
atgctgcgggcccccggcgagctgccccggcaggccgcccggtgcagtctctgtcgcctcgggccgggccgaggtagggctttcttcaagtggagatgtctcccagcgtctgttgataggggtaatcccctgtgggccctggccgccaacgccggaacagggttcgcggtggctgaacctcagatcgccatgttctgcgggaagctcaatatgcacgtgaatattcagacagggaagtgggagccggatccaacaggcactaaatcctgttttgagacaaaagaggaggtgctccagtactgccaggagatgtacccggaactacagattacaaatgtcatggaggcaaaccaaagggtttctatagacaattggtgccgacgagacaaaaagcagtgcaaaagccggttcgtcactcctttcaagtgtcttgtcggagaatttgtgtctgacgttctgctggtacccgagaaatgccagttcttccacaaagagaggatggaagtttgtgagaatcaccagcactggcacactgtagttaaggaagcctgcttaacacagggcatgacattgtattcatacggcatgctactgccatgtggagttgatcaattccatggaactgaatatgtctgctgtcctcagacaaagattataggatcggtaagtaaggaggaggaggaagaagacgaggaggaggaagaggaggaggatgaagaagaggattacgatgtctataaatcagaattcccaaccgaagccgatctggaggacttcactgaggccgcagtggatgaggacgatgaggacgaggaagaaggcgaagaggtggtcgaagaccgcgattactactacgacacatttaaaggtgacgattataatgaagagaaccccaccgagcctgggagtgatggcactatgtctgacaaagaaatcactcacgacgtcaaggcggtctgctctcaagaagcgatgactgggccttgtagggctgtgatgccacggtggtattttgacctgtccaaaggaaagtgcgttcgcttcatttatggcgggtgcggtggaaacaggaataatttcgagtcggaggattactgcatggccgtgtgtaaggccatgatcccccctacccctctccctactaacgacgttgatgtgtactttgagactagcgccgatgataatgagcatgctcgtttccaaaaggcaaaggaacagctggagattcgccataggaatagaatggaccgcgtcaagaaggagtgggaagaagcagaactccaggccaaaaacctccccaaagctgaaagacagaccttgatccaacacttccaggctatggtgaaagcactggagaaagaagcagcgtcggaaaaacagcagctagtggaaacacatcttgcacgggtagaggctatgctgaacgatcgcagacgcatggccttagagaactatctggcggctctgcagagcgatcccccccgcccccatcgaatccttcaagcccttaggcgatacgtccgagctgagaataaagacagattgcatacaataaggcattatcagcacgtactagcagtagatcccgaaaaggccgcccaaatgaaaagccaggtgatgacccatctgcatgttatcgaggagaggaggaatcagtctctgagtctcctgtacaaagtaccttatgtagcccaagaaattcaggaggagatagacgagctgttacaggagcagcgcgcagatatggaccagttcaccgcttccatttctgagacgcctgtggacgtgcgcgtatctagtgaagaatcagaggaaattcctcccttccacccattccatccattccccgcacttccagaaaatgagggcagcggagtcggtgaacaggatggcggcctgattggggctgaagaaaaggtaatcaacagtaagaacaaggtggacgagaacatggtgatcgacgagacactagacgtgaaggaaatgatctttaacgcggagcgagtcggaggactcgaagaggagcgcgagagcgtgggcccattaagggaggatttttccctgtcctcttctgccctaatcggcctgctcgtgattgcggtcgctatagccaccgtcatcgtcatctcgctcgtaatgcttcgcaaacggcagtatggcaccatttcacacggcattgtggaagtggatcccatgctgacccccgaagagaggcacttaaataagatgcagaatcacggatatgaaaatccgacatataaatatctcgagcaaatgcagatctag

SEQ ID NO: 178917 - DNA, 2256 bp, synthetic construct
  misc_feature 1..2256: note = Description of Artificial Sequence: Synthetic coding sequence
  source 1..2256: mol_type = other DNA
atggccgccaccggcaccgccgccgccgccgccaccggccggctgctcctgttgctgttagtaggcttaaccgctcctgctttagctttggctgggtacatagaagcactggctgccaatgcagggacaggatttgctgttgctgaacctcaaatagccatgttttgtggcaaactgaacatgcatgtgaacattcagactggtaaatgggagccggatcccactgggaccaaaagctgcttcgagactaaggaggaggttctccagtactgccaagaaatgtaccccgaattgcaaatcactaatgtcatggaggccaatcagcgggtgagcatagataattggtgtaggagagacaaaaagcaatgcaaatcccgatttgtgaccccatttaagtgtttagtgggggaatttgtgtcggatgtgctgctggtgccagaaaaatgccaattcttccacaaagagcggatggaagtctgtgagaaccaccagcattggcacaccgtggtgaaagaggcctgccttacacaaggtatgacgctctactcctatggcatgctcctgccatgcggggtggatcagtttcacggtacagagtatgtgtgttgccctcagaccaagattatcggtagcgtctctaaagaggaggaggaggaagatgaggaggaggaagaggaggaggatgaagaggaggattacgacgtgtacaagtccgagtttcctaccgaagcggatttggaggactttaccgaagccgcagtcgacgaggacgacgaggacgaagaggagggggaggaagtggtggaagaccgcgattattattatgacacatttaagggggacgactataacgaggaaaaccccaccgaacctggatcggatggcactatgagcgataaagagataacacacgacgtgaaagctgtgtgcagtcaggaggcgatgaccggcccctgccgagcagttatgccccgatggtacttcgacctctccaagggcaagtgcgtcagatttatctacggcgggtgcggtgggaatcgtaataattttgagtccgaagattactgcatggccgtctgcaaggcaatgattcccccaaccccccttcccacaaatgatgttgacgtctatttcgagacttcagccgacgacaacgagcatgcgcgatttcagaaagctaaagaacagctagagattaggcacaggaaccgcatggatcgcgtcaagaaagagtgggaggaagcagagctgcaggccaagaacctcccaaaggccgaaagacaaaccctgattcaacattttcaggcgatggtgaaggctctcgagaaagaagccgcaagcgagaaacagcagcttgtcgagacacacctggccagagtggaggccatgctgaacgacaggaggcggatggcgctagagaattatctggccgccctgcagagcgacccacctaggccccacaggattctacaggctctcaggcgctacgttcgtgcggagaataaagacaggctccataccattcgccactaccaacatgtcctggcagtggatccagagaaggcagcacagatgaaatctcaggtaatgactcacctgcacgtaatcgaagaaaggcgcaaccagtccctgtcactactttacaaagtcccttatgtagctcaggagatccaggaggagatcgatgaactgctgcaagagcagagggccgatatggatcagttcactgcttcaatcagcgaaacccccgtcgatgtccgcgtaagtagcgaggaaagcgaagagattcccccatttcaccccttccatccattccctgccttaccagagaacgaaggaagtggcgtcggtgaacaagatggaggactgataggggctgaggagaaagtaattaactcaaagaacaaggttgacgagaatatggtgattgacgaaacactggacgtgaaagaaatgattttcaacgctgagcgggtgggcggattggaagaggaacgggagtccgtgggtccactgagagaggacttttctctcagttcttcagccttaatcgggctgctggtaatcgctgttgccattgccaccgtaattgtgatttccctagtcatgcttcgtaaacggcagtatggcacaatttcccatgggatcgtggaagtggatcctatgttgactccagaagaaagacaccttaacaagatgcagaaccacggctacgagaaccccacctacaagtacctcgagcagatgcagatctag

SEQ ID NO: 178918 - DNA, 1569 bp, synthetic construct
  misc_feature 1..1569: note = Description of Artificial Sequence: Synthetic coding sequence
  source 1..1569: mol_type = other DNA
atggccgccaccggcaccgccgccgccgccgccaccggccggctgttgttattattgctggtgggcttgaccgccccagctttggccctcgcaggctatatagaagctctcgcagctaacgctggcactgggttcgccgtcgctgaacctcagattgctatgttttgtggtaaattaaacatgcacgttaatatccagaccggcaagtgggagccagatcctaccggaactaagagttgctttgaaacgaaggaagaggtattgcagtactgccaggagatgtatccagagctgcagatcacaaacgtgatggaggctaaccagcgtgtgtccatagacaactggtgtagaagagataagaagcagtgtaagagtcgcttcgttacacctttcaaatgcttggtgcctccgacccctctgcctaccaacgatgtggatgtgtacttcgaaaccagcgctgatgacaacgagcacgcccgctttcagaaggcaaaggagcagctggagatacgtcaccggaatagaatggatcgggtgaagaaggaatgggaagaagccgagcttcaggcaaaaaacctcccgaaggccgaacggcaaactctaatacagcactttcaggccatggtgaaggcactggagaaggaggccgcgagtgaaaagcagcagctggtggaaactcaccttgcaagggttgaagccatgcttaatgacaggaggaggatggccttagaaaactatttagctgcgctgcagtctgatccaccccgccctcaccgcatcctccaagccttgcggcggtacgtgagagccgagaataaggaccgccttcacactattcgccattatcaacacgtcctggccgtggaccccgaaaaagccgcccaaatgaagtctcaggttatgacccacttacatgttattgaagaaagacggaaccagtcattaagccttctgtacaaagtcccctacgttgcgcaagaaatacaggaggagatagatgaacttctccaggagcagcgagcagacatggatcagttcacagcaagtatcagcgagaccccagtggacgtaagggtttcctcggaagaatccgaagagatcccccccttccacccattccacccttttccagctctgcccgagaatgagggaagcggggtcggggagcaggacggtgggctgatcggagcggaagaaaaagttattaactctaagaacaaggtggacgagaatatggtgatagacgaaacattggacgtgaaggagatgattttcaatgcagagcgggtggggggactggaggaggaacgggaaagcgttgggccattgcgggaagatttctccctcagtagcagcgcactaattggcttgttagtgattgcggtggcgattgctactgttatcgtgatttcccttgtgatgctgaggaaacgacaatacggcacaatctctcacggtattgttgaagtggacccgatgttgactccagaagaacgacacctgaacaagatgcagaaccacggatatgagaacccaacatacaaatatctggagcaaatgcagatttag

SEQ ID NO: 178919 - DNA, 2088 bp, synthetic construct
  misc_feature 1..2088: note = Description of Artificial Sequence: Synthetic coding sequence
  source 1..2088: mol_type = other DNA
atggccgccaccggcaccgccgccgccgccgccaccggccggctgcttctgctcttgttggtgggacttactgcccccgccttagctctggcaggttacattgaagccctggctgccaatgcagggactgggttcgccgtggccgaaccacagattgctatgttctgtggtaaattaaatatgcacgtgaatattcagacggggaaatgggagccggaccccaccggtaccaaatcatgcttcgagactaaagaggaggtcttacaatactgccaggaaatgtaccccgaactgcagatcacaaacgttatggaggccaatcagcgggtatccatcgacaattggtgcaggcgggataaaaaacagtgtaaatcaaggtttgtgactcctttcaaatgtcttgtgggtgaatttgtaagtgacgtattactggtgcctgagaagtgccagtttttccacaaggagcgcatggaggtatgcgaaaatcatcagcattggcacacagtggtcaaggaggcctgtctgacacaggggatgaccctatactcctacgggatgctcctgccttgtggggtcgaccaatttcacggtactgagtacgtatgttgccctcagactaaaattattgggagtgtgtccaaagaggaggaggaagaagatgaggaagaagaagaagaggaggacgaagaagaagactatgatgtatataagtccgagtttcctaccgaggcagatctggaggatttcaccgaggctgcagtggacgaggatgatgaggacgaagaggagggcgaggaagtggtcgaagacagggactattactatgacacgttcaaaggggacgactataacgaggagaatcccaccgagccaggatccgatggcaccatgagcgacaaagagatcacacacgatgtaaaagtgcctcccacacccctccctacaaatgacgtagatgtgtatttcgagacatccgccgatgataacgagcatgcgcggttccagaaagcaaaggagcaactggaaatacgccaccggaaccggatggaccgggtcaaaaaggagtgggaagaagctgagctccaggcgaagaacctgcccaaggctgagcgccagactctgatccagcattttcaggccatggtcaaggctctggagaaagaggcggctagtgagaaacagcaactggtggagacccatctcgccagagtcgaagccatgcttaacgaccggaggaggatggcgttagagaattacttggcagcgctgcagtcggatccaccccgtccccatagaatcctgcaagcgcttcgaagatacgtgagagctgagaacaaagatagactgcatactattaggcactaccagcatgtgctcgcagtcgacccagaaaaagcagctcaaatgaagtcccaggtcatgacccacttacacgtgatcgaagagagacgtaatcagagcctgtcgcttctgtataaagtgccgtatgtggcccaggagatacaagaggagattgacgaacttctacaggagcaacgggccgacatggaccagttcacggcttccatcagtgaaactcctgtggatgttcgagtgtcttcggaagagtcagaagaaatccccccttttcacccgtttcaccccttcccagccctgccagagaatgaagggtccggtgtgggcgaacaagatggcgggctgattggggccgaggagaaggtgattaattctaagaacaaagtggacgagaatatggttatagatgaaactctagatgtcaaggaaatgatttttaacgctgagagagttggcgggcttgaggaggaacgggaatccgtgggtcccctccgcgaggacttttcactcagcagcagcgcgctgatcggactactggttattgcagttgccatcgcgacagtgatcgtaatctcattggtgatgctgcgtaagcgccagtatggaaccatatcccacggcattgtggaggtggaccctatgcttacccccgaggagcgtcacttaaataaaatgcagaatcatggatatgagaacccgacttacaaatatttggaacagatgcagatctag

SEQ ID NO: 178920 - DNA, 480 bp, synthetic construct
  misc_feature 1..480: note = Description of Artificial Sequence: Synthetic coding sequence
  source 1..480: mol_type = other DNA
atggccgccaccggcaccgccgccgccgccgccaccggccggctgctcttattgttgctcgtgggattgacagcccctgccctggccctcgcagggtatatcgaaagctcccagatatgttgcagcccgaggagttttctgatcagtaccctcaaatgtctcatcgtagatgaaatcaatgctctcgccgctaacgccggaacgggcttcgccgtcgctgaacctcaaatcgctatgttctgcggaaagctgaacatgcacgttaatattcagaccggaaaatgggaacccgaccccacaggaacaaaatcttgctttgaaactaaagaagaagtattacagtactgtcaggaaatgtacccggagctgcagattactaacgttatggaggcaaatcaacgcgtgtcaatcgataactggtgccgacgcgacaagaaacagtgcaaaagccgcttcgttaccccattcaagtgtctatag

SEQ ID NO: 178921 - DNA, 351 bp, synthetic construct
  misc_feature 1..351: note = Description of Artificial Sequence: Synthetic coding sequence
  source 1..351: mol_type = other DNA
atggccgccaccggcaccgccgccgccgccgccaccggccggctgttattactgctgttggtcgggctcacggctcctgcactggctcttgctggatatatcgaggccctagcagccaatgcaggaacagggttcgctgtcgcagagccacagatcgctatgttttgcggcaagttaaacatgcatgtcaatattcagactggaaagtgggagcccgatccaactggcactaagagctgcttcgaaacaaaagaagaagtcttacaatattgtcaggaaatgtaccccgagctccagataaccaactcaggatggaggtgcgtaaggattactagcacaggaacacgctag

SEQ ID NO: 178922 - DNA, 1656 bp, synthetic construct
  misc_feature 1..1656: note = Description of Artificial Sequence: Synthetic coding sequence
  source 1..1656: mol_type = other DNA
atggaggtgtgcgagaaccaccagcactggcacaccgtggtgaaggaggcctgcctgactcaggggatgaccctgtattcgtatggcatgctgctgccttgtggcgtcgatcagtttcacgggactgagtacgtctgctgtccacagactaagattatcggatccgtcagcaaagaggaggaggaagaggacgaagaggaggaggaagaggaagacgaggaggaagattatgacgtctacaaatctgagttccccacggaggccgatttggaggatttcacggaggccgctgtggatgaggacgatgaggatgaggaggagggggaggaggttgtggaagatcgcgactactactatgacacattcaagggcgatgattataacgaagagaacccaaccgagcccggcagcgacggtaccatgtccgacaaggagataacacatgacgtgaaggtgccccctacccctctccctacgaacgatgtggacgtctatttcgagacctctgccgatgataacgagcatgcaagattccagaaagcgaaagaacagctggagattagacaccgcaatagaatggaccgcgtcaagaaggagtgggaagaagctgagcttcaggcgaagaacctgcctaaggcagagcgccaaaccttaatacagcactttcaggctatggttaaggcactagaaaaggaagccgcgtccgaaaaacagcagctcgtggaaacacatttggcacgagttgaggctatgttaaatgataggagacggatggcccttgagaattatctggctgccctccaatcagacccccctaggcctcatcggatcttgcaggcactacgacggtatgttagggctgagaataaggatagactgcacacaattcgccattaccagcatgtacttgcagtcgatccagaaaaggccgcacagatgaaatcacaagtgatgacacacctgcatgtgatcgaggaaagaaggaatcagtccctaagcctgctctacaaggttccttatgtcgcccaggagattcaggaggagattgacgaacttctgcaggaacaacgtgccgacatggatcagtttaccgccagcatcagtgaaacccctgtcgatgtgagagtgtccagcgaggagagcgaagagatcccaccattccacccctttcatccctttccagccctgcctgagaatgaagatacgcaacccgaactgtaccacccaatgaagaaaggtagcggggtcggtgagcaggacggcggactcatcggtgccgaagaaaaggtgatcaatagtaagaacaaggtcgatgagaacatggtgattgacgagacacttgatgtcaaggaaatgattttcaatgccgagcgcgtcggcggactcgaggaggagagagagagcgttggacctttgcgtgaggatttcagtctcagcagctcagcactgatcggattactcgtcattgcggttgccattgctaccgtgatcgtgattagcttggtaatgcttagaaaaaggcagtatgggaccatcagccacggtatcgtggaggtcgatcctatgcttactcctgaggagcggcacctcaacaaaatgcagaaccacggttacgaaaatcccacttataaatacctggagcagatgcagatttag

SEQ ID NO: 178923 - DNA, 1977 bp, synthetic construct
  misc_feature 1..1977: note = Description of Artificial Sequence: Synthetic coding sequence
  source 1..1977: mol_type = other DNA
atgtaccccgagctgcagatcaccaacgtgatggaggccaaccagcgggtctccatagataactggtgcaggcgggacaaaaagcaatgtaagtcccgcttcgtgacaccattcaaatgtctcgtgggcgagtttgtctccgatgtgctgcttgtccccgagaaatgtcagtttttccacaaggaacgcatggaggtgtgcgagaatcaccagcactggcacacggtggtgaaagaggcttgtttgactcaaggaatgacactctatagctatggaatgctgcttccatgcggtgtggatcagttccatggaaccgagtacgtgtgctgcccacagacaaagataatcgggagcgtgtctaaggaggaggaggaggaagatgaggaggaagaggaggaagaggacgaagaagaggactacgacgtttataagtctgagttcccaacggaggctgacctagaggattttacagaggctgcggtggatgaagatgacgaggatgaggaggaaggtgaagaggtcgtggaggatagggactactactatgataccttcaaaggagatgactacaacgaggaaaaccctactgaacctggctccgacgggaccatgtccgataaagaaatcactcacgacgttaaagcggtctgttcccaagaggccatgacaggcccatgtcgcgctgtgatgccgaggtggtattttgatctatccaagggtaagtgcgtgagatttatctacgggggctgcgggggtaatcgcaataatttcgagagtgaggactattgcatggcagtatgtaaggcaatgatcccgcctacccccttaccaactaatgatgtggacgtgtattttgaaacatcggcagatgacaacgagcacgcacgctttcagaaggctaaagaacagctggaaattcgacatagaaaccgcatggatagagttaagaaggaatgggaggaagctgagctgcaggccaaaaacctgcctaaggcagagcgccaaaccctcatccagcactttcaggcaatggtcaaagctctcgaaaaggaggcagccagcgaaaagcagcagttggtggaaactcatttagccagagtggaagccatgctgaacgaccggaggaggatggccctagaaaattatctcgcggctcttcagtctgacccgccacggccacaccgcatccttcaagccttgcgcaggtatgtaagagccgagaataaagacaggctccacacaatacgccattaccagcacgtcctggctgtggatcccgagaaggccgcacagatgaaatcccaagttatgacacatctccatgtcatcgaggaacgcaggaatcaatctctgtctttgctctacaaggttccttacgtggcccaggagatccaggaagaaatagacgaactccttcaggagcagagggctgacatggaccagttcactgcctccataagtgagactccagtggatgtgagggtgtcttcagaggaatctgaagagataccgccattccaccccttccatcccttcccggcactgcccgagaacgaaggatctggcgttggagagcaagacgggggcctgatcggagccgaagaaaaggttattaactccaagaataaggtggatgaaaacatggtaatcgatgagacactggatgttaaggaaatgatctttaacgctgagagagtgggcggtctggaggaggaaagagagagcgttggacctctacgggaggatttctctctctcaagcagcgcgctgatcggcctcctcgtgatcgccgtggcgattgcaaccgtgattgttatcagcttggtcatgctgagaaaacggcagtatggcactatcagtcatggtatcgttgaggtggaccctatgctgacaccagaggaacgccacttaaacaagatgcaaaatcacggttacgagaaccctacctacaaatacctagaacagatgcaaatctag

SEQ ID NO: 178924 - DNA, 1758 bp, synthetic construct
  misc_feature 1..1758: note = Description of Artificial Sequence: Synthetic coding sequence
  source 1..1758: mol_type = other DNA
atggccgccgtggagctggagtggatccccgagaccctgtacaacacagccatctccgcagtggtggataattatattcgctccagaagagacatcagaagtctgcctgaaaacattcagtttgacgtgtactataagttgtaccagcagggtcgcctgtgccaattggggagtgaattttgcgagctggaggtgtttgccaaagtcctaagggccttagataagcgccatctactgcaccattgtttccaagccctgatggatcacggtgtgaaggtggctagtgtgcttgcgtattcgttcagtcgccgctgttcatacatcgccgaaagcgatgctgctgttaaagaaaaggctatccaagttggttttgtcctcggaggatttctcagcgacgcaggatggtacagtgacgccgagaaggtattcttgtcttgcctccagctttgcactttgcatgatgaaatgttgcactggttcagggccgtagaatgctgtgtgcgactcttgcatgttcgcaatggaaactgtaaatatcacttaggcgaagagacattcaaactagctcagacttatatggataagctgagtaagcacggccagcaggctaacaaagctgccctgtacggggagctatgcgctctattgtttgcgaagagccactacgatgaggcctacaagtggtgcattgaggcaatgaaggagattacggcaggcctccccgtgaaggtggtggtcgatgttttaagacaggccagcaaagcctgcgtggttaaaagagagttcaagaaagcagaacagttgatcaagcacgccgtgtatctcgcacgggaccactttgggagcaagcatcccaagtactcggacaccctactggactacggcttttacctgctgaacgtggataatatttgccaatctgtcgccatctaccaggctgctctggacattagacagtcagtgtttggcggcaagaacatccacgtggctactgcccacgaagacctcgcatactcctcctatgtgcaccaatactctagcggaaagtttgacaacgcactattccacgccgagagagcaattggcattattacacatattctgccggaagaccacctgctactagcctcttccaaaagggtcaaggcgttgattttagaggaaattgctattgattgtcacaacaaagaaaccgaacaaagactgctgcaagaggcgcatgatctgcacctgagctcacttcagttagcgaagaaagccttcggggagtttaacgttcagacagctaagcattacggcaacctgggtcgtttgtaccagtcaatgcgtaaattcaaagaggccgaagaaatgcacattaaagcgattcagatcaaggagcagctcttgggccaggaggactacgaggttgcgttgagcgtgggacacctggctagcctgtataactatgatatgaaccagtacgaaaacgccgaaaagttatatctgaggagcatagctattggcaaaaaacttttcggggagggctatagcggtctggagtatgattatcggggactgattaaattgtacaattctatcgggaattacgagaaggtctttgaataccataacgtattaagcaactggaaccgactgagagaccgtcaatacagcgtgaccgacgcgttggaggacgtcagtacaagtccacagagcactgaggaggtagtgcagagtttcctcatttcccagaatgtggaagggccaagttgttag

SEQ ID NO: 178925 - DNA, 4974 bp, synthetic construct
  misc_feature 1..4974: note = Description of Artificial Sequence: Synthetic coding sequence
  source 1..4974: mol_type = other DNA
atggacagcaagaagcggagcagcaccgaggccgagggcagcaaggaaaggggcctggtgcatatctggcaggccggctcttttcccattactcctgagaggctgcctgggtggggcggaaagacggtgctgcaagcagccctcggggtaaaacatggtgtcctattgacggaggatggcgaagtgtattccttcgggacactcccctggcggtccgggccagttgaaatctgcccttctagtcctattctggaaaatgcccttgttgggcagtacgttattactgtggctacagggtcgtttcacagtggggcagtgacagataacggtgtcgcttacatgtggggcgaaaattcagccggccagtgcgcggtggcaaatcagcagtatgtgcccgagcctaaccccgttagtatcgccgactctgaggcttccccactgctggcagtgcgcatcctgcagttggcgtgcggagaggagcatacgctggccctgtcaatctcccgcgaaatctgggcctggggcacaggctgtcagcttggcctcattaccacagcattccccgtgaccaagccacagaaagtggaacatcttgcaggccgggtggtgctgcaggtggcttgcggtgcctttcactccctcgccctggtacaatgtctccccagtcaggatttaaagcctgtccccgagcgatgcaaccagtgctcccaactactcatcacaatgaccgacaaagaggatcatgttatcattagtgactcacactgttgccccttgggggtcactttgacagagagtcaggctgaaaatcatgccagtactgccctgagccccagcaccgagactctggaccggcaggaagaagtgtttgagaatacccttgtggctaatgaccagtccgtcgctaccgaacttaatgctgtctcagcacagatcacttccagcgatgccatgtctagccaacagaacgtaatgggaacaactgagatctcatccgctcgtaatatccctagttatcccgacacgcaggccgtcaacgaatatttgcgcaaattgtccgatcattccgtgagggaagatagtgaacacggggagaagcccgtgccctcacagccgttactcgaagaggctatccccaacctgcacagcccccccactaccagtaccagcgctttgaacagcctcgtagtgagttgtgctagcgctgtgggagtacgggtggcagcaacttacgaagctggcgctctctccctaaagaaagtcatgaatttctattccaccacaccctgcgaaacgggggctcaggccgggagttccgccattggccctgaaggactcaaggacagtcgggaggagcaggttaagcaggaaagcatgcaaggaaagaagagtagcagtcttgtggacatccgcgaagaggagactgaaggtggtagcaggagactctccctgcctggactgctgagtcaagtgagccctcggttgttaagaaaagccgctagggtaaagacaaggactgttgtattgacgcctacttattcaggagaagctgatgccctccttccaagcctccggaccgaagtgtggacgtggggcaagggcaaagagggacagttgggtcatggggatgtactacctcggctacaaccactgtgtgttaagtgtctggatggaaaagaagttatccacctcgaggctgggggttaccacagcctggctctgacagcaaaatcgcaggtgtacagctggggttctaatacatttggccagttgggacacagcgactttcccacaaccgtaccgagactggccaaaattagctccgagaatggagtttggtcgatcgccgccggccgggattattcattgttcctggtcgataccgaggatttccagccagggctgtactacagtggtagacaggatcctactgaaggggacaacttgcctgaaaaccattcaggatccaagactcctgtgctgctgtcgtgctcaaaactgggatatatcagcagagtgaccgccggtaaggacagctatctggctcttgtggacaagaatataatggggtacatagcgagcctgcacgagttggcgaccacagaacggaggttttatagtaaactgtccgatattaaatcccagatcttgagacccttgctctccctggaaaatcttggcacaaccacaacagtgcaactccttcaggaagtcgcctccaggttttccaaactgtgttatctcattggacaacacggggctagcttatcttctttcttacatggcgtgaaagaagccaggtcactggtgatcctcaagcatagctcgttgtttcttgacagctacacggaatactgcacctctatcacaaattttcttgtcatgggcggatttcagctcttagcgaaacctgctattgacttcctaaataagaatcaggagctgttacaagacctcagcgaagttaacgacgagaacactcagcttatggagatacttaataccttgttcttcttacctatcagacgcttgcataactatgcaaaggtcctgctgaaactggcaacctgctttgaagtggcatcccctgagtatcaaaagctgcaagactcatctagttgttacgagtgcctggctctgcatctcggtcggaagagaaaggaagcagagtatactctcgggttctggaaaacgtttcctggaaagatgaccgactctctgcgcaagcccgaaaggaggctcctttgtgagtcgtccaatcgcgctctgtcactacagcatgcaggccggttctccgttaactggtttatcctctttaatgacgcgttagtgcatgctcagttctctacccaccacgtttttcccctggcaactctgtgggcagaacccctatctgaagaagcagggggcgtgaacggcctgaaaatcaccactccagaggagcaattcaccctcatttccagcacacctcaggaaaagaccaagtggctccgagctatttctcaggctgtggatcaggcgttgaggggcatgtctgatctaccgccatatggatcagggagctctgtccaaaggcaggagccgcctatttcccggtctgccaaatatacattttataaggatcctcggctcaaggacgctacatacgatggacggtggctgtcaggcaagccccacgggaggggcgttctcaagtggcctgatggaaaaatgtacagcggaatgttcaggaacgggttagaggacggctacggggagtataggattcccaataaagcaatgaacaaggaggatcattatgtgggacactggaaagagggaaaaatgtgtggacagggagtctattcatatgcatccggagaagtgttcgagggttgcttccaggacaacatgcgccacggacacggacttttacgatcaggaaaactgacatcctccagtccatcgatgttcatcggccagtgggtcatggataaaaaagccgggtacggagtattcgacgacattactaggggggagaaatatatgggcatgtggcaggatgacgtctgccagggaaatggtgtcgtggtgacgcagtttggcctgtactacgagggcaacttccacctcaataagatgatgggcaacggcgtgctgctttcagaggacgataccatatacgagggcgagttctcagacgattggaccctaagcggcaagggtactctgacaatgcccaatggtgactatatagagggctatttttccggagagtggggttcagggatcaagatcaccggaacgtattttaaacctagcctttatgagagtgacaaggatcgcccgaaagtcttccgcaagcttggaaacctcgcggtgccagcagacgagaagtggaaggccgtatttgacgagtgctggaggcagctgggctgtgagggaccaggtcagggcgaggtgtggaaggcttgggataacatagctgtggctttaacaacctcacgcaggcagcatcgcgattctcctgagatcctgtccagatcacagacccagacgctggagagcctagaattcatacctcagcatgtgggtgcctttagcgtcgaaaaatatgacgacattagaaagtatcttattaaggcctgtgacactccactccacccccttgggagactcgtggaaaccctcgtagctgtgtaccgaatgacatatgttggtgtcggggcgaatcgtcgtctcctgcaagaggccgtgaaagagattaaatcatacctgaagcgaatttttcagctagtccggtttctgtttccagaactaccggaggaggggagtaccattccattatctgcacctctccccaccgaacggaagagtttttgtacgggaaaaagcgactccaggtccgaatcaccggagcccggttacgtggtcacttcctcaggactcctcttacctgtgctccttccccgtttatatcctccgctgtttatgctgtatgccctcgataatgatcgggaggaggatatttattgggagtgtgtgctgaggttgaacaaacagcccgatatcgcgctgctgggattcctgggcgtacagaggaagttttggcctgccaccctgtcaatattgggcgagtccaagaaagtcctgcctactaccaaggacgcgtgctttgcctccgccgtggaatgccttcagcagatctccacaacattcactccctcagacaagctcaaagtaatccagcagacgttcgaggagatatcacagagcgttttggcttccctgcatgaagacttcctgtggtctatggacgatctgttccccgtttttctgtacgtggttttgagagccaggatacgcaacttgggaagcgaagttcacctcatcgaagatttgatggatccgtacctgcaacacggcgagcagggtatcatgttcactactcttaaagcatgttattatcagatacaaagggagaaattaaactag

SEQ ID NO: 178926 - DNA, 420 bp, synthetic construct
  misc_feature 1..420: note = Description of Artificial Sequence: Synthetic coding sequence
  source 1..420: mol_type = other DNA
atggacagcaagaagcggagcagcaccgaggccgagggcagcaaggaacggggtctggtgcacatctggcaagccggctcctttcctatcacgcctgagagattaccgggctggggaggaaagacagtgctccaagccgctctgggcgtcaagcacggcgttcttctgactgaggatggcgaggtgtacagtttcgggaccctgccgtggagaagtggccccgtggaaatctgtcccagttcccccatcttggagaacgctctggtgggccagtatgtgatcactgtggcgacagggagctttcactctggcgctgttactgataacggagtggcttatatgtggggcgagaatagcgccggacagtgtgcagtggctaatcagcaatatgtccccgagccgaacccagttagcatctag

SEQ ID NO: 178927 - DNA, 321 bp, synthetic construct
  misc_feature 1..321: note = Description of Artificial Sequence: Synthetic coding sequence
  source 1..321: mol_type = other DNA
atggacagcaagaagcggagcagcaccgaggccgagggcagcaaggagagaggcctggtgcatatatggcaagcaggttctttcccgattacgccagaacgcctacctggctggggcgggaaaactgtccttcaggctgcactgggagttaaacatggcgtgcttctcacagaagatggtgaggtatacagcttcggaaccctgccatggagaagcggaccggttgagatttgtccctcaagccccatattagagaacgcgctagttgggcagtacgtgatcactgtagctactggatcatttcacagcggcgccgtctag

SEQ ID NO: 178928 - DNA, 1758 bp, synthetic construct
  misc_feature 1..1758: note = Description of Artificial Sequence: Synthetic coding sequence
  source 1..1758: mol_type = other DNA
tgactggccctggtggacaagaacatcatgggctacatcgccagcctgcacgagctagctaccaccgagagacgcttttattcaaagctaagcgacattaagtcacagatcctccgaccactgctctcactggagaaccttggcactaccaccaccgtgcagttactgcaagaagtggcctctagattctccaagctgtgttacttgatcggccaacacggggcctctcttagttcttttctgcatggggtgaaagaagccagaagcttggtgattctgaaacatagtagcctcttcttggattcatatacagagtactgtacaagcataaccaatttcctggtcatggggggcttccagctgttggctaaacccgccatcgattttctcaacaaaaaccaggagctgctgcaggatctgtccgaagtaaacgacgagaacacacagcttatggaaatcctgaatacattattctttttgcctataaggcggctgcacaactacgcaaaggtcctactaaagcttgccacatgctttgaagtcgctagccccgagtaccagaagctgcaagattcaagctcttgctacgaatgcctggctctacatctgggccgtaagcgaaaggaagccgagtatacattgggtttctggaaaaccttccccggtaaaatgacggattcactgagaaaacccgagcgacggctcctgtgcgaatcctccaatcgtgccttgagcctgcagcatgccgggcggttcagtgtcaactggtttattttgtttaatgatgcactggtccacgcccagttcagtacacatcatgtcttccctctggcaactctgtgggcggaaccgctgtcagaagaagctggtggggtcaacggccttaagatcacaacgcctgaggaacagttcactcttatttcttctactccccaagaaaaaaccaagtggctgcgcgctatctcccaagctgtggaccaggccctaaggggtatgtccgatctgccaccgtacggctctggaagttctgttcagagacaggaaccccctatttctaggagcgcaaaatacactttctacaaagaccctagacttaaagatgctacttatgatgggagatggctgtcaggcaagccgcacgggcgcggtgttctcaaatggcccgacgggaagatgtactcagggatgtttaggaacggtttggaagatggatacggagagtacaggatcccaaataaggctatgaataaggaggatcattatgttggacactggaaggaaggtaagatgtgcgggcagggcgtatattcgtatgccagcggtgaagttttcgaaggctgttttcaagataatatgcgccacggtcatggcctgctcagatcgggcaagcttacctcctcgtccccatccatgtttatcgggcagtgggtcatggataaaaaagccgggtacggggtatttgatgacataactcgaggagaaaagtacatggggatgtggcaggacgacgtctgtcagggcaacggcgtggtggtgacacagtttggtctatattacgaaggaaactttcacctgaacaagatgatgggcaacggggtcctgcttagtgaggacgacacaatctacgaaggagagttcagtgacgactggactctgtcaggaaaagacaactcaggcctcatcgaacaggtggggaaatgtagcctcctcccctacttcctaaaagtgtgtgaggcactcgtgttatttcttctgtag

SEQ ID NO: 178929 - DNA, 1731 bp, synthetic construct
  misc_feature 1..1731: note = Description of Artificial Sequence: Synthetic coding sequence
  source 1..1731: mol_type = other DNA
atgggctacatcgccagcctgcacgagctggccaccaccgagcggcgattctattcaaaactgtccgacatcaaatctcaaattctgcgcccccttttgtcattggagaacttaggcaccaccactaccgttcagctgctgcaggaagtggcctctcggttttctaagttgtgctatttgatcggacagcacggggcttccctctcatccttcctgcacggcgtgaaggaagcacggagcttggtcattctgaagcactcatcactgtttctggattcgtacaccgagtattgcacgtccatcaccaacttcttggtgatgggaggattccagttgttggccaagcctgccatcgattttctgaacaagaatcaggagctgttgcaagacctcagcgaggtgaacgatgagaacacgcagttgatggagattctcaacaccttatttttcctgcccatccgtcgtttgcataattacgctaaagtgctgctcaagctggcgacttgttttgaagtggcaagtcccgaatatcagaagctgcaagacagctcttcctgttatgaatgccttgcccttcaccttgggcggaagagaaaagaggctgaatatacacttggcttctggaaaacatttcccggcaagatgactgatagcctacgaaagcctgaacgtagactgttgtgcgagtcctctaaccgcgccctctctttgcaacatgccggtcggttcagtgtcaactggtttattttatttaacgacgcacttgtacacgcccagttttccacgcatcacgtatttcccctcgccactctgtgggccgaaccactgagcgaggaggctggcggtgtaaatggattaaaaataactacccctgaggagcagttcactctgatttcatctacgccccaggaaaaaaccaagtggcttcgggcaattagtcaggctgtcgatcaggccctcaggggcatgtccgatctgcccccttacggcagtggcagctccgtccagaggcaggagccgcccatttcccggagtgctaaatataccttttacaaggacccaaggctgaaggatgccacctatgatggtaggtggttgtcaggcaaaccacacgggcgaggcgtgctgaaatggccggacggcaagatgtactctggaatgtttcgcaacggactcgaggacgggtatggtgagtaccggattccaaataaggctatgaacaaggaagatcactacgttggacattggaaggagggcaaaatgtgtggtcagggcgtatacagctacgcgtcaggagaagtgttcgaaggatgcttccaagataatatgagacatggacatggcttattgagaagtggcaaactcacctctagttctcctagcatgttcattggccagtgggtgatggataagaaagccgggtatggcgtctttgacgatatcactcgaggagaaaaatacatgggcatgtggcaggacgacgtatgtcagggaaatggcgtcgtggtgacccaattcgggctgtactacgaaggcaattttcacctgaacaaaatgatgggaaatggcgtcttgctgagtgaagatgatacaatttatgaaggcgaattcagtgatgattggacactttcagggaaggataattccggtctgatcgagcaggtgggaaagtgtagcctgctcccctatttcctgaaagtctgtgaagccctagtgttatttctgctgtag

SEQ ID NO: 178930 - DNA, 1191 bp, synthetic construct
  misc_feature 1..1191: note = Description of Artificial Sequence: Synthetic coding sequence
  source 1..1191: mol_type = other DNA
atggacagcaagaagcggagcagcaccgaggccgagggcagcaaggagcgaggtttagtccacatctggcaggccggatcctttcccataacacctgaacggcttcccggatggggaggtaagacagtcctccaagctgcactcggtgtaaagcacggcgttctcctcactgaggatggcgaagtgtacagctttgggacattgccatggagaagtggccccgtggagatctgccccagctcaccaattctggaaaatgccctggtaggacagtacgttataacagtggctacagggtctttccactccggcgccgtgaccgacaatggtgtcgcctacatgtggggcgaaaactctgccgggcagtgcgcggtcgccaaccagcagtatgtccctgagcccaatcctgtgagcatcgcggacagtgaagcaagccccctcttggccgtcagaatattgcagttagcatgcggggaggaacacaccctggctctgtcaatttcccgagaaatctgggcctgggggactggctgccaattgggactcatcactaccgcctttccagtgaccaagcctcagaaggttgagcacctcgccgggcgtgttgtcctgcaggtagcctgtggtgcctttcattccctggccctggtgcaatgtctgccttctcaagacctgaagcccgtgccagagcgctgtaatcagtgttcccagctcctgatcaccatgaccgacaaggaagaccatgttatcatatcagactcccattgttgcccacttggcgtgacactaaccgaatcccaagcagaaaaccacgcctcaaccgccctgtctccttctaccgaaaccttggataggcaggaggaggtattcgaaaacactttggtggcaaacgatcagtcagttgcaacagaactgaatgctgtgtctgcccaaatcacatctagtgacgccatgagcagccagcagaacgtgatgggaacaaccgaaattagttctgcacggaatatcccatcataccccgacactcaggccgtgaatgaataccttagaaaacttagcgatcacagcgtgagagaggacagtgagcacggagaaaagcccgtaccatcccaggtgccagcccagttttacaagattaaagtttgcctcgagttgaactgcatgggattctccttagaaacactgaagtag

SEQ ID NO: 178931 - DNA, 2178 bp, synthetic construct
  misc_feature 1..2178: note = Description of Artificial Sequence: Synthetic coding sequence
  source 1..2178: mol_type = other DNA
atggagcagagcaacgacagcctgcgggtgaaccacaacgacggcgaagagtccaagacgtccgcccaagtttttgaacacctgatttgcatggacagcagggatagctccttcggccagaatgacagtcctacggttctgccaataaccaccagagaggctaataatagcttgattagtcagaacatccctggcccactgactcaaactcaaacccttagcgctgagcagtttcacctggtggaccaaaacgggcaggcaatccagtacgagctccagtcgcttggcgagtctaatgctcaaatgatgatcgtggcctcgcccaccgagaacgggcaggtcttgcgtgtaatcccacccacgcagacaggaatggcccaagttatcattccacagggccagctcgtcgatgttaactccccccgagatgtgcctgaggagaaacctagtaacaggaatttacctacagtccgagtagacactcttgctgataatactagtaattacattcttcatcctcagacaagtttcccactgccaaaaaagtccgtgacaggaatgctggaggagccgctgttggggccacttcaacctctttccagcaatactccaatttgggcgtgcagattgcgcagttgcgagaaaatcggcgattcctatcggggatactgcgtgtccgaaactgaactcgagagcgtcctaaccttccacaagcagcaaactcagtccgtttggggaaccaggcagagccctagcccagcaaagccagccacccggctgatgtggaagtcccagtacgttccctacgacggcattcctttcgtaaatgcagggagccgggccgtcgtgatggaatgccagtatggcccgaggcgtaagggtttccagctgaagaaggtcagtgaacaggagtcacgaagctgtcagctctataaggccacatgtcctgcgaggatttacatcaaaaaagtgcagaagtttcccgaataccgcgtccccactgatccaaagatcgataagaagataattcggatggaacaggaaaaggcatttaacatgttaaagaaaaatcttgtcgatgcaggcggcgtgctgcggtggtacgttcagctcccaactcagcaggcccatcagtatcatgaactggagactccatgcctgaccctttctcctagcccttttccagtatcgtctctggaggaagaggaaaccgcagtccgcgatgagaattgcgccctaccatctcgacttcatccgcaggttgctcacaagatccaggagctggtatctcagggcatagagcaggtttacgccgtcagaaaacagctccggaagtttgtggagcgcgaactgttcaaacctgatgaagtacctgaacgacacaacctgagtttttttcccacagtgaatgatattaagaaccatatccacgaggttcagaaaagccttaggaacggtgataccgtttataactccgagatcatccccgccactcttcagtggactactgactccggaaatattctgaaggaaaccatgacagttacctttgcggaggggaactctcctggagagtctatcaccacgaaggtggaaacaaatcaaacgcgcggatcattaagccccgagcctacccatttattgagctctctcagttctttccagccaaagatcttcacccagctccaggggctccagcttcagccgcgatacacgtctccagatgagtctccggccgtggtcagtgtcaacaaccagccaagctcctcaccatctggacttctggatacgatcggctcggccgtcatgaacaataacagcctgctgctcggccagtcacacagtcttcagagagacacatgcctgacccaaaacaatagtaccgccagcaccatgggtaatttacctgaacctgatcagaatctggtggctatggatgagctggtggaagtgggtgacgtggaggacacaggcaatctggagggaacagtccaccgcattctgttaggggacgtgcagaccattcccatacagattatagacaatcattcagctctgatcgaagagaatcccgagtctactatctctgtgtcccaagtgaagcaggagccaaaagaacctgctctgtctatggaggctaaaaagacggttgactacaagaaactctctgcgacttag

SEQ ID NO: 178932 - DNA, 2178 bp, synthetic construct
  misc_feature 1..2178: note = Description of Artificial Sequence: Synthetic coding sequence
  source 1..2178: mol_type = other DNA
atggagcagagcaacgacagcctgcgggtgaaccacaacgacggcgaggaatccaagacctccgcccaggtgttcgaacatctcatttgtatggactcacgagacagctcctttgggcaaaatgattcaccaaccgttttaccaattaccacaagagaagcaaataactccctgatcagtcagaatatccctgggccgctgactcaaacccaaactctgagcgccgagcagttccatctcgttgatcagaatggccaggcgatacagtacgaactgcagtcactgggcgagagcaatgcccaaatgatgatagtggcgtctccaacagaaaatggacaggtgttacgagttatcccccctacgcagacaggcatggcacaggtgattatacctcaggggcagctcgtggacgtaaactcacctagagatgtgccggaagaaaagccatctaacaggaatctcccgacggtgcgagtagacaccctagccgacaacacatctaactacattctgcacccacagacctcttttccactgccaaagaaatccgtcaccgggatgctggaggaaccccttctcggccctttgcagccccttagtagcaacaccccgatttgggcctgccggctgcgcagctgcgagaaaatcggggactcctaccggggctattgtgtgtcggagacagaactagagtctgttctgacattccacaaacagcagacacagtctgtgtggggaaccagacagagcccgagccccgcgaagccggcaactcgcctcatgtggaagagccagtatgttccttacgatggaatcccctttgtgaatgccgggtccagagctgtggtaatggagtgccaatatggccctcgacggaagggatttcagttgaagaaggtctccgagcaggaaagccggagctgccaactctacaaagcgacctgtcctgcacgaatctacataaagaaagtgcagaaattccccgagtatcgggtgcctactgaccctaagatcgacaaaaagattattcgcatggagcaggaaaaggcctttaacatgctgaaaaagaacctggtggacgccgggggagtgctgaggtggtacgttcagctccctacacaacaggctcaccagtatcatgagttagaaaccccctgcctcaccctttcaccttccccgttcccggtgagttccctggaagaggaagaaaccgctgtgcgagacgaaaactgcgcattgccctctagactgcaccctcaggtcgctcacaagatccaggagttagtgagtcaaggtatcgagcaggtctacgcggttaggaagcaactgaggaagttcgtagagcgcgagttattcaaacccgatgaggtccctgagcgacacaatctgagtttctttccaactgttaacgacattaagaatcatattcacgaagtccagaaaagtctgaggaatggtgatacagtgtataattccgagatcatacctgcaacactccaatggacaaccgatagcggaaacatcctcaaagagaccatgaccgtaacgttcgccgaaggcaactcgccaggcgaatcaatcactacaaaggtcgaaacgaatcagaccaggggttccctcagtccagaacccactcacctcctctcatccctatcaagcttccagccgaaaattttcactcagctgcagggactccagctccagccccgttacaccagcccagacgagtcacccgccgtggttagcgtgaataatcagccgagttcatctccatccggcctgctagataccattggtagcgcggtgatgaataataatagcttgctcctgggacaaagtcactccttacagcgagatacttgccttacacagaataacagtacggctagcacaatgggcaacttgccagagcccgatcagaatctagtcgccatggacgagttagtggaggttggggacgtggaggacaccggcaacttagagggaaccgtccatcgcattctgctcggggatgtccagacaattccaatccaaatcatcgacaatcactctgctctcatagaggagaacccagagagcaccatcagtgtgtcacaggtgaaacaggagccaaaggaaccagccctgtccatggaagcaaagaagacggttgattataagaaactgtctgcaacatag

SEQ ID NO: 178933 - DNA, 165 bp, synthetic construct
  misc_feature 1..165: note = Description of Artificial Sequence: Synthetic coding sequence
  source 1..165: mol_type = other DNA
atggagcagagcaacgacagcctgcgggtgaaccacaacgacggcgaggagagtaagacatctgcacaagtatttgagcacctgatttgtatggactcgcgcgactcgagtttcggccagaacgattctcccacggtgctgcccataaccactagggaggcttag

SEQ ID NO: 178934 - DNA, 396 bp, synthetic construct
  misc_feature 1..396: note = Description of Artificial Sequence: Synthetic coding sequence
  source 1..396: mol_type = other DNA
atggagcagagcaacgacagcctgcgggtgaaccacaacgacggcgaagagagcaagactagcgcacaggtgttcgaacacctcatttgcatggattctagagacagttcatttggacagaacgattccccaacggtccttcccatcacaaccagagaggcaaacaattcactcataagccaaaacatccctgggccattgactcagacgcagacactgagcgctgaacagtttcacttggttgaccagaacgggcaggcgatacaatacgagctgcagagcttgggagagtctaatgcccagatgatgattgtggcgtcccccacggaaaatggtcaggtgctgcgcgtgattccgcccacacagacgggaatggcccaggtgattataccttag

SEQ ID NO: 178935 - DNA, 66 bp, synthetic construct
  misc_feature 1..66: note = Description of Artificial Sequence: Synthetic coding sequence
  source 1..66: mol_type = other DNA
atggagcagagcaacgacagcctgcgggtgaaccacaacgacggcgaggagagcaagacatcctag

SEQ ID NO: 178936 - DNA, 222 bp, synthetic construct
  misc_feature 1..222: note = Description of Artificial Sequence: Synthetic coding sequence
  source 1..222: mol_type = other DNA
atggagcagagcaacgacagcctgcgggtgaaccacaacgacggcgaggagtctaagactagcgctcaggtgtttgagcacctgatttgcatggactccagggacagctcttttggacaaaacgatagcccgactgtgttaccaataaccacgagagaggcaaacaattccctcatctcccagaatattcctggtcccttgacccaaacacagacactctag

SEQ ID NO: 178937 - DNA, 2178 bp, synthetic construct
  misc_feature 1..2178: note = Description of Artificial Sequence: Synthetic coding sequence
  source 1..2178: mol_type = other DNA
atggagcagagcaacgacagcctgcgggtgaaccacaacgacggcgaagagtcaaagacctccgcccaggttttcgagcatttgatttgtatggattcccgtgattctagctttggccagaacgacagtcccaccgttttgcctatcacgacccgagaggccaataatagcctaatcagtcagaacatacccggtcccctgacacagacccaaacgctgtctgcagagcagttccacctcgtagaccagaatgggcaggctattcagtatgaactgcagtcactgggtgaaagcaatgctcagatgatgatcgtggcctcgcccaccgaaaacggccaggtactgcgggtgatcccgccgacgcagaccggcatggctcaagtgattataccccagggccagctggtcgatgtgaactctcccagagatgttccagaggagaagccaagcaaccgcaatttgcccaccgtgcgcgtggatactctggcggacaatacatccaattatattctgcatcctcaaacctcttttcctttacccaaaaagtccgtgactggcatgcttgaggaaccgctcctagggccgctgcaacctttgagttcgaatacacccatatgggcctgcaggctgcgcagctgtgagaaaatcggcgactcatatagaggctactgtgtctctgagacagaactcgaaagcgtgctcaccttccataaacagcagacgcagtccgtgtggggtactcggcagtcgccttctccggccaagcccgctacacgtctcatgtggaagagccagtacgtcccttacgacggaatcccattcgtcaatgcgggcagcagagccgtagtgatggaatgccagtatggtccccgtcgaaaaggcttccagctgaagaaagtgtctgagcaggagtctaggtcgtgccaactttataaagctacgtgcccagccagaatatatattaaaaaggtgcaaaaattcccagagtaccgcgtccctacagatccaaaaatagataagaaaattattaggatggagcaggagaaagctttcaatatgctaaagaaaaatttggtggatgccggcggcgtcctgcggtggtatgtacaactccccacacagcaagcccaccagtaccatgagctggagactccctgcctaactctaagcccctccccctttcccgtgtcctcactggaggaggaagaaaccgcggttcgggacgaaaattgtgctcttccgagcagactgcaccctcaggttgcccataaaattcaagagctggtcagccaggggatcgagcaggtgtacgccgtaaggaagcagctgaggaagtttgtggagcgagagctgttcaaaccagatgaggtgccagagagacacaacctgagttttttcccaacagttaatgacataaagaaccacatccacgaagtacagaagagcctgcgaaacggcgacacagtgtacaatagcgagattatccccgcaacgttgcaatggactactgacagcggcaacatactgaaggagaccatgacggtaacgtttgctgagggtaactcccccggtgagtcaatcaccaccaaggttgagaccaaccaaactcgtggatctttaagtccagagcccacacacctactctcctcactatcgagctttcagcctaagattttcactcagcttcagggtctccagttgcaaccgcgctatacctctcccgacgaaagccccgccgtggtctccgttaataatcagccaagtagctccccatcaggcctgctggacaccataggaagcgctgtgatgaacaataatagccttctactgggacaatctcattctcttcagagagacacttgcctgacacagaataactccaccgcatccacgatgggcaatctgcccgagcccgaccagaatctggtcgctatggatgaacttgtagaagtgggggacgtggaggacactgggaacttggagggtacagtacatcgaattctgctgggagacgtgcaaacaattcccatccagatcatcgataaccactccgccctgattgaagagaatcccgagagcacaatctcagtaagtcaggtcaagcaggagcctaaagaacccgccttatccatggaggccaagaagacggtggactacaaaaagctctcagcaacttag

SEQ ID NO: 178938 - DNA, 222 bp, synthetic construct
  misc_feature 1..222: note = Description of Artificial Sequence: Synthetic coding sequence
  source 1..222: mol_type = other DNA
atggagcagagcaacgacagcctgcgggtgaaccacaacgacggcgaggagtccaagacctccgctcaggtctttgaacacctgatatgcatggacagtagggactccagttttgggcaaaatgatagtcctactgtacttccaatcactacacgggaagcaaacaatagcctgatatcacagaacattcctggcccactcacacagacacaaacgctttag

SEQ ID NO: 178939 - DNA, 288 bp, synthetic construct
  misc_feature 1..288: note = Description of Artificial Sequence: Synthetic coding sequence
  source 1..288: mol_type = other DNA
atggagcagagcaacgacagcctgcgggtgaaccacaacgacggcgaggagagcaagacaagcgcccaggtgttcgagcatctaatatgtatggattctagggattcctcgtttggccagaacgatagccctacagtgctccctattacaacgcgggaggctaacaacagcctcatttcccagaacatcccagggccactgacacagacgcagaccctgtcagctgagcagtttcacttggtggaccaaaatggccaggctatccaatacgagctacagtccctgtag

SEQ ID NO: 178940 - DNA, 624 bp, synthetic construct
  misc_feature 1..624: note = Description of Artificial Sequence: Synthetic coding sequence
  source 1..624: mol_type = other DNA
atgctggaggcctggaacctgaacctgagccactacctgaagcaccttatctgcatggatagccgtgattcctcctttgggcaaaatgacagccccaccgtgctgcccataacgactcgtgaggcaaacaacagcctgattagccagaacatacccggacccttaacccaaacccagacactgtctgccgaacagttccatctcgtcgatcagaatggacaagccatccagtatgagctgcagagcctaggagagtctaacgcccagatgatgattgtggcctctccaactgaaaacgggcaggttctgagggtcatccctccgactcagacaggcatggctcaagtcatcattccgcaggggcagctcgtggatgtgaacagtcccagggacgtacctgaggagaagccgagcaaccgtaatttaccgacagtacgcgtggatacccttgcggacaatacgtcaaactacatcctgcacccgcagacatccttccctcttcccaagaaaagcgtgaccggaatgctggaggaacccctactaggacccctgcagcctctatcttcaaacacccccatttgggcttgtaggctgcgaagctgtgagggagttgagctctggtag

SEQ ID NO: 178941 - DNA, 1914 bp, synthetic construct
  misc_feature 1..1914: note = Description of Artificial Sequence: Synthetic coding sequence
  source 1..1914: mol_type = other DNA
atgctggaggcctggaacctgaacctgagccactacctgaagatgatcgtggcatcccctactgagaacggtcaggtgcttcgggtgatccccccaactcagaccggcatggctcaggtgataatccctcaagggcagctcgtggatgtgaactctccccgcgacgtgccagaggagaaaccaagtaatcgcaaccttcccacggtacgggtagatacactggccgataatacgtcaaactatatcctccacccacagacatcctttcctctcccaaaaaaatcagtgactggcatgttggaggaacctttgctgggaccactgcaacccctatccagcaacacacccatttgggcttgtcgtttgagatcttgcgaaaagatcggcgattcctaccgggggtattgcgtgtctgaaacggagctagaaagcgttttgacctttcataagcagcagacacagtcagtatggggtacccgccaaagccctagtcctgccaagcctgccacacgtctgatgtggaagtcccagtacgtcccatatgacggcatacccttcgtgaacgcaggttcaagggccgtggttatggagtgtcagtacggtccacgcagaaaaggctttcagctcaaaaaggtatctgaacaggaaagccgttcctgccagctttacaaggcaacctgtcccgctaggatttatatcaagaaggtccaaaaattcccagaataccgtgtgccaacagacccaaagatcgataagaagattatccggatggaacaggagaaagctttcaacatgcttaagaaaaatctagttgatgccggcggggtcctgagatggtacgtacagctgccaacccagcaggctcaccagtaccacgagctggagaccccatgcctaaccctatctccaagcccgtttcccgtgtcttccctggaggaagaagagactgcagtcagggatgaaaactgtgcactgccgtccaggctgcatccccaggtagctcataagatccaagagctggtgagtcaggggatcgaacaggtgtacgcagttcgcaagcagctgcggaagttcgttgaacgggagctttttaagcctgatgaagttcctgaacgccacaacttgagtttttttcccactgtaaatgacatcaaaaatcacattcacgaagtccagaagagccttaggaatggtgacaccgtttacaacagcgagatcatcccggccactttgcagtggactactgactctgggaatatactcaaggagacgatgacggtgacattcgccgaaggaaacagcccaggcgaaagcattacaactaaggtggaaacaaaccagactagggggtctctctcaccagagcctactcatcttcttagctccttgtcttcattccaacctaagatcttcacacaattacagggactgcagctgcaaccccgctatacatctcctgatgagtctccagccgttgtgagcgtgaacaaccagccatcatcttccccgtcaggattgctggatacaatcggttccgcagtcatgaataataacagcctcctcctcggacagagccatagcttgcagcgggatacatgtctcacacagaacaacagtactgcaagtactatgggaaatttgcccgaaccggatcagaacctcgtcgctatggatgagctggtcgaagtcggcgatgttgaggacacggggaacctggaaggaacggtccaccgaattctgctcggggacgttcagactattcctatccagattatcgacaatcacagtgcattaatcgaggagaaccccgagtcgaccatctcagtaagccaagtcaaacaggagcccaaagaacccgctctgtccatggaagccaagaagacggtggattacaagaagctgtctgcaacgtag

SEQ ID NO: 178942 - DNA, 1950 bp, synthetic construct
  misc_feature 1..1950: note = Description of Artificial Sequence: Synthetic coding sequence
  source 1..1950: mol_type = other DNA
atggagcagagcaacgacagcctgcgggtgaaccacaacgacggcgaggaaagcaagactagtgctcaagtcttcgagatgatcgtggcttctcctactgagaacgggcaggtgcttagagtcataccccccacccagaccggtatggctcaggtgattatcccccaaggacagctggtggacgtcaactcacccagagacgtccccgaggagaaaccctcaaatagaaacttgccgacagttagagtcgacaccttggcagacaatacttccaactacattctgcacccacagacaagctttcctctgcccaaaaagtcggttaccggtatgctggaggaaccacttttgggaccactgcagccactgtctagtaataccccaatatgggcttgccgactcagaagttgcgagaaaattggagacagctaccgaggatactgtgtgagtgaaaccgaactggaatccgtccttacatttcacaagcagcagactcaaagcgtgtggggaactcgacagtctccatcgcccgccaaacctgccaccagattgatgtggaaaagtcagtacgtcccatatgacggaattccttttgtcaatgccggttccagagccgtggtgatggaatgtcagtatgggcccaggagaaagggatttcagctaaagaaggtgtcagagcaggagtccaggagttgccagttgtacaaggccacatgcccagcacgcatttacattaaaaaggttcagaagtttccagaatatcgggtgccgaccgatcccaagattgataaaaagattatccgtatggagcaggagaaagccttcaacatgttaaagaagaatctggtggatgcagggggcgttttgcggtggtatgttcagttaccaactcagcaggctcaccaatatcacgagctggagacaccttgcctaaccctgtcaccaagtccgttccccgtgagttctctcgaggaggaagagacagccgtgcgtgatgagaattgcgctctgcccagccggctccaccctcaggttgcgcataagatccaagagttagtctcacagggcatcgagcaggtgtacgccgttagaaagcagttgcggaaattcgtggagcgcgagttgttcaaacccgatgaggtgccggaacggcacaacctgagtttctttcctaccgtgaatgacattaaaaaccatatacatgaggtgcagaagtccctccgaaatggggacacggtctataactcagaaatcattccggccacattgcaatggaccaccgattccggtaacattctgaaggagacaatgactgtaacattcgctgaggggaacagtcccggcgagagcatcaccaccaaggtggagactaatcagacccgaggctcgttgtctcctgaacccactcacttgctctcgagcctgtcgtcttttcagcccaagatttttacccagttacaggggcttcaactgcagccaagatacacttcccccgatgagtcccccgccgtggtatctgtcaataaccagccttcctcctctccttccggcctgcttgatactattggatccgccgtcatgaacaataatagtctactgctgggacaatcccattctctgcaacgtgatacatgtctgacacagaataattcaaccgcatcgactatggggaatctgccagagccagatcagaacctcgtagctatggacgagttagttgaagtgggagacgtagaggatactgggaacctggaggggactgtgcacaggatcctcctcggcgatgtgcagacaattccaatacagatcatagataatcatagtgctttgatcgaggagaaccccgaatctaccatatccgtgagccaggttaagcaagaacccaaagagcctgcactcagtatggaggctaagaaaaccgtggactacaaaaaactgtccgcgacctag

SEQ ID NO: 178943 - DNA, 558 bp, synthetic construct
  misc_feature 1..558: note = Description of Artificial Sequence: Synthetic coding sequence
  source 1..558: mol_type = other DNA
atgaccacccccaacaagaccccccccggcgccgaccccaagcagttagagcggaccgggaccgtacgcgagatcggtagtcaggccgtttggtcacttagctcgtgtaagccaggctttggggtggatcagctgcgggacgacaaccttgaaacatactggcagagcgatggctctcagccccacttggtgaatatccagtttcgtaggaaaacaactgtcaaaacactctgtatttatgccgactataagtctgacgaaagctacacgcccagcaagattagcgtgagagttggcaacaacttccataatcttcaagaaatcagacagctggagctggtcgagcctagtggatggatccacgtgccacttacggataatcacaagaagccaaccagaaccttcatgatccaaatcgccgtcctggctaatcatcaaaacggacgagacacacatatgagacagattaaaatatataccccagtggaagaaagtagtatcggcaagttcccgcggtgtaccacaatcgatttcatgatgtatcgctcaatccgctag

SEQ ID NO: 178944 - DNA, 558 bp, synthetic construct
  misc_feature 1..558: note = Description of Artificial Sequence: Synthetic coding sequence
  source 1..558: mol_type = other DNA
atgaccacccccaacaagaccccccccggcgccgaccccaagcagcttgaacgtactgggacagtccgggagattggctctcaggccgtgtggagcctgagtagctgcaagccaggcttcggggtggaccagctgcgagatgacaacctcgaaacctattggcaaagtgatggatctcaacctcacctcgtgaacatacagttcaggcggaagaccaccgtcaagactttgtgcatctacgccgattacaaatccgacgagtcatacacacctagcaaaatcagcgtgagggttggaaataacttccacaatttacaggaaatccggcagctggaattggtcgaaccgtccggctggatccacgttccccttaccgacaatcataagaagcctactcgcaccttcatgattcagatcgccgtgctggccaaccaccagaacggtagggatacccacatgcggcagataaaaatttacacacctgttgaggagagtagcatcggcaagttcccacgctgcacgaccattgattttatgatgtacagatcaatacgttag

SEQ ID NO: 178945 - DNA, 207 bp, synthetic construct
  misc_feature 1..207: note = Description of Artificial Sequence: Synthetic coding sequence
  source 1..207: mol_type = other DNA
atgaccacccccaacaagaccccccccggcgccgaccccaagcagttggagaggacgggaacagtgagggaaattggaagccaggctgtgtggagcctgtcttcatgcaagcctggattcggcgtcgaccaactccgcgatgataacctggagacatattggcagagcgacgggtcacaacctcacctagtgaacatccaattctag

SEQ ID NO: 178946 - DNA, 330 bp, synthetic construct
  misc_feature 1..330: note = Description of Artificial Sequence: Synthetic coding sequence
  source 1..330: mol_type = other DNA
atgaccacccccaacaagaccccccccggcgccgaccccaagcagctggagaggaccgggaccgtccgagagatagggtcccaggccgtgtggagcctaagctcctgtaaaccaggcttcggagtcgaccagctcagggacgataatctggagacttattggcagagcgatggcagccaaccccacctggtgaacatccagttccggaggaagacaaccgtgaaaaccctgtgtatctatgctgactacaagagtgacgagtcttatactccatctaagattagcgttagagttggaaataacttccacaacctccaggagatcagatag

SEQ ID NO: 178947 - DNA, 558 bp, synthetic construct
  misc_feature 1..558: note = Description of Artificial Sequence: Synthetic coding sequence
  source 1..558: mol_type = other DNA
atgaccacccccaacaagaccccccccggcgccgaccccaagcagcttgaacggacagggaccgttcgggagatcggatcgcaggctgtctggagcctgagctcttgtaagccgggtttcggcgttgaccaactgagggacgacaatctggagacttattggcagagcgacgggtctcagcctcacctggtcaacatacaattccgccggaaaactactgtcaagaccctgtgcatttatgcagattacaagagcgacgagtcctacaccccgtccaagatatcagtacgcgtggggaataattttcacaatttgcaggagatccggcagctcgaactggtggagccctccggttggatccatgtcccgctaacggataatcataagaagcccacccggaccttcatgattcagatcgctgttctcgccaatcaccagaacggaagagacacccacatgcggcaaatcaagatctacaccccagtggaagaaagctccatcgggaagttcccccgctgtaccacaatcgacttcatgatgtaccgttctatcaggtag

SEQ ID NO: 178948 - DNA, 477 bp, synthetic construct
  misc_feature 1..477: note = Description of Artificial Sequence: Synthetic coding sequence
  source 1..477: mol_type = other DNA
atgaccacccccaacaagaccccccccggcgccgaccccaagcagcttgagcggactggcaccgtgcgtgaaatcggctctcaggctgtgtggagcctgagctcctgtaaaccaggattcggtgttgaccagctgcgcgatgataatctagaaacttactggcagagcgacgggagtcaaccccatctggtcaacattcagtttcgaagaaagacaacagttaagaccctgtgcatttatgcggattataaatctgacgaatcctacacaccatctaaaatcagtgtgcgcgtagggaataatttccacaacctccaggagatacgccagctggaattagtggagccgagcgggtggattcacgtgccactaactgacaaccacaagaagcctacccggactttcatgatccaaatcgcagtcttggcaaatcaccagaacggccgcgacacgcatatgaggcaaattaagatttag

SEQ ID NO: 178949 - DNA, 477 bp, synthetic construct
  misc_feature 1..477: note = Description of Artificial Sequence: Synthetic coding sequence
  source 1..477: mol_type = other DNA
atgaccacccccaacaagaccccccccggcgccgaccccaagcagcttgagagaacaggcactgtgcgtgagataggctcccaagccgtttggtccctgtccagctgtaaaccaggctttggagtggatcagcttcgcgacgataaccttgagacttattggcagtccgacgggtcccaaccacatttggtgaacattcagttcagaagaaaaactactgttaagaccctttgcatctatgctgactacaaaagcgacgagtcctacaccccttccaaaataagcgtcagagtgggaaacaactttcacaacctgcaagaaatcagacagctcgagctggtggagccgagcggctggatccatgtgcctcttacagacaatcataagaaaccaacccgtacattcatgatccagatcgctgtgcttgcaaaccaccagaacgggcgagatacgcacatgcggcagataaagatatag

SEQ ID NO: 178950 - DNA, 333 bp, synthetic construct
  misc_feature 1..333: note = Description of Artificial Sequence: Synthetic coding sequence
  source 1..333: mol_type = other DNA
atggccgccagcagcagcagcagcagcgccggcggcgtgagcggcagctctgtcactggttcaggattctcagtgtccgatctcgcccctcccaggaaagctctctttacctatcccaagggcgcaggtgaaatgctggaagatggaagcgagaggttcctatgtgaatcagtgtttagctaccaggtggcatctactctcaaacaggtgaaacacgaccagcaggtggcccggatggagaagctggctggactggtggaagagttggaagcagacgagtggaggtttaagccgatagaacaactcctgggtttcacgcctagtagcgggtag

SEQ ID NO: 178951 - DNA, 2427 bp, synthetic construct
  misc_feature 1..2427: note = Description of Artificial Sequence: Synthetic coding sequence
  source 1..2427: mol_type = other DNA
atgctgcggttccccacctgcttccccagcttccgggtggtgggcgagaaacagcttccccaggagatcatctttctcgtatggtctccaaaacgggatcttattgctcttgcaaatacggccggggaagtgctgttgcatcggctggcgagtttccaccgagtttggtcattccccccaaatgaaaatacgggaaaagaggttacctgcctggcctggagacctgatggcaagttactcgctttcgcgctcgcagatacaaagaagattgtgctatgcgacgtggagaaaccggaaagtctgcactccttctcagtggaagcccctgtgagctgcatgcactggatggaggtgacagtcgaaagcagtgtgctcacttcattttataacgccgaagacgagagtaacctgttgctgccaaagctccccacactgcctaagaattactccaacaccagtaagatctttagcgaggaaaactccgacgaaattatcaaactgcttggggatgtaaggctgaatatcttagttctcgggggcagcagcgggtttatcgagctgtacgcctacggcatgtttaagatcgctagagtcacaggcattgctggcacttgtctggctctgtgcctgtcgtctgatttgaaaagtttatcagtggtcactgaggtgagcaccaatggcgccagtgaagtgtcctactttcagttggaaaccaatttgctttattcattcttaccagaagtcacaaggatggccaggaagtttacccacatctcagcactgctgcagtatattaacctatcccttacgtgcatgtgcgaagcctgggaagaaatactcatgcagatggatagccgcttgactaaatttgtgcaagagaagaatacaactacatccgtccaggatgagtttatgcacctcctgctctggggcaaggcctccgccgagctgcaaacactattgatgaatcaactgaccgtgaaaggactgaagaagcttgggcagtctatcgagtcttcctatagttctatccagaagctagtgatctcccatttgcagtcaggatctgagtctttactttatcacctgtccgagctgaagggaatggcttcgtggaaacagaagtacgaacctctcggtctggacgctgccggcatcgaggaagcaattacagctgtgggctcctttatcttgaaggccaacgagttgctccaggtgattgatagctccatgaagaatttcaaagcattctttagatggttgtacgtcgctatgctgcgcatgactgaagatcatgttcttccagagttgaataagatgacacagaaagatatcaccttcgttgccgaatttcttactgaacatttcaacgaggctccagacctgtataacagaaagggtaagtacttcaatgtcgagcgcgtcgggcagtatctgaaggatgaggatgatgacctggtctctccccctaatactgagggcaatcaatggtatgacttcctgcagaacagtagccatttgaaagaatcgccccttctgtttccttattacccgagaaaaagcctgcacttcgtgaagagacggatggagaacattatcgaccagtgtctgcagaagcccgccgatgtcattgggaagtctatgaaccaggcaatatgtattcccctgtacagagatacacgttccgaagactctacccgtagacttttcaagttcccatttctttggaacaacaaaacttccaacctccattacctgctgtttacaatcctggaggatagcttgtacaagatgtgtatactgagacgccacacagatatctcccagagcgtctcaaatggactcatcgctataaagttcggatccttcacatacgcaactaccgaaaaagtgcgacggtccatttactcgtgcttggacgctcagttttatgacgatgagactgtcaccgttgtgcttaaggacactgtggggagagaaggacgtgataggctcctcgtgcaactaccactgagcctcgtgtacaactccgaagattccgctgagtatcaattcacagggacatatagcacgaggctcgacgagcagtgctccgctattcctaccagaacaatgcatttcgagaaacattggaggctgctggaatctatgaaagcccaatatgttgccggcaacggcttccgcaaggttagctgcgtgctctcctcaaacttacgacacgttcgcgtgtttgaaatggatatcgacgacgagtgggagcttgacgaatcttccgacgaagaagaggaagccagtaacaagcccgtcaaaatcaaggaagaggtgttgtctgagagcgaggccgagaatcagcaggccggtgccgccgctctggcccccgaaattgtcattaaagtggaaaagctggaccccgagcttgactcatag

SEQ ID NO: 178952 - DNA, 489 bp, synthetic construct
  misc_feature 1..489: note = Description of Artificial Sequence: Synthetic coding sequence
  source 1..489: mol_type = other DNA
atgctgcggttccccacctgcttccccagcttccgggtggtgggcgaaaagcaactcccccaggaaattattttcctggtctggtcgcccaaacgggatctcatcgccctggccaacaccgcaggggaggtgctgctccaccgactggcctcattccatagggtgtggtccttcccgcctaatgagaacacaggcaaagaggtcacttgcctggcttggagaccagacgggaaactcctggcctttgctctcgctgatactaagaaaattgtgctttgcgacgtggaaaagccagagtcgctccactcctttagtgttgaggcgcctgtgtcatgtatgcactggatggaagttacggtcgaaagctcagttcttacttctttctataatgccgaagacgagagcaacctgcttttgcctaaattaccaacactaccaaagaattatagcaacacatcgaagattttttccgaggagaactcagactag

SEQ ID NO: 178953 - DNA, 2430 bp, synthetic construct
  misc_feature 1..2430: note = Description of Artificial Sequence: Synthetic coding sequence
  source 1..2430: mol_type = other DNA
atgctgcggttccccacctgcttccccagcttccgggtggtgggcgaaaaacagttgccccaagaaatcatttttcttgtgtggagccctaagcgggacctgatcgccctggccaacactgctggcgaggtgctgctgcatagacttgcttcctttcacagagtgtggagcttccctcccaacgaaaatacggggaaagaggtcacttgtctggcctggagacctgacggtaagcttctggccttcgccctggcggatacaaaaaagatcgtactgtgtgatgtggagaagcccgagtcgctccactctttttctgttgaggctcctgtcagctgtatgcactggatggaggtgacagtcgaatcaagcgttttgaccagcttttataacgctgaggacgagtcgaacctcctgctgcccaagctccctactctgccgaaaaattattccaatacttcgaagatcttctctgaagagaactcagacgagattatcaagctgttaggggatgtccggttgaatattctggtcctcgggggctcgtcaggcttcatagaactgtatgcctatggcatgtttaagattgctcgcgtgactggtatcgctggaacctgcctggcgctatgtttgtcatccgatctgaagtcgctgtccgtggtgactgaagttagcaccaacggggcaagcgaagtgagttactttcagctagaaaccaatctcttgtattcatttttgcccgaggttactcgtatggctcggaagtttacacatatctccgccttgctgcagtacatcaaccttagtttaacttgtatgtgtgaggcctgggaagagattttgatgcagatggactctcgcctgaccaaatttgtccaggagaagaataccaccacatccgttcaagatgaatttatgcacctcctgctgtggggtaaggcctccgccgaacttcaaacactcctcatgaaccaactgaccgttaaggggttgaagaaactggggcagagtatcgaatcctcctactcctccatccagaagttggtaatttcgcacctccagagcggttcggagtctcttctgtatcacctctccgaattgaagggcatggcctcttggaagcagaagtacgaacctctggggcttgacgcagccggcatagaagaggcaatcacagctgtcggatcattcatcttgaaggccaatgagctcttgcaggtcattgattcatccatgaaaaattttaaggccttcttcagatggctgtacgtggccatgctgagaatgaccgaagatcatgtcttgcctgagttaaataaagtgatgacacagaaagatattacgttcgtggccgagttcttgaccgagcactttaatgaagccccagacctctacaacagaaagggcaagtatttcaatgttgaacgagtgggtcagtacctcaaagacgaggatgatgacctggtgagcccccccaatacggagggaaaccagtggtatgattttttgcagaactcatcccatctcaaagaaagccctttactgttcccgtattacccacgaaagtccctacactttgtcaaacgccgcatggagaatataatagatcagtgcctgcaaaaaccagcagacgtgatcgggaagtctatgaaccaggcaatctgcattcccctgtaccgggacacgagaagtgaggatagcacacgacgccttttcaaattccctttcttatggaataataaaacaagcaacctgcattacctcctgtttaccatcctcgaggattccctttataagatgtgtatcctacggcgtcacactgacatcagccagagcgttagtaacggactcatcgcaataaaattcggttccttcacttatgcaacgacggagaaagtgcggcggagtatttacagctgtttagatgctcagttttatgacgatgaaacagtcaccgtagtgttaaaagacaccgtgggccgagagggtcgggacagactgctcgttcagctgccacttagtcttgtttacaatagtgaagactctgccgagtatcagttcactggcacttatagcactagactcgacgagcagtgctccgcgatcccgacgcgtactatgcattttgaaaagcactggagacttctggagtcaatgaaggctcagtacgttgcgggcaacggtttccggaaggtctcttgcgtactgtcctcgaacttgagacacgtgcgggtgttcgagatggatatcgatgatgagtgggaattggatgaatccagcgatgaggaagaagaggccagcaataagcctgtaaagatcaaggaggaggtgctgtctgagtcagaggccgaaaatcagcaagccggggctgctgctctggctccggagattgtcatcaaggtggagaagctcgacccggagctcgacagctag

SEQ ID NO: 178954 - DNA, 2268 bp, synthetic construct
  misc_feature 1..2268: note = Description of Artificial Sequence: Synthetic coding sequence
  source 1..2268: mol_type = other DNA
atggccagcgtgcacgagagcctgtacttcaaccccatgatgaccaatggcgtggtgcatgccaatgtgttcgggatcaaggactgggtgactccgtacaagatcgctgttctggtgctgctgaatgagatgtcacgcactggtgaaggcgccgtcagccttatggaacgccgcagactgaaccagctacttttgccgctactgcaaggccctgacattacccttagcaagctgtacaaacttatagaggagagctgccctcagctggccaatagtgtccagattcgaatcaagttaatggccgagggagagttgaaggatatggagcagtttttcgatgacctgtctgattcattctctggcactgagccagaggtgcataagacgagcgtggttggcctttttctcagacacatgattctggcttattctaaactgtctttttctcaggtgtttaaactgtacacagccctgcagcagtacttccagaacggcgaaaagaagaccgtcgaggatgcagatatggagctgacatcccgcgacgaaggtgagagaaagatggagaaggaagagctagacgtgtccgttagagaggaggaagtgagctgcagcggcccccttagccagaagcaggctgaattttttctctcgcagcaggcatccctgctgaagaatgacgaaacaaaggctctgacaccagcttccttacaaaaagagctgaataatctactgaagttcaacccagactttgctgaggcccactacctttcttacctcaacaatcttcgagtacaagatgtgtttagtagtacccattccctgcttcactatttcgaccgactgattctgacaggggccgagtctaagagcaacggggaggaaggatacggaagaagcttgcggtacgccgctttaaacctggccgcactacactgccgatttggacattatcagcaggcagagctcgccttacaggaagccatccggattgcgcaagagagcaatgatcacgtatgtttgcagcactgtctgtcctggctgtacgtactcggacagaaaagaagcgattcctacgtactgctcgagcattccgtgaaaaaagccgtgcatttcggactcccctacctggcctcccttggcatccagtctctcgttcagcagcgggccttcgctggcaagacggcgaacaaacttatggatgcacttaaggactcagatctgctgcactggaaacacagcctgtcagagctaatagacatcagcatcgcccaaaaaaccgcaatatggagactgtatggacgatcgactatggcgctgcaacaggcacagatgctgttgagcatgaatagcctcgaggcagtcaatgcaggcgttcaacagaataacaccgagtcttttgcggtcgcactgtgccatttggctgagctgcacgcggaacagggctgtttcgccgcagcctccgaggtccttaagcacctgaaagaaaggtttccccccaacagccaacacgcccaactgtggatgttgtgtgatcagaaaatccagtttgatagggcaatgaacgatggaaagtaccatttggccgactctctagtcaccggcattaccgccctaaacagtattgaaggggtctaccgcaaagccgtagtgcttcaggctcaaaatcagatgtctgaagctcataaactcctgcagaaacttttggtccactgccagaagctgaagaataccgagatggttatcagcgtgctgcttagcgtggcagaattgtactggcgatctagttccccaacgatcgccctgccaatgcttctccaggccctggctcttagcaaggaataccgactgcagtatctcgcgagtgaaacagtgttaaacctggccttcgcccagcttattctgggcattccagaacaggcgctgtcactcctgcatatggccattgaacctatcctggcagacggtgctatcctggacaaaggccgcgcgatgtttctggtggccaagtgccaggtggctagtgcagcttcatacgaccagcctaaaaaagctgaggctctagaagcggccatcgagaatctgaacgaagcgaaaaactatttcgcgaaggtggattgtaaggaaaggattcgggacgtagtctactttcaggcaaggctttaccacaccctcggaaaaacacaagagagaaatcggtgtgcgatgctattccgccaattacaccaggaactcccatcacatggagtgccattaataaatcatctctag

SEQ ID NO: 178955 - DNA, 1932 bp, synthetic construct
  misc_feature 1..1932: note = Description of Artificial Sequence: Synthetic coding sequence
  source 1..1932: mol_type = other DNA
atggccgagggcgagctgaaggacatggagcagttcttcgacgacctgagtgactctttttcaggaaccgaacctgaagtgcacaagacgagcgtggtgggtctgtttctccgtcacatgatacttgcttacagcaagctttctttctcccaggtcttcaaactgtacactgccttgcaacagtactttcaaaacggggagaagaagaccgttgaggatgccgacatggaacttacctcaagggacgaaggagaacgcaaaatggaaaaggaagaactcgatgtgtctgtgagggaggaggaagtgagctgctcgggtcctctctcccaaaagcaggctgaattctttctctcacaacaagcatccctactaaagaatgacgagacaaaggcccttactccagccagccttcaaaaggaactcaataatttacttaaatttaaccctgatttcgctgaagcccactacctgtcctatctgaacaacctgcgcgttcaggacgtcttctcctcaactcacagcttgctgcattactttgacagactgattctgactggcgcagagtccaaaagcaacggagaggaaggctatggcagatcgctcagatacgccgcactcaacttggcggccttgcactgtcggtttggccactatcagcaggcggagctggccttacaggaagccatcaggattgctcaggagtccaacgatcacgtgtgtcttcagcattgcttgagttggctctatgtactgggccagaagcgctctgattcttacgtactactggaacactctgtaaagaaagcagtccacttcgggttgccgagggcctttgccggcaaaaccgccaataagctgatggacgctctgaaggactctgacctgctgcactggaaacacagtctcagcgaactgatcgatatttcaatcgcacagaaaaccgccatttggaggctgtatgggagatctacaatggcactgcagcaggctcagatgctcctgtccatgaacagcctagaagccgtcaacgccggcgtccagcagaacaatacagagagcttcgctgtcgcactctgtcatctcgcagagctgcacgctgagcagggatgcttcgccgctgctagcgaggtgctgaagcatttgaaggagcggtttccccccaactcccagcacgcccaactgtggatgctttgcgatcaaaagattcagtttgacagagcaatgaatgacgggaagtatcacctagccgattctttagtcacgggcattactgctcttaactccattgagggtgtgtaccgtaaggctgtcgtgctgcaagctcagaaccagatgtcggaagcacataagttactccagaaacttctggttcattgtcaaaaattaaaaaatactgagatggtgattagtgtgctcctgagtgtggccgagctgtactggagaagcagctctcccaccatagcgcttcctatgctgctgcaggctctggctttgagcaaggaatacaggctgcagtacctggctagtgaaactgtgttgaacctcgcatttgcacagctaattctgggcatccccgaacaggcattgtccctgctgcatatggctattgagccaatcttggccgatggagcaattctggacaaggggagagcaatgtttctagtggctaaatgccaggttgccagcgctgcttcctatgatcagccaaaaaaagctgaagccctcgaggccgctatcgagaacctgaacgaggctaaaaattacttcgccaaggttgactgtaaggaaaggataagagacgtcgtttattttcaagctcgactgtaccacacccttggcaagactcaggaacgaaacagatgcgctatgctgttccggcagttgcaccaagaactgcctagccatggagtccctttgatcaaccatctttag

SEQ ID NO: 178956 - DNA, 1932 bp, synthetic construct
  misc_feature 1..1932: note = Description of Artificial Sequence: Synthetic coding sequence
  source 1..1932: mol_type = other DNA
atggccgagggcgagctgaaggacatggagcagttcttcgacgacctgtctgacagctttagcgggacggagccagaggtacataaaacatctgtggtcgggttatttctgcgccatatgattctggcatactccaagcttagcttttcccaagttttcaaactatatacggcgctgcagcaatatttccaaaacggagaaaaaaagactgtcgaggatgccgacatggagctgacatcccgcgacgaaggagaaaggaaaatggagaaggaggagctggacgtttcagttcgggaggaggaagtaagctgttccgggcccctgtcccagaaacaggccgagttcttcctgagccagcaggccagccttcttaaaaacgacgagacgaaggcccttacccccgccagtcttcagaaggaactcaataacttgctaaagttcaacccagattttgcagaggcgcactatctctcttatctgaataatttgcgggtccaggatgtgttttcaagtacccacagcttgctgcattacttcgatagactgattctgactggggctgaatcaaagtcaaacggcgaagagggatatggcagatccttgcgctacgcagctctgaatttagctgccttacattgtagatttggtcactaccagcaggctgaattagctctccaagaagccatccggatcgcacaagagagcaatgatcacgtctgtctgcagcattgtctcagctggctgtatgtgctgggacaaaaaaggtccgattcatacgtgctcctggagcatagtgtgaagaaggccgttcattttgggctcccgagagcctttgccggaaaaactgccaataaactcatggacgcccttaaagattccgacctgctacactggaaacattccctctcagaattgattgatatcagcatagctcagaagacagccatttggcgcctgtatggccgatccactatggccctgcaacaagcccagatgcttttatccatgaactccctggaggccgtgaatgccggtgtgcaacaaaataacacagaatcatttgccgtggctctgtgccaccttgccgagctgcacgccgagcaaggctgcttcgcggcagcctccgaggttttgaagcatctcaaagaacgctttccacccaattcccagcacgcccagctctggatgctgtgtgatcagaagattcaatttgacagagccatgaatgacggaaagtaccacctggcggactccttggttacagggatcactgccctgaactccatcgaaggggtgtatcggaaagccgtcgtgctccaggcccagaatcaaatgtccgaagcccataagctgctccaaaagctgttagttcattgtcagaagctcaaaaataccgagatggtaatcagcgtcttgttgtccgtcgctgaactgtactggcggagctcctccccaactatcgctctgcccatgctgcttcaggctctggcgctttcaaaggagtatagattgcagtatctggcctctgagaccgtgctgaaccttgccttcgcccagctgatcctgggtatccccgaacaggctttgagccttctccatatggcaatagaaccaatccttgccgacggtgctatcttggataagggcagggccatgttcctcgtggcaaagtgtcaggtggcaagtgctgctagctacgatcagcccaagaaagccgaggccctggaggccgccattgagaatctgaacgaggcaaaaaattattttgccaaggtggactgcaaagaacgcatcagagatgtggtatatttccaggctaggttgtaccacactttaggaaagacccaagaacggaatcggtgtgcaatgctctttcgccaactccatcaggaattgccgagtcacggagttccgctgattaaccacctgtag

SEQ ID NO: 178957 - DNA, 660 bp, synthetic construct
  misc_feature 1..660: note = Description of Artificial Sequence: Synthetic coding sequence
  source 1..660: mol_type = other DNA
atgctgagcccctgcctgagcagctacttcgtgggcctgttcctgagacatatgatactggcttactcgaaattgagtttctcccaggttttcaagctgtacaccgcgttgcagcagtattttcaaaacggtgagaagaaaacggttgaggacgccgatatggagctgacctcaagagacgagggggagaggaagatggaaaaagaggagcttgacgtatcagtgagggaagaagaagtgtcctgctccgggccgctttcccagaaacaagctgaattctttttgtctcagcaggcctcgcttctgaaaaatgatgagacgaaagccttaaccccagccagtctgcagaaggaacttaataatctcttgaagttcaaccccgactttgctgaggcacactatctttcctaccttaacaacttgagggtgcaagatgtgttttcttccacccactcacttctccactactttgacaggttgatactgacgggggctgagtccaaatcaaatggtgaggaagggtatgggcggtcccttcgctacgcagccttgaacctggccgctctccattgccgcttcgggcattacacaagtcctccttgggagtattccccactttttaatcgagagctgctcctcggacgacgccagacttcctag

SEQ ID NO: 178958 - DNA, 135 bp, synthetic construct
  misc_feature 1..135: note = Description of Artificial Sequence: Synthetic coding sequence
  source 1..135: mol_type = other DNA
atggccgagggcgagctgaaggacatggagcagttcttcgacgacctgtccgatagcttctcggggactgagcccgaggtccacaagacttcagtcgttggtctctttctcagacacatgatcctggcatattag

SEQ ID NO: 178959 - DNA, 1074 bp, synthetic construct
  misc_feature 1..1074: note = Description of Artificial Sequence: Synthetic coding sequence
  source 1..1074: mol_type = other DNA
atggacgccctgaaggacagcgacctgctgcactggaagcacagcctaagtgagctgatagacatcagtatagctcagaaaactgcaatttggcgcctatacggcaggtctacaatggccttgcaacaggcccagatgttgctcagtatgaactctctggaggcagtcaacgcaggagtgcaacaaaacaacacggagagcttcgcagtcgcgctctgtcatctggccgaactccacgcggaacaaggttgtttcgccgccgcaagcgaggtgctcaagcacctcaaggagcgttttcctccaaactcccagcatgcgcagctgtggatgctctgcgatcaaaagatccagtttgatagagcaatgaatgacggaaaataccatctggccgactcactggtaaccggcatcacagccctcaattctatcgagggcgtctacaggaaggcggtcgtgctgcaggcacagaaccagatgtccgaagcacacaagctccttcagaaactgctcgttcactgtcagaagctgaaaaacaccgagatggtaatttcagtgttgctcagtgtcgcagagctctattggcgaagtagcagccctaccattgcactacctatgctgctgcaggccctagccctgtcgaaagagtatcgtctgcaatatctggccagcgaaaccgtactgaacctcgcctttgcccagctgattctggggataccggagcaggctctgtctttgctgcacatggccattgaaccgattctggcggacggggccattcttgacaaaggcagggcaatgttccttgtcgctaagtgccaggtggcttcagctgctagttacgatcaacctaagaaggcagaagctttagaggcagccattgagaacctgaatgaagcaaagaattatttcgccaaggtagactgtaaagagcggatacgggacgtagtctactttcaggcacggctgtatcacacactgggcaaaacccaggaacgaaataggtgtgctatgttatttcgacagctgcaccaggagctgccatcacacggcgtcccactgattaatcatttatag

SEQ ID NO: 178960 - DNA, 2229 bp, synthetic construct
  misc_feature 1..2229: note = Description of Artificial Sequence: Synthetic coding sequence
  source 1..2229: mol_type = other DNA
atggccagcgtgcacgagagcctgtacttcaaccccatgatgaccaatggagtggtccacgcaaatgtattcggaattaaggactgggttacaccttacaaaattgccgtcctcgtactcctgaatgagatgtcccgcaccggcgaaggggcagtgagcctgatggagaggaggcgccttaatcagttgctactcccactactacaagggcctgatatcaccctctctaagctgtataaattgatagaagaatcatgtccacaactggcgaattccgtacagatccgcatcaagctgatggcggaaggggaactcaaggacatggaacagttctttgacgacctctctgactccttttcgggaaccgaaccagaagtccacaagacctctgtggtcggcctgttcctccgccatatgattctggcatactccaaactttctttttcccaggtcttcaaactgtacacagcactgcaacagtatttccaaaacggagagaagaagactgtcgaggacgcagatatggagctgacatctagagacgaaggggagaggaaaatggagaaggaagaactggacgtcagcgttcgggaagaggaagtgtcttgcagcggtccgttgagccaaaaacaggctgagttttttctttctcagcaggccagtttgcttaagaacgacgaaaccaaggccctgacccctgcctcactccagaaggagctgaacaatttgctaaaattcaaccccgattttgcggaggctcactatctatcctatctaaacaacctgcgcgtacaggatgtcttctcttctacccattcactgttacactatttcgacagactgatcctcaccggggctgaatctaagtcaaatggcgaagaaggctacggacggtctttaagatatgccgccctgaacctggccgcccttcactgccggtttgggcactaccaacaggctgaattggcgctccaagaggccatcaggattgcccaagagtctaacgatcacgtgtgcttgcaacattgcttatcatggctgtatgtgctagggcaaaagcggtccgattcctatgtactcttggagcacagtgttaagaaagccgttcatttcgggctgccaagggcctttgctggcaaaaccgccaataaattaatggatgcccttaaagattctgacctacttcactggaaacactctttgtctgagcttattgacatttccatagcccagaagacagccatttggcgcctctacggacgttcaaccatggctctgcagcaagcccagatgcttctgtcaatgaacagcctcgaggccgtcaatgccggcgtgcaacaaaataatacggagtctttcgctgtggctttatgtcaccttgctgagttacacgctgaacaaggatgcttcgctgccgcgtccgaagtgctgaagcacctcaaggagcgctttcctccaaattctcaacatgcgcagctttggatgttatgcgaccagaagatccaattcgatcgggctatgaatgacggaaaataccatctggccgattcactcgtcaccgggatcaccgcgcttaattctatcgaaggagtgtacaggaaagccgtagtgctccaggcccaaaaccagatgtctgaggctcacaaattactccagaaattactcgtgcactgccagaagctgaagaacactgaaatggtgattagcgttttgctatccgtggcagaattgtactggcggtcttccagtcccacgattgccttgccgatgctacttcaggctttagcactgagcaaagagtacaggctgcagtacttggcttccgaaacggttctgaacttggcttttgcccaactgatactgggcatcccagaacaggccttaagcctgttgcatatggccatcgaacccatcctggcagacggggcaattcttgacaagggcagggcaatgttcctggtggccaagtgtcaggtcgctagtgccgcgtcttatgaccaaccaaagaaggctgaagctctggaggccgccattgaaaacctgaatgaagccaaaaattattttgccaaagttgattgcaaagaaaggatcagagatgtggtgtattttcaggcccggttgtatcacaccttaggtaagacacaggaacggaaccgatgtgccatgctctttcgacaactgcatcaggagctcccatcacatggggtccctctcataaaccacctctag

SEQ ID NO: 178961 - DNA, 1425 bp, synthetic construct
  misc_feature 1..1425: note = Description of Artificial Sequence: Synthetic coding sequence
  source 1..1425: mol_type = other DNA
atggagctgcccagcggccccggccccgagcggctgttcgacagccatagactgccaggcgattgcttcctgttgctagtgctgctcttgtatgcaccagtaggattctgcctgctggttttgagattatttctaggcatccatgtgtttctggtctcttgtgctctccctgactctgtgctgaggaggtttgtggtgcgaactatgtgtgcggttctgggactagttgcaaggcaagaagacagtggcctgcgggaccactctgtgagagtgcttatttcaaaccacgttaccccatttgaccacaacattgttaacttgctgacgacttgctcgaccgtgagtgaatcagaagcagagtctgctacgggcagatttccaggagcccagcttaaggccccactgtctcctctcgcttttccgatggaagatactgaactgcccctcacccccatactatacccgacttgccagtttttctttattttcctcaacatctttctgctggcatttagttcccccggctcccagcccctgctcaacagccccccatcgttcgtgtgttggtcccgagggtttatggagatgaatggacggggagagcttgttgaatccctgaaacgcttttgcgccagcacacgtctgccaccgacccctctgctcctttttccagaggaggaggccaccaacgggcgggaaggcctattgcggtttagttcctggccattttctatccaggatgtagtacagccgctgaccctgcaagtgcagcgacctttagtctctgtcactgtctcagatgcttcctgggtttctgaactgttgtggtcgctgttcgttcccttcaccgtgtaccaagtgagatggctccgacccgtgcacagacaactgggcgaagctaacgaggaatttgccctcagagtacagcagctggtcgcgaaagagttaggccagacaggaactagactcacacctgccgacaaggccgagcacatgaagagacaacgtcatccccgactgagaccccaatctgcacaatcttcctttcccccctcccctggcccctccccagacgtacagttggctactctcgctcagcgcgtaaaagaggtattaccacacgtgccactgggagtgattcagagggacctggccaaaactggatgtgtggatttgacgattaccaacttgctcgaaggtgccgtagcgttcatgccagaggatatcaccaagggaacgcagtctctgcccaccgcaagtgctagtaagtttccctcatcggggcccgtcacaccccagcccaccgctctgaccttcgccaagagttcttgggcccgccaagaatcactccaggaacgcaagcaggcactctacgaatacgctagaaggaggtttaccgaaagaagggcccaagaagctgactag

SEQ ID NO: 178962 - DNA, 1233 bp, synthetic construct
  misc_feature 1..1233: note = Description of Artificial Sequence: Synthetic coding sequence
  source 1..1233: mol_type = other DNA
atggagctgcccagcggccccggccccgagcggctgttcgacagccatcgccttcccggcgactgctttcttctcctggttttgcttctttacgcgcctgttggcttctgcttgcttgtgctgcggctgttcctagggatccatgtctttctggttagttgcgcgctcccggattcggtgcttaggaggtttgtggttcgtactatgtgtgcagtgctgggactggtagctcgacaggaggacagcgggctcagagaccactccgtgcgagtattgatttcaaaccacgttaccccatttgaccataacatcgtcaacctcctgacgacatgttccacgcctctgctgaactcccctccgagtttcgtatgttggagtaggggatttatggaaatgaacggaagaggagagttggtcgaaagtctgaagcgcttctgtgcatctactcgcctaccccccacccctctgctgctattccctgaggaagaggcaaccaacgggagagaagggctcttacgtttttcctcatggccttttagtatccaggatgtcgtgcagcccctgacgctccaggtgcagaggcccttggtgtctgttactgtgagcgacgcatcctgggtgtccgaacttctgtggtcgctctttgttcctttcaccgtgtaccaagttcggtggctgcgccctgtccacagacaattaggcgaggctaacgaggaattcgcacttagagtccagcagctggttgctaaagagttgggtcaaacaggcactaggctcacccctgccgacaaagcagagcacatgaagaggcagaggcatccccgtctacggccccaaagtgctcagagctctttccctccatctccaggtccatctccagacgttcaactggcgaccctggctcaaagagtaaaagaggtcctgccacacgtgccactcggcgtgatccaaagagacttggctaagaccggctgcgtcgatctcaccatcactaacctcctggaaggagctgtcgcttttatgccggaggacatcactaagggcactcagtccctcccgaccgcgtctgcttccaagtttccatctagtgggcccgtcacaccacagccaaccgccttaacattcgcaaaatctagctgggccaggcaggaatcactgcaggagaggaagcaagctttgtacgagtatgcaagaaggagatttacagagcggcgcgcccaggaagccgattag

SEQ ID NO: 178963 - DNA, 1128 bp, synthetic construct
  misc_feature 1..1128: note = Description of Artificial Sequence: Synthetic coding sequence
  source 1..1128: mol_type = other DNA
atggagctgcccagcggccccggccccgagcggctgttcgacagccaccgcctcccaggcgattgctttttgctgctcgtattgctcctctatgcgcccgttgggttttgcctgttggtgctaaggctgtttttagggattcacgtgtttctggtttcctgcgccttgcctgacagtgttctgaggcggttccggtttgtggtgagaaccatgtgcgccgttctgggcctcgtggccaggcaggaggactcgggccttcgggatcacagcgtaagggtgctgatctcaaatcacgtgaccccttttgatcacaatattgtgaacttgcttactacttgcagcaccccactgctgaattcgccccctagctttgtgtgctggagcaggggattcatggaaatgaatggacgcggtgagctggttgaatctctgaagagattttgcgccagcacacggcttcctccaactccactgctgttattccctgaagaggaggccacaaatggccgcgagggattactgagattctcttcttggcctttttcgatccaagacgtcgtccaaccactgacgctgcaggtccagcggcctctggtgagcgtgactgtaagtgacgcctcatgggtcagcgaactcctgtggtcattgtttgtaccttttaccgtgtaccaggtgcggtggttgcggcccgtgcatcgccaacttggagaggcgaatgaggaattcgcactgcgtgttcagcagctggttgctaaagagttaggccaaacaggaactcggttgacccccgctgacaaagccgagcatatgaaaaggcagcgacaccctaggctgcggccccaatctgcccagagctccttcccaccaagtccgggaccttcgcccgatgtgcagctcgcaaccctggcccaaagagtgaaggaagtgctgccgcatgtgcctctgggagtgattcagagagaccttgcgaagaccggatgtgtcgacctcacaattaccaatctgctggagggtgctgtggctttcatgcctgaggacattacgaagggaactcaaagtctccccaccgcgtcagccagcaaggccttcgatgcatgtctgatgatgatgacaccccaagccctgtag

SEQ ID NO: 178964 - DNA, 2145 bp, synthetic construct
  misc_feature 1..2145: note = Description of Artificial Sequence: Synthetic coding sequence
  source 1..2145: mol_type = other DNA
atggccagcgaggcccccagccccccccggagcccccccccccccacaagcccagagccagagctggcgcagctgcgccgcaaggtagaaaagcttgagcgagaactaaggtcgtgcaaaagacaggtacgcgaaattgagaaattgctgcaccacactgagcggctctaccagaatgccgagtcgaataatcaggagctgcggacccaggtcgaagagctgagcaagattctgcagcgcgggcgtaatgaggacaacaaaaagtccgatgtagaggttcagacagagaatcacgctccatggagcatatcagattatttttaccaaacgtactacaacgacgtcagcctgcctaataaggtgacagagctgtcagaccaacaggatcaagctattgaaacttcaatattgaactcaaaggaccatctgcaggtcgagaatgatgcatacccaggtactgaccgcaccgaaaacgtaaaatatcgacaagttgatcatttcgcctctaacagccaggagcccgcttctgccctcgctaccgaggacacatctctggagggttcctcacttgccgagtctctccgtgcagcagcagaagctgcagtgtcccaaacagggtttagctacgatgagaatactggcctgtacttcgatcactcaacaggcttctattatgattccgagaaccagctgtattatgacccctccaccggaatctactactactgcgacgttgaatctgggcgctaccagtttcactcccgcgtggacctccaaccgtatcctacatcctccactaagcagagcaaggacaaaaagctaaagaaaaagcgcaaggaccccgattctagtgcgaccaacgaggagaaggatctcaactctgaagaccagaaggccttttcagttgagcacacttcctgtaatgaagaggaaaatttcgcaaatatgaagaagaaggcgaaaattggcatccaccacaagaatagccctcccaaggtcaccgttcccacaagcgggaacaccattgagtcgccgctgcatgaaaacatcagcaattcaacatccttcaaggatgaaaaaatcatggaaaccgactcggagccagaagagggcgaaattaccgactcccaaaccgaggattcctacgacgaggcaatcacctccgaggggaacgttaccgccgaggactcagaagacgaggacgaggataagatctggcccccttgcatacgggtgattgtgatccgttctcctgtactgcagatcgggtcactttttataatcacagcggtgaatcctgccaccatcggacgagagaaggacatggagcataccctgaggatccctgaagtgggggtgtccaaattccacgcagagatttactttgaccacgatctccagtcttacgtcctcgtggatcagggctcccagaatggaactatcgtgaacggaaagcagatattacagccgaagacaaagtgtgacccatacgtgttggagcacggagatgaggttaagattggagagactgtgctttcattccatattcatcctggcagtgatacatgtgacggttgtgagcccggtcaggtgcgagcccacctaaggctagataaaaaggacgaatcgtttgtgggacccaccttgtccaaagaagaaaaggagctggaaaggcgcaaagaactgaagaaaatcagagttaagtacggcttgcaaaacacagaatacgaagacgagaagacgcttaagaacccaaaatacaaagatcgtgctggaaagcggcgcgaacaggtcgggagtgaaggtactttccagcgcgatgacgcccctgcaagtgtacattccgaaatcacagattccaataaaggccgtaagatgttggagaagatggggtggaaaaagggcgagggccttggcaaggatggaggtggaatgaagactcctatccagcttcagttgcggaggactcatgcaggcctcgggaccggtaagccaagctcatttgaagacgtgcacttgctgcagaacaagaataaaaagaactgggataaggcacgagagagattcactgaaaactttccagaaacgaaaccccaaaaagacgatcctgggactatgccatgggttaaagggactttggaatag

SEQ ID NO: 178965 - DNA, 531 bp, synthetic construct
  misc_feature 1..531: note = Description of Artificial Sequence: Synthetic coding sequence
  source 1..531: mol_type = other DNA
atggccagcgaggcccccagccccccccggagcccccccccccccacgtccccggaacccgagctggcacagttacgccgcaaggtagaaaagttggaacgcgagttgcgatcctgtaagcggcaagttcgagaaatcgaaaagcttcttcatcacactgagcgcctttaccagaatgccgaatccaacaaccaggaacttcgaacacaggttgaagaactatccaaaatcctgcagcggggtagaaatgaagacaacaagaagtctgatgtcgaagttcagaccgaaaatcatgccccttggagtattagtgactacttttaccagacatactataacgatgtgagcttaccaaacaaagtgactgagctgagcgaccaacaggatcaggctatagagacttctatccttaacagtaaggatcatcttcaagttgagaacgatgcatatcctggcactgacagaacagaaaatgttaaatatcgccaggttgaccacttcgctagcaattcacaggtgatcaagtgttag

SEQ ID NO: 178966 - DNA, 2028 bp, synthetic construct
  misc_feature 1..2028: note = Description of Artificial Sequence: Synthetic coding sequence
  source 1..2028: mol_type = other DNA
atgccccgggcccagcccagcagcgccagctaccagcccgtgcccgcagatccttttgccatcgtgtctagggcccagcaaatggtcgagatcctgtccgatgaaaacaggaatctgagacaggaactggagggctgctatgagaaggtagccagactgcagaaagtcgagactgagatccagagagttagcgaggcgtacgaaaacctggtgaaatctagtagcaagagagaggccctagagaaagcaatgcgaaacaagcttgaaggcgagatccgtcgcatgcatgactttaaccgcgatctaagggagcgactggagaccgcaaacaagcagctggccgagaaggagtacgagggatcagaagatacccggaagacaattagccaactgttcgccaaaaacaaggaatcacagagagagaaggagaaactggaggctgagctggccacagcaaggtccaccaacgaggaccagaggcgtcacatagaaattagagatcaagcgcttagcaacgctcaggctaaggttgtgaaactcgaagaagagcttaagaagaagcaggtgtatgttgacaaggtggagaagatgcagcaggcgttagtgcagctgcaagccgcctgcgaaaagagagagcaactcgaacataggctccggacccggctagagagagagttggaaagcctgaggatccagcagcggcagggaaattgtcaacccactaacgtgagcgaatacaatgccgcagccttaatggagctccttagagaaaaagaagagcggattcttgctcttgaagcagacatgaccaagtgggaacagaaatatctggaagaaaacgttatgcgtcatttcgcactggatgcagccgctaccgttgccgcacagagagacaccactgtgatctcccactcccctaatacatcttatgatacagccctggaagcccgcatacaaaaggaggaggaagagatacttatggctaacaaacggtgtctcgatatggaaggccgtattaagacactacacgctcaaatcattgagaaggacgctatgattaaggtgctgcaacaaagaagtaggaaggaacccagcaagacagagcagctgagctgcatgagacctgccaagtctctgatgtcaatcagcaatgccgggagtgggcttctgtcccacagtagcaccttgaccggttctccaattatggaagaaaaaagggacgacaaatcctggaaaggaagccttggaatcctcctcgggggggattatagagctgagtatgtccctagtactcctagccccgtgccgccctctactcccctcttaagcgcccattccaagactggtagcagggattgttccacccagactgaacgcggaaccgaaagtaataagacagcagcggtggctccaatctctgtccctgccccggttgccgccgccgccaccgccgcagccatcaccgccacagcagctaccattaccacaactatggtggccgcagcacctgttgctgtagctgcagctgcagctccggctgcagctgccgcaccctctcccgccaccgccgccgccacagccgccgctgtttcccccgctgctgccggccagatacctgcagctgcctcagtggcctccgccgccgccgtggctccctcggctgccgccgcagctgcagtgcaggtagcccctgccgcgcctgccccagtgcctgcacctgctctggtgcctgtcccggcgcctgcggcagctcaggcatcagctcctgcccaaacacaggctcccacgagcgcccctgccgtcgcacccacgccagcgcctaccccaactcctgcggtggcacaggccgaggtgccggcatctcctgctaccggaccaggcccccacagacttagtatcccttcgctgacctgcaatcccgacaagaccgacgggccagtctttcattcaaataccctggaaagaaagacacctatccagatcttaggccaagagccagacgccgagatggttgagtacctgatttag

SEQ ID NO: 178967 - DNA, 1794 bp, synthetic construct
  misc_feature 1..1794: note = Description of Artificial Sequence: Synthetic coding sequence
  source 1..1794: mol_type = other DNA
atggagcaccggggccccccccccgagtaccccttcaagggcatgccgccacaaagtgtggtatgtaagccccaagagccggggcacttctacagcgagcaccgactgaaccaaccagggcgtacagaaggacagttaatgcggtaccagcatccgcctgaatatggcgctgccagacctgcccaggacattagcctcccactctctgcccggaactctcagcctcattctccgacatctagcctgactagcgggggatctcttccactgttgcagtctcctccctctacacgtttgtccccagccaggcatcccctggtccctaatcaaggggaccactcagcccacttacctcggccccagcaacatttcctgcccaaccaagcacatcagggcgatcattaccgcctaagccagcctgggctgagccagcagcaacagcagcagcagcagcagcaccaccaccatcatcatcaccagcagcagcagcaacaacagccacagcagcagccgggggaggcatactcagctatgccacgggcacagcccagtagcgcctcataccagcccgttcccgctgatcccttcgccattgtctcgcgtgcacaacagatggtggagatcctgagcgatgaaaacaggaacctcaggcaggagcttgagggttgttacgagaaggtggcaaggttgcagaaggttgaaacagaaattcagagagtcagcgaggcgtatgagaacctagttaagtcatcaagtaagagggaggccctcgagaaagccatgcgaaataaacttgagggagagataagacgaatgcatgactttaatcgggacttgcgggaacgtctcgaaactgcaaataagcaactggcggagaaagaatatgaaggctctgaggataccaggaagactatcagccagctgttcgcaaaaaataaggagtcccagcgggaaaaagagaagctggaggccgagctggccacagctcggagcaccaacgaagatcagcggcggcatattgagattagggaccaggctctctccaacgcacaggccaaggttgtcaaactcgaggaagaattaaaaaagaagcaggtctatgtggacaaggttgaaaaaatgcagcaggcccttgtgcagcttcaggccgcctgtgaaaaacgggaacaactcgaacataggctgcggacacggctggagcgcgaactggaaagccttcgcatccagcagaggcaggggaattgccagcctaccaatgtgagcgagtacaatgccgcagccctcatggagctactgcgggagaaggaagagcgaatcctcgcactggaagccgacatgacaaagtgggagcagaagtatctggaggagaatgttatgaggcatttcgccctggacgcggccgccaccgtggccgcgcagcgggacaccactgtgatcagtcattctccaaacacctcctatgataccgccctggaggccagaattcaaaaagaggaggaggaaatactaatggccaataaacgctgtctcgatatggaggggaggattaagacgctgcacgctcagataatcgaaaaggacgctatgatcaaggtcctgcagcaacgctcgcggaaggaacctagcaaaactgaacagctctcatgtatgcgacccgccaagtctctgatgtctatttctaacgccgggtctgggcttctgtcacactcctctaccctgaccggaagccccatcatggaggaaaagagagacgataagtcttggaaaggaagcctgggaaacgactccaaatag

SEQ ID NO: 178968 - DNA, 3255 bp, synthetic construct
  misc_feature 1..3255: note = Description of Artificial Sequence: Synthetic coding sequence
  source 1..3255: mol_type = other DNA
atgcggaacagcgaggagcagcccagcggcggcaccaccgtgctgcaacgactgctccaggagcagctcagatacgggaatccgtccgaaaaccggagtctgcttgccattcatcagcaagctactgggaatggtcccccttttccaagtggctccggcaacccgggtccacagtctgacgtgttgagccctcaggatcatcaccaacaactggtggcacatgctgctaggcaggaacctcagggacaagagattcagagcgaaaatctgatcatggagaaacagctgtccccaagaatgcagaacaacgaggagctccccacctatgaggaggctaaagtgcagtctcagtattttcgcggacagcagcacgctagcgtcggcgccgcattctacgttaccggcgtcaccaatcagaaaatgcggacagagggaaggccttcagttcaaaggctgaatccaggtaagatgcatcaggacgaaggactgagagatctgaagcagggccatgtacgatctcttagtgaacgcctaatgcagatgtccctcgccactagcggcgtcaaggctcacccacctgtcacctcggctcctctctcccctccccagcctaacgatctgtataagaacccaacgagttcatcggagttctacaaagcccagggaccactccccaatcagcatagtctgaaaggcatggaacataggggtcctccacccgagtatccctttaagggaatgccaccccagtcagtagtgtgcaaaccccaggagcccgggcatttctattcagagcataggcttaatcagccaggcaggaccgagggccaattgatgcgttaccagcaccccccagaatacggagccgcccgcccagctcaggacatttcactgccactgagcgccagaaactctcagccccatagcccaacaagctccctcacaagtgggggcagcttacccctgcttcaatcgccacccagtactagacttagccctgctcgccatcctcttgtgccgaaccagggcgatcattcagcgcacctaccacgacctcaacagcattttttgcccaaccaagcacaccagggagatcactatcggctatcacaacccggtctgagccagcagcagcagcagcagcagcagcagcaccaccaccaccaccaccatcaacagcaacaacagcagcagcctcagcagcagccaggagaggcttactccgctatgccccgggcccagccatcctccgcctcttatcagcccgttccagctgacccttttgcaattgtgtcccgcgctcaacagatggtggaaattctctcggacgaaaatagaaatctgcgtcaggaactggagggctgctatgagaaagtagcaaggctgcaaaaggtcgagaccgagatccagcgggtatctgaagcttacgagaatctcgtgaaatcaagttcaaaacgcgaggctctcgaaaaggccatgaggaacaagcttgaaggggagattaggagaatgcatgactttaaccgtgacctgcgcgaacggctcgaaaccgctaacaagcagcttgcagagaaggaatacgagggcagcgaagacaccaggaagactatcagtcagctgttcgccaaaaacaaagagtctcagcgcgaaaaagagaaattggaagccgagcttgcgacagcccggagcacgaacgaggatcagcgtaggcacatcgagatccgggatcaggccctgagcaatgcccaagcaaaggtcgtgaaattggaagaggagctgaaaaaaaaacaggtctatgtcgacaaagtggaaaagatgcagcaagctctggtgcagttacaggcagcctgcgagaaaagggaacagcttgagcaccgcttgagaactcgcctcgaacgagaattggagagcctgcgtatacaacagaggcagggaaactgtcagcctaccaatgtgagcgaatataacgcagcagcactcatggagctgcttcgcgagaaagaagagagaattctcgctctggaggcagacatgaccaagtgggaacagaaatatctggaggagaacgttatgcggcatttcgcccttgatgcagcggcgactgtggcagctcagagagacactactgtgattagccatagccctaatacaagctatgatacagcattggaagctcgaatacagaaggaagaggaggaaatcctcatggcaaacaaaagatgcctggacatggaagggcggatcaaaacacttcacgcccagataattgagaaggatgccatgatcaaggtgctacaacagaggagtaggaaggagccttcaaaaacagagcagctgtcttgcatgcggcccgcaaagagtctgatgtctatttctaacgctggcagcgggctgctatcccactcaagcacgctgactgggtctcccatcatggaggaaaagagagacgacaaaagttggaaaggatccctagggatccttcttggtggcgattacagagcggaatatgtgcccagcaccccgagccctgtgcctccctccactccactgctttctgctcacagtaagaccggctctcgggactgttccacccagacagagcgaggaaccgagtctaacaagactgccgccgtcgcccctatctccgttcccgcaccagtggccgccgcagccacagctgctgccataactgccaccgccgctaccatcaccacgacaatggtggccgccgcaccagtggcagtggctgcagcagcagcccccgcagccgcggctgcaccctcccccgccactgccgccgcaaccgctgccgccgtgtcacctgctgctgccggccagattcccgctgctgcatcagtagcttccgccgcggccgtagccccctccgccgctgctgcagctgctgttcaggtggccccagccgcacctgcccccgtgccggctcctgcattagtgcctgtgccggccccagctgcggcacaagccagcgctcccgcccagacccaggcacctacttccgctcctgcagtagcaccaactcctgcgcctacaccgactcctgctgtggctcaggctgaggtgcctgctagccctgccaccggcccgggaccacacagactgtcaattccctctcttacttgtaatcccgataaaacggacgggcccgttttccactccaacacgctggagcgaaaaactccgatccaaattttgggacaggagccagacgctgaaatggttgaatatcttatctag

SEQ ID NO: 178969 - DNA, 2559 bp, synthetic construct
  misc_feature 1..2559: note = Description of Artificial Sequence: Synthetic coding sequence
  source 1..2559: mol_type = other DNA
atggagcaccggggccccccccccgagtaccccttcaagggcatgccaccacagagcgttgtctgcaagcctcaggagccagggcacttctacagcgaacacagacttaatcaacccggcagaaccgaggggcaactgatgcggtaccagcacccacctgagtacggagcagctaggccagcgcaggacatctctctgcccttatcagcacgcaacagtcaaccccattctccaacttcatccctcacgtcaggtggctctctgccattgttgcaaagcccaccctcaactagattgtccccagcccgccacccactcgtcccaaatcaaggtgaccactccgctcatctgcccaggccacagcaacacttccttccaaaccaggctcaccagggggatcactataggctgagtcaacctggccttagccagcagcagcagcagcagcaacaacagcaccaccatcatcatcaccatcaacagcagcagcagcagcaaccacagcagcagcccggtgaggcctacagcgccatgcccagggcccagcctagcagtgcaagttatcagcccgtccccgccgatccgtttgccatcgtgagccgtgcccagcagatggtcgagattctgtccgacgaaaatcgcaatctgcgccaggagctcgagggttgctacgagaaggtggcccgcttacagaaggtggaaacagaaattcagagggtgtcggaagcgtatgagaatcttgtgaagtcttccagtaagagagaggcgcttgagaaggcgatgcggaataagctcgagggcgaaattcgccgcatgcatgatttcaatagagacctgagggagcggttagagaccgcaaacaagcaacttgccgagaaggagtatgagggcagtgaggatactcgcaaaacgattagccagctctttgcaaaaaataaggaatcccaaagagaaaaggagaaactggaggcagaacttgcaaccgcaaggtctaccaatgaagaccagcggcggcatatcgaaataagggaccaggctcttagtaatgctcaggcaaaagtcgtgaaactggaagaggagctgaaaaagaagcaagtctacgtcgacaaagtggagaagatgcaacaagcgctcgttcagctgcaggccgcctgtgaaaagagagagcagctggaacaccgcttgcggacaagactcgagcgggagttggaatcccttaggatccagcagcgacagggtaattgtcaacccactaacgtgagtgagtacaacgcggctgcactcatggagcttctgcgagaaaaggaggagagaattttggccctggaggccgacatgaccaagtgggagcagaagtatttagaagaaaacgtcatgcgacatttcgctctggacgcagcagccacggttgccgcccaacgagacaccaccgtgatctcacactcacctaacacctcctacgacaccgcacttgaagcacggattcagaaggaagaggaggaaatactaatggccaacaagaggtgtttggacatggagggaaggatcaagacccttcatgctcaaattattgagaaagatgccatgataaaggtgttacagcaacggagccgcaaagagccctctaaaacagaacaactttcctgtatgcgcccagccaagtcccttatgtctatatcgaatgccggctctggtcttttatcacattcaagcactcttactggtagcccaatcatggaggagaaaagagatgacaagtcctggaagggctcacttggtatcctgcttggtggagattatcgcgcagaatacgtgccgtctacaccctcccccgtcccgccaagtactcctctcctctcggcccatagtaaaactggctccagggattgctcaacacagactgaacgcgggaccgaatcaaataagaccgctgctgtggcccccatctccgttccggcccccgtggcggcagccgccactgccgcggccatcacggctaccgctgcaaccataacaacaacaatggtcgcagctgcgcccgtggcagtggcggctgctgctgctcctgccgcggcagcagccccttccccagccacagcggcagccactgcagccgcagtctctccggccgcggccggacagatccctgccgccgcaagtgtggcctcagctgcggccgttgcaccatcagccgcggctgccgcagccgtccaggttgcgccagccgcccccgccccagtgcctgccccggccctggtgcccgtgccggccccagccgccgcccaggcctctgcccccgcacaaactcaggcaccaacgagtgcgccagccgtagcgcccacacctgcgcccacccctacccctgctgtggcacaagctgaagtccccgccagtccagccaccggtccaggcccccatcggctatccatcccttcacttacttgcaaccccgacaaaacagacggcccagtatttcactctaacactcttgaacggaagacacccatccagattctcggccaggagcccgatgctgagatggtcgagtacctaatctag

SEQ ID NO: 178970 - DNA, 549 bp, synthetic construct
  misc_feature 1..549: note = Description of Artificial Sequence: Synthetic coding sequence
  source 1..549: mol_type = other DNA
atgatcaaggtgctgcagcagcggagccggaaggagcccagcaagacggagcaattatcttgtatgcgccccgccaagtctttgatgtcaatttctaatgctggcagcgggttgctgtcccactcaagcactttgaccggctcccctattatggaggagaaaagagatgataaaagttggaagggatcactgggtatcctgctggggggggactaccgcgctgagtatgtgccgtccacacctagcccagttccgccatccacccccttgctgtccgctcactctaaaactggatcacgcgattgtagcacacagacagagcgaggcaccgagagcaataagacagcagcggtcgctcccatatcagtaccagcccctgtggctgccgccgcaaccgcggcagcaatcacagcgactgctgcaaccattacaactaccatggctgctgcagcagcaccaagtccggcaacagccgctgcaactgctgctgcagtctccccagctgcggctggccagatccctgcagccgcttccgtcgcaagcgcctag

SEQ ID NO: 178971 - DNA, 3255 bp, synthetic construct
  misc_feature 1..3255: note = Description of Artificial Sequence: Synthetic coding sequence
  source 1..3255: mol_type = other DNA
atgcggaacagcgaggagcagcccagcggcggcaccaccgtgctgcagcgtttgctgcaagagcagttaaggtatggcaatccttctgagaatcggtccttactggctattcaccaacaagccaccggtaatggacccccattcccctcaggctccggtaaccccggaccgcagtcagacgtgttgagccctcaggaccaccatcagcagctggtggcgcacgccgctagacaagaacctcaagggcaggaaattcagtccgagaatctgataatggagaaacaactgtcccccaggatgcagaacaacgaggagctccctacctacgaagaggccaaagtccaaagtcaatatttccggggccagcagcatgcctctgtcggcgccgccttttacgtgaccggcgtgacaaatcagaagatgcgcacagaaggccgccccagcgtgcagcgcctcaatcccggtaaaatgcatcaggatgaaggtcttagggacctgaaacagggccacgtaagatctctctccgagaggctcatgcaaatgtcacttgccacatctggtgtcaaagcacacccccctgtcacttccgcacccctgagcccgcctcaacctaatgacctgtacaagaacccaaccagcagttctgagttctacaaggcacagggaccactccctaatcagcactctctgaaaggcatggaacaccggggaccacccccagagtacccgttcaaaggtatgcccccacagtcagttgtatgcaaaccccaggagccgggacatttctattctgagcatagacttaatcaacctgggcggacagaaggacagttaatgagatatcagcacccccccgagtacggcgcggcccgccctgcccaggacatttcacttcccctttccgcgcgaaacagccaacctcattcccccacgagtagcctgacaagcggtggatccctgccacttttgcaaagcccaccatctacccgcctgtcccccgcaaggcaccccctggtccctaatcagggcgaccacagcgcgcacctgccccgcccacaacaacactttctacctaaccaggcccatcaaggggatcattacaggctttctcagccaggactgagtcagcaacaacagcagcagcagcagcagcaccatcaccaccatcaccaccagcagcagcagcagcaacagccacaacaacagcctggcgaggcctactctgcaatgcctcgggctcagccctcaagcgcaagctatcaacccgtccccgcagacccgttcgccatagttagtcgggctcaacagatggtcgaaatcctttctgacgagaacaggaacttacggcaagagctggaggggtgttatgagaaagttgccagattgcagaaagttgagactgagatccaaagagtgtcagaggcttacgagaatcttgtgaaatcctctagcaagagagaggcactggaaaaggcaatgcggaataaactggagggggagattaggcgcatgcacgacttcaaccgcgacctgagggagcgattggaaaccgccaacaagcagttggctgaaaaggagtacgaaggttcagaagatacgaggaagaccataagtcagctttttgccaagaataaagagagccagagggagaaagagaagcttgaagccgaactggccacagcacgcagtacgaacgaggatcagagacgacatatcgagatacgcgaccaagctctgagcaatgcccaggccaaagtcgtcaaattggaagaagaactaaagaagaagcaggtgtatgtggataaagtggaaaagatgcagcaggctctcgtgcagctacaagctgcctgcgagaagcgtgagcaactggagcaccgccttagaacacggctggagcgcgagttggagtccctgaggatccagcagaggcagggtaactgtcaacccactaatgtaagcgagtacaatgcagctgctttaatggagcttctgcgggagaaggaagagcggatcctggccctagaggccgatatgactaagtgggagcaaaaatatcttgaagagaatgtcatgcgacatttcgcactggacgccgcagctacagttgccgcacaacgggatacaacggtgattagccatagtcctaacacaagctacgacacagcactcgaagctaggatccagaaagaagaagaagagatccttatggcgaacaagcgatgcctcgacatggagggaaggattaaaaccttgcacgctcagattatcgagaaagatgccatgataaaagtactccagcagcggtcccgcaaagagcctagcaaaaccgagcagttgtcgtgcatgaggcccgccaagtccctgatgtctatatctaacgccggaagcgggctcctgagccattcaagcacattaaccgggagccccataatggaagagaaaagggatgacaagagttggaaaggcagtctgggtattttgcttggtggtgattacagggccgaatacgtgccatcaacaccctctccggtgcctccctccacaccactccttagcgcacacagcaagaccggctcccgagactgtagcacccaaacagaacgaggtaccgaatcaaacaaaaccgctgcagtggccccgatcagcgtgcctgccccagtcgctgccgctgccactgccgccgctattacggctacagccgcaacgatcacaaccactatggttgccgctgccccagtcgctgtggccgcagctgccgcaccagccgccgcggctgctcccagcccagctactgccgccgccacagccgctgcagtctcacctgccgccgccggtcagatcccagcggccgcttctgttgcgtcggcagccgccgttgctccatcagcagctgctgcagccgctgtgcaggtcgccccagcagctcccgcccctgtgcccgccccggctttggtgcccgtgcctgctcctgccgcagctcaggcttcggctccagcccagacacaggccccaacttcggcccctgcagtggcgcccactcctgcaccaactcctactccggccgtggcccaggcagaagtgcccgcatctccggcaaccggtccaggcccccaccgactttccataccctctctgacatgtaatcccgacaagacagatggaccagttttccactccaacactctggagcggaagaccccaattcagattctcggccaggaaccagacgccgaaatggtggaatacctgatatag

SEQ ID NO: 178972 - DNA, 1512 bp, synthetic construct
  misc_feature 1..1512: note = Description of Artificial Sequence: Synthetic coding sequence
  source 1..1512: mol_type = other DNA
atgctgagccagctggccatgctgcagggcagcctgctgctggtggttgctactatgtctgtcgctcagcagacaaggcaggaagctgataggggctgtgagaccctcgtggtgcagcacggccactgtagttatacttttctgctgccgaagtccgagccatgccctccgggccccgaggtatctcgggactccaatactctgcagcgtgaatccctggctaaccccttgcatttgggaaagctgcccacccagcaggtcaagcagttagagcaagctctccagaataacacgcaatggctgaagaagctcgagcgagctataaaaaccatactgagaagcaagcttgagcaagtccagcagcagatggctcagaaccagaccgctcccatgttagagctcggaacatctctgctgaaccagacaactgcacagattcgcaagttgacagacatggaggcccagctgctaaaccagacctccagaatggacgctcaaatgcccgaaacattcctgagcacaaacaagctggagaatcaattgctgctccagcggcagaagctacaacagctgcaaggacaaaacagcgcactcgaaaaacggctgcaggccttggagaccaaacaacaggaagagctggcctctattttgtccaagaaggctaaactgttgaacaccctctcacgccaatctgcggctcttaccaacatagaaagggggttgcggggagtacggcacaatagctcgctgctccaggaccaacaacattccctgcgtcagctgcttgtcttacttaggcacctggtccaagagagggccaatgcctccgctcccgcattcattatggctggagagcaggtatttcaagattgcgccgagatccagcgaagcggcgcttccgcatcgggagtctacacaatacaggtctctaatgctacaaaaccaagaaaggtcttctgcgatctccagagcagcggcgggcggtggactttaattcagaggcgggagaatggcactgtgaacttccagcgaaattggaaagactacaagcagggtttcggagatcctgcaggcgagcactggttgggcaacgaggtcgtccatcagctgactagacgcgccgcttactctctacgtgtagaactccaggattgggaaggacatgaggcctacgctcagtacgaacactttcatctcgggagcgagaaccagttgtaccgtctgtccgtagtagggtacagcgggtcagcaggacgccagagctccttagttttgcagaacacctccttttctactctggattcagataacgaccattgcctttgcaaatgcgcccaggtgatgtctggaggctggtggttcgacgcatgtggtctcagcaatttaaacggggtgtactatcacgctcccgacaataagtacaaaatggatggcattcggtggcactactttaagggtccttcttatagcctccgagccagtaggatgatgatcagacctctcgatatctag

SEQ ID NO: 178973 - DNA, 1233 bp, synthetic construct
  misc_feature 1..1233: note = Description of Artificial Sequence: Synthetic coding sequence
  source 1..1233: mol_type = other DNA
atgctgagccagctggccatgctgcagggcagcctgctgctggtggtggcaactatgtccgtcgcccagcaaaccagacaggaagctgatcgcggatgcgagacattagtggtgcagcatgggcactgcagctatacattcctgcttcccaagtctgaaccatgcccccctgggcctgaggtgagtagggatagcaacacattgcagagagaaagtctcgcgaatcccctccatctcggaaagctacctactcagcaggtgaagcagcttgaacaagctctccagaacaatacccagtggctgaagaagctggagagagccatcaagacgatactgcgcagcaagctcgaacaggtccaacagcaaatggctcaaaaccagaccgccccaatgctggaactgggtaccagtctgctaaatcagactactgcacaaatcaggaagctaactgacatggaggcacagctcctgaatcagaccagccggatggatgctcaaatgcctgaaaccttcctgtcgacaaataagctagagaatcagttactgctgcagcgccagaagctgcagcagttgcagggacaaaattccgccctcgagaaaaggctgcaagcgttagaaaccaaacaacaagaggaactcgcaagcattctctccaagaaagctaaactcctgaacacgctcagccggcaatctgccgccctcacaaacattgagcggggactgcgcggcgtacggcataactccagcctcttgcaagatcagcagcacagcctgaggcagttactcgttctgttgcgccatttggttcaggaaagggccaacgcctcagcacccgcattcattatggcaggggaacaagtgtttcaagactgtgctgagatccaacgctctggcgcttcagcctcaggcgtgtacactatacaagtctccaatgcaaccaaacctcgcaaggtgttttgtgatctccagtcctcaggagggagatggacactcattcagcggcgggaaaacggaaccgtgaatttccaaagaaattggaaggactacaagcagggcttcggtgatccggccggcgagcattggttaggcaacgaggtagtgcatcaactgacacgtcgggctgcgtatagccttcgtgtggaactgcaggattgggaaggtcacgaggcctacgctcagtacgaacactttcacctgggcagtgagaaccagttatacagggtggtcgtgtag

SEQ ID NO: 178974 - DNA, 1383 bp, synthetic construct
  misc_feature 1..1383: note = Description of Artificial Sequence: Synthetic coding sequence
  source 1..1383: mol_type = other DNA
atgttcaccatcaagctgctgctgttcatcgtgcccctggtgatctctagccgaatcgatcaggataattcctcctttgactctctgagtccggaacctaagagcaggttcgcgatgctggatgacgtcaagatcttggctaatgggctgctgcagctgggccatgggctaaaagatttcgtgcataaaactaagggccagattaacgatatcttccaaaaactgaatatttttgaccagtcattttatgacttgtccctccaaacatcagagatcaaggaggaagagaaggaactgcgacggacgacgtacaaactgcaagttaagaacgaagaagtgaaaaatatgagtctcgagctcaactccaagctcgaatcactccttgaagaaaaaatcctgttgcagcaaaaagtgaaatacctcgaggagcagttgaccaaccttattcaaaaccagcctgaaacacccgagcaccccgaagttacttcactaaaaacttttgtcgagaagcaggataatagcattaaagaccttttgcagaccgtggaagatcagtacaaacagttaaatcaacagcatagtcagatcaaagagatcgagaaccagctgcggcggacatcgatccaggaacccacagagatctctctgtcctccaagcccagagccccaagaactacccccttcctccagctgaatgagatccggaacgttaaacacgatggtatccccgcggagtgtaccacgatttacaacagaggtgaacacacatctggtatgtacgctattcgcccatcaaattcccaagtgtttcacgtttactgcgatgtgatctcgggctccccttggacactgatacaacaccggatagatggatcacagaatttcaatgagacctgggagaattataagtatggcttcgggcgcctcgacggtgagttttggctcggcttagaaaaaatttactcaattgttaagcagagcaattatgtgttgaggatcgagcttgaggactggaaagacaacaagcactatattgaatacagcttttatctgggtaatcacgagactaactacacgctgcacctggtggcgatcactgggaacgtcccaaacgcaatccctgagaacaaagatctggttttttcgacgtgggaccacaaagctaaaggtcattttaattgccccgagggctacagcgggggctggtggtggcatgatgaatgtggcgaaaacaatctcaacggaaaatataataagccacgggccaagagcaagcccgaaaggaggagaggattgagctggaagtctcagaacggacgcctgtattctatcaagagcaccaagatgctgatccatcccacagattccgagagttttgaatag

SEQ ID NO: 178975 - DNA, 1167 bp, synthetic construct
  misc_feature 1..1167: note = Description of Artificial Sequence: Synthetic coding sequence
  source 1..1167: mol_type = other DNA
atgatgagccccagccaggccagcctgctgttcctgaacgtgtgcatattcatctgtggcgaagcagtacaggggaattgtgtgcaccattccaccgacagctctgtggtgaacatcgtagaggatggttccaatgcgaaagacgagtccaaaagtaatgatactgtctgcaaggaagattgtgaggagtcctgtgacgtgaagactaagatcacacgcgaggagaaacattttatgtgccggaatcttcaaaatagcatagtctcttacacccgatctactaaaaagcttttgcgaaatatgatggatgagcagcaagcttccctggactacctctctaaccaggtgaacgagctcatgaaccgggtgcttcttcttacaactgaagttttccgcaagcagctcgatcccttcccccaccgccccgtacaatcccacggcctggattgtacagacatcaaggacaccatcggaagcgtcaccaaaacaccttcaggattgtacatcattcaccccgagggatcttcctaccccttcgaagtgatgtgtgacatggactacagaggcggcgggcgaaccgttatccaaaagcggatcgatggcataatagatttccagcggttgtggtgcgactacctggacgggttcggtgatttgctgggcgagttttggctgggcttgaaaaaaattttctacatcgtgaatcagaaaaatacgagcttcatgctatatgttgcgcttgagagtgaagatgataccctcgcctacgcatcctacgataacttttggctagaagatgaaactagattcttcaagatgcatcttggacggtactccggcaacgcgggagatgccttccgcgggctcaagaaggaggataatcaaaacgctatgcctttttccacctcagatgtggataatgacggctgcaggcccgcctgtctggtgaatggtcaatccgtgaagagctgtagccatctccataataaaacgggatggtggtttaacgagtgtggtctggcaaatctaaacggaatacaccactttagtggtaagctgcttgccactggcatccaatgggggacgtggactaagaataactctcccgtgaaaataaagtctgtgtctatgaagatccggagaatgtataatccatattttaagtag

SEQ ID NO: 178976 - DNA, 1413 bp, synthetic construct
  misc_feature 1..1413: note = Description of Artificial Sequence: Synthetic coding sequence
  source 1..1413: mol_type = other DNA
atgggcaagccctggctgcgggccctgcagctgctgctgctgctgggagcctcctgggcacgagccggagcgccacggtgcacgtacacatttgtgctccctcctcagaaatttaccggtgccgtgtgttggtctggaccagcatccacccgcgccacgccggaggctgctaatgcttccgagctcgccgcactaagaatgagggtgggccgccacgaagagctcctacgtgagttgcagagactggcggccgccgacggcgcggtggccggcgaagtgagggcactccggaaggaaagtcggggtttgtctgcccgtttgggacagctgagggctcagctgcagcacgaagcaggacccggcgccggacccggcgcggacttgggagctgaacctgcagctgcattagcactcctaggcgaacgggtcctgaatgcctcagccgaggcccagcgtgcagcagcacgattccaccagctagacgttaaatttcgggagcttgcccaactcgtgacccagcagagttcgcttattgctagactagagagactctgcccagggggagcgggtggccaacagcaggtgctgcctccccccccactcgtgccagttgtgcccgttcggctggtggggtccacgagcgacacttctcgcatgttagaccctgcccccgaacctcagagagatcagactcagagacagcaggagcctatggccagtcctatgcccgcaggacacccagctgttcctactaaaccggtggggccatggcaggactgtgcggaagccaggcaggcaggacatgaacagagtggggtctatgaactcagggttgggcgacatgtagtgagtgtctggtgtgagcagcaactggaaggcggcgggtggacagtgatacagagacggcaagatggaagcgtgaactttttcacaacctggcagcactataaggccgggttcggacgacccgacggcgaatactggctgggcctggagcctgtttaccagcttacctccaggggcgaccacgagctgctcgtcctgctggaagactgggggggccgcggggcaagagcgcattacgacggattttcattagagccagaatctgatcactaccggctccgcctcggacagtatcacggcgatgctggagattcactttcatggcacaacgataaaccctttagcacggttgatcgtgaccgcgatagctactctggcaattgtgcgctgtaccagcgaggcggctggtggtatcacgcttgcgctcattcaaatctgaatggtgtttggcaccatgggggccactacaggtcccggtatcaggatggggtttattgggccgaatttcgggggggcgcttatagcctgagaaaagccgcgatgctcatccgaccattgaaactgtag

SEQ ID NO: 178977 - DNA, 2199 bp, synthetic construct
  misc_feature 1..2199: note = Description of Artificial Sequence: Synthetic coding sequence
  source 1..2199: mol_type = other DNA
atgggccagggctgggccaccgccggcctgcccagcctgctgttccttttactctgttatggccaccctctgcttgtaccaagccaggaagcttcgcaacaggtcaccgtcacacacggcacatcttcccaggccaccaccagttcgcaaactaccacacatcaggctactgcccaccagacctctgctcaaagtcctaacctcgtgacggacgaggccgaagccagtaagttcgtggaggaatatgacagaacttctcaggtcgtctggaatgagtacgctgaggctaactggaactataacaccaatatcactacagaaacaagtaagattctgctgcaaaagaatatgcagatcgcgaatcacactctcaagtatggaacacaggccaggaaattcgacgtgaaccagttgcagaacaccaccatcaaaagaatcatcaagaaggtccaggacctggagcgtgccgcactccctgcacaagagttggaggaatacaataagattcttctcgacatggagacaacatacagcgtggctaccgtgtgccacccaaatgggagttgtctgcaattagagcccgatctgaccaatgtaatggccacatctaggaagtatgaggatctgctgtgggcctgggaggggtggagagacaaagccggccgcgccatcttacagttctatccaaaatatgtggaacttatcaaccaggctgctagactgaacggttacgtggatgctggggactcgtggcgcagcatgtatgaaacaccctccctggaacaggatctggaacggctgttccaggagctccagcctctctacctcaatctccatgcttatgttcgcagagcgctccataggcactatggagctcaacatattaatctggaaggcccaatccctgcccacctcttaggaaacatgtgggctcaaacctggtctaacatttacgacctggtggtcccattcccttcagccccatccatggacaccacagaggccatgttaaaacagggctggacacctaggaggatgtttaaggaagccgacgatttctttacctctctggggttgctccccgtgccccctgagttctggaacaagtcaatgctggaaaagccaaccgatggtcgggaggtggtctgccacgcgtctgcttgggacttttataacggaaaagacttccgcatcaagcagtgcacaactgtcaatctcgaagatctcgtggttgcccaccatgagatggggcacattcagtatttcatgcagtacaaagacctgccagtcgccctcagagagggggctaatccaggctttcatgaagctataggggatgttttggcactgagcgtttccaccccaaagcatctgcactctctgaatctgctgtcgtccgagggcggctccgatgaacatgacatcaatttcctgatgaagatggccctggacaaaattgcttttatcccgttctcctatctggttgaccaatggagatggagggtcttcgacggcagcattacaaaggagaattacaaccaagaatggtggtccctacgtttaaagtatcagggtctgtgccccccagtaccgcggacccaaggggattttgaccccggtgccaaattccacatcccttcttctgttccttacattagatacttcgtgtctttcatcatccaattccagtttcatgaagcattgtgtcaggccgctggtcacaccggtcctcttcacaagtgcgatatctaccagtccaaagaagcaggacagcggttggccacagcaatgaaattagggttctcccggccatggccagaagcaatgcagctgataaccgggcagccaaatatgtccgcatccgctatgcttagttattttaagccattgctggactggttgcggacagaaaacgagctccatggtgaaaagttgggatggccccagtacaactggactccaaatagcgcccgctcagagggtccactgccagatagcgggcgcgtgtcattcctggggcttgaccttgatgcccagcaagctagggtgggacagtggctcctcttgttcctgggaatcgctctcttggtagccacactggggctctctcagagactgttcagtattcgtcatagaagcctgcacagacattcacacgggccacaattcggaagcgaagtggaattaaggcacagctag

SEQ ID NO: 178978 - DNA, 3921 bp, synthetic construct
  misc_feature 1..3921: note = Description of Artificial Sequence: Synthetic coding sequence
  source 1..3921: mol_type = other DNA
atgggcgccgccagcggccggcggggccccggcctgctgctgcccttgccgctgctgcttctcctgccgccacagcccgccctggcgcttgatcctgggcttcagccaggtaacttcagcgccgacgaggctggggcccaactgtttgcgcagagttataactcctctgccgaacaggtcctgtttcaaagcgttgcagccagttgggcccatgatacaaacataactgctgaaaatgcccgtagacaagaggaggcagcgctcctgtcacaggagttcgccgaagcttggggccagaaggcgaaagaactgtacgagcccatctggcagaacttcacggatccccaattaaggcgcattattggggccgtccgcacacttggcagcgcgaatctcccactggccaagagacagcagtataacgctctcttgagcaatatgagtaggatatactccactgcaaaggtgtgcctccccaataaaactgctacctgctggtccctggacccggacctaacaaacatacttgcctcttccaggtcatacgccatgctcctctttgcttgggagggatggcataacgcggcaggcatccctttgaaacccctgtatgaggattttacggcactgtccaatgaagcctataaacaggacggctttactgacacaggcgcatattggcgaagttggtacaatagccccacgttcgaggatgatctggagcatctgtaccaacagctggaaccgctctacctgaacctccatgcgttcgtgcgcagggccctgcaccgtcgctacggagaccgatatatcaatcttcggggacccattcctgctcacctactcggcgacatgtgggcccagtcatgggagaatatctacgacatggtcgtgccgttcccagataaacctaacctagatgtgacctcaacgatgctgcagcagggatggaacgccacccacatgtttagggttgccgaggaattcttcacatctctggaacttagtcccatgcctccagaattttgggaggggagcatgctggaaaaaccagctgacggccgcgaggtcgtttgccatgcctccgcttgggacttctacaatagaaaggatttccggattaagcagtgcacgagggttacgatggatcagctgtccactgtgcaccacgaaatgggacatatccagtattatctgcagtataaggacctacccgtctcattgaggcggggtgctaatccgggcttccatgaagccatcggggacgtgctagcgctctctgtgtctacccccgaacacttgcacaagattggcctccttgatcgagtcactaacgacacagaaagcgatatcaattatctgcttaagatggcactggagaaaatcgcattcctccccttcggctatttggtcgatcagtggaggtggggcgtgttcagcggtagaacacctccttctcggtacaattttgattggtggtaccttaggacaaagtaccagggcatctgtccaccagtgacccgaaatgagacccacttcgatgcaggcgcaaagttccatgttcccaacgtcaccccatatattaggtatttcgtctcctttgtgttgcaattccagtttcatgaggccctatgtaaagaagcgggttatgaaggcccgctgcatcagtgtgatatctatcggtcaactaaagccggagccaaactgcggaaagtgcttcaggccggcagtagcaggccgtggcaggaggtcctgaaagacatggttgggcttgacgccctggacgctcaacctctgctgaagtactttcagccggtgacacaatggctccaagaacagaatcagcagaacggtgaggttctaggatggccagagtatcagtggcatcccccgctacccgataactatcctgaaggtatagatttggtgaccgatgaggctgaagcaagcaagttcgtcgaggagtatgacaggacttctcaggttgtgtggaatgagtatgcagaagcgaattggaattacaataccaacatcaccacagagacaagcaaaatattgctgcaaaagaatatgcaaatagcaaaccataccctgaaatatgggactcaggcaaggaaatttgatgtgaatcaactgcagaacactacaataaaacggattataaaaaaagtccaagacctagagcgagctgcgctgcccgcccaagagctggaggaatacaataagatcctcctggacatggagaccacatacagcgtcgctacggtgtgtcacccaaacggcagttgtctgcaattggagcctgatttaaccaatgtaatggccacttccagaaaatacgaagacctgctgtgggcctgggaggggtggcgagacaaagcaggacgcgccatcttacaattttaccctaagtatgtggaactcatcaaccaggctgccaggctgaatggttatgtggatgcaggagactcttggcgctcgatgtatgagacccctagtcttgagcaagacctcgaacgccttttccaggaactccagcctctgtatctgaacctgcacgcctacgtccgcagggccctccatcgacattatggcgcacagcacattaatctggagggtcctattccggcgcatcttctgggcaacatgtgggcacagacctggtccaatatctacgacctggtggtcccattcccctccgcaccatcgatggatacaactgaggccatgctgaaacaggggtggacacctcggcggatgttcaaggaagccgatgattttttcacgtccctgggactgttacctgtgcctcctgaattttggaacaaaagtatgttagagaagccgaccgacggacgcgaggtcgtgtgccacgccagtgcttgggacttctacaacgggaaggacttccgaattaaacagtgcacaactgtaaacttagaggatttagtggttgcccatcatgagatgggccatattcagtactttatgcagtacaaggacctccctgtcgcacttcgcgagggcgctaacccaggatttcatgaagcgatcggcgacgtcttggccctcagtgtgtccacacccaagcacctccatagcctgaatctgctgagctctgaaggggggtcagatgagcacgatattaatttcttaatgaagatggcacttgacaagattgcttttataccattcagctatctcgtggaccaatggcgatggcgagtctttgatgggagcataaccaaagagaactataatcaggaatggtggagcctacggctcaagtatcagggcctgtgtcctcccgtgccccggacccagggtgatttcgatccgggggcaaagttccacattcccagctcagtgccctatatccgctactttgttagtttcataatccagttccaatttcacgaagccttgtgccaggccgctggccacacaggcccactacataagtgcgacatctatcagagcaaagaagccggacagcggctcgccactgcaatgaagctgggattttcaaggccttggcccgaggctatgcaactgatcacagggcagccaaatatgagcgcctccgccatgctgtcttacttcaaacctctgctcgactggctcaggactgagaatgagctccatggcgaaaagctcggatggccgcagtacaattggactccaaactcagctagaagtgaaggtccgctccctgactctggccgggtgagcttcctggggctcgatctggacgcccagcaggcgcgggtagggcagtggctgttgctgtttctaggcatagctttactggtggctacactgggtttgtctcaaagactcttctctattcggcaccggtcactgcataggcactcacacggcccacagtttgggagcgaagtggaactaaggcactcttag

SEQ ID NO: 178979 - DNA, 2076 bp, synthetic construct
  misc_feature 1..2076: note = Description of Artificial Sequence: Synthetic coding sequence
  source 1..2076: mol_type = other DNA
atgggccagggctgggccaccgccggcctgcccagcctgctgttcctcctgctctgctacggccaccctttgctggtgccctcccaagaagcttctcagcaggttaccgtgactcatgggactagtagccaggccactactagcagccagaccacgactcaccaggccacagcacatcaaacaagcgctcagtcacctaatttggtgacagacgaggcagaggctagtaaatttgtggaggaatacgacagaacaagtcaggtggtatggaatgagtatgccgaggcaaactggaattacaacacgaatatcaccaccgagaccagtaagattctgttacagaaaaacatgcagattgctaatcacaccttaaagtacggcacccaggctcgcaagttcgatgttaatcagcttcaaaatacgacgatcaaaagaatcattaagaaagttcaagacctcgagagggccgccctgccggcacaggagctggaggagtacaataaaattctgcttgacatggaaacaacttactccgtggcaacagtctgtcaccccaatggtagttgtttgcagctcgaacctgaccttacaaatgtcatggccactagcaggaaatacgaggatttgctctgggcctgggagggctggagggataaagcgggacgggccattctgcagttttacccaaaatacgtcgaactgataaaccaagctgctcggttaaatggatacgtggatgccggagacagctggcgatcaatgtacgagaccccttcacttgaacaagatctggaacgcctgttccaggaactacagcccctgtacctcaatttgcatgcgtacgtgcggagagcacttcatagacattacggggcccagcatatcaatctggaaggccctatacctgctcacctgttagggaatatgtgggctcagacgtggagcaatatctacgacttggtagtgccatttccatcagctccatccatggacactacagaggccatgctgaaacagggatggacaccccggagaatgtttaaagaagctgatgactttttcacctctctcggtctgctaccagtcccccccgagttttggaacaagtctatgctggagaagccgactgatggccgggaggttgtttgccacgcctcggcttgggatttttataacggcaaagatttcagaataaagcagtgcaccacagttaatctggaggacctagtggttgcgcaccacgagatgggacatatccagtactttatgcaatacaaggacctgcccgtggctttacgagagggagccaatcctgggttccacgaagcaatcggtgatgtgctcgccctgagcgtttcgacacccaagcacttacatagtttaaatctgttatcatccgagggcggctctgacgagcatgacatcaactttctgatgaagatggccctggataaaatcgcattcattcccttcagctatctggtcgaccagtggcgctggcgagtgttcgatggatccataactaaggaaaactataaccaggagtggtggagcctgagactcaaataccaggggttatgccctcctgtgcccagaacacagggcgactttgacccaggagctaagtttcatattccctcctcagtaccttacatacgcaccgccatgaagttgggcttttccaggccgtggcccgaggccatgcagctcataaccggacagccaaacatgagcgcctctgccatgctgagctactttaaaccactgctggactggctgcgaaccgagaacgagctgcacggcgagaaactcggctggccgcagtacaattggacacccaattcggcacggtccgagggccctctgcctgactctggccgagtgtctttcttgggcctggacctcgacgctcagcaagccagagtgggccagtggcttctgctgtttttaggcatagccctactggttgccacactaggcctctcccaacggctgtttagtatcagacaccgctcactccatcgccactcccacgggccgcagtttggatccgaggtggagttaaggcactcatag

SEQ ID NO: 178980 - DNA, 1536 bp, synthetic construct
  misc_feature 1..1536: note = Description of Artificial Sequence: Synthetic coding sequence
  source 1..1536: mol_type = other DNA
atgcagatcgccaaccacaccctgaagtacggcacccaggcccggaaattcgatgttaatcagctgcagaataccactattaagaggatcattaagaaagtccaggatctggagcgggctgcccttcccgcccaggaattggaagagtacaataaaatcctcttggatatggaaaccacctattcggtagccactgtctgtcatccgaacggttcctgccttcagctcgagccggacttgacaaacgttatggctacctccagaaagtatgaagatcttttatgggcctgggagggttggagggataaagccggtcgcgccattctgcagttctacccaaaatatgttgagctgattaatcaggccgctcggttaaatggcaacatgtgggcacagacatggtctaatatttatgatctcgtcgtgccgtttccatctgcacctagcatggataccacggaagccatgctaaaacagggatggacccccagacggatgttcaaggaagctgacgatttctttactagcttagggttgcttccggtgcccccagagttttggaacaagtctatgctggagaagcccacagatggtagggaagtcgtgtgtcatgccagcgcgtgggatttctacaatggcaaagatttcaggataaagcagtgtacgacagtgaatctggaagatctggtggtagctcatcatgagatgggccatatacagtacttcatgcagtacaaggatttgcctgttgcccttagagagggcgcaaaccctggcttccacgaagctatcggagacgtgctggcactttccgtgtctactcctaagcacctccacagcctcaacctgctgagctcagaggggggttccgatgagcacgacataaatttcctgatgaagatggcacttgacaagattgctttcattccattcagttatctcgttgatcagtggaggtggagggtgttcgatggaagcattaccaaggagaactacaatcaggaatggtggtcactccgcttgaagtatcagggattgtgccctcccgtgccccgcacacagggcgactttgacccaggggctaagttccatattccctcgtccgtcccatatatcaggacggcaatgaagctgggcttttctcgtccatggcctgaggcaatgcagttaatcacaggccagccaaatatgagtgcttccgccatgctgagttattttaagcctctcctggattggctgagaaccgagaacgaactccacggcgagaagctcggctggcctcagtataactggacgccgaactccgcccggagcgagggaccactgccggattccgggcgggtctcattcctgggattagatctggacgctcagcaggcccgggtaggtcaatggctcctgcttttcctcgggatcgccttattggtggctacattgggtttgtcacaacggctgttctcgatccggcaccgtagccttcacaggcatagtcacggtcctcagttcgggagcgaggtagaactgcggcacagctag

SEQ ID NO: 178981 - DNA, 3438 bp, synthetic construct
  misc_feature 1..3438: note = Description of Artificial Sequence: Synthetic coding sequence
  source 1..3438: mol_type = other DNA
atgggcgccgccagcggccggcggggccccggcctgctgctgccccttcctctgttactgctgctgcctccgcagccagccctagcacttgatcctgggctccagccgggcaatttcagcgccgatgaagcaggcgcccaattgtttgcccagtcctataattccagcgcagaacaggtattattccaaagcgtcgctgcttcttgggctcatgacaccaacataactgccgagaacgctaggagacaggaggaggcagcactcctgagccaagagttcgctgaggcatggggccagaaagccaaggaattgtacgaacctatctggcaaaacttcacagacccacaactcagaagaattataggtgccgtgcggactctcggttccgcaaatctgcccctggcaaagcgccagcagtataatgcccttctctctaacatgagtcggatttacagcactgccaaggtttgcttgccaaataaaactgctacatgttggagccttgacccggatctgactaacattttggccagctcgagatcttacgcaatgctgctctttgcctgggaaggctggcacaatgctgccgggattcctttaaagcctttatacgaagacttcactgccctttcaaacgaggcttataagcaggacggcttcacggacacaggcgcgtattggaggtcatggtacaactccccaacctttgaagacgatctggaacacttgtatcagcaactggagcccctctacttgaacctccacgccttcgtgagacgtgcattacaccgaaggtatggggacagatacatcaacctcagaggccctataccggctcacctactgggagacatgtgggctcaatcttgggaaaacatctatgacatggtggttccctttcccgataaaccaaacctagatgtgaccagcaccatgttacagcaagggtggaacgccacacacatgttccgggtcgctgaagaattctttacaagcttagaactatctcccatgccacctgaattctgggagggatcgatgctggagaagcccgctgacggtcgcgaagtggtctgccacgcaagcgcttgggacttctataaccgcaaagatttccgaatcaagcaatgtacccgtgtgactatggatcagctgagcacagtgcaccacgaaatgggtcatattcagtactacctgcaatataaggacttgcctgtgtccttaagacgtggagcaaatcccggcttccatgaggcaattggagacgtccttgccctctccgtcagcacacctgaacacctacacaaaatcggactgctggaccgtgtaacaaacgacacagaatctgacattaattacctgcttaaaatggccctggagaaaatcgccttcctacctttcggctatctggtcgaccagtggaggtggggcgtcttttctgggaggacaccaccatcacgttacaacttcgactggtggtacctcagaacaaagtatcaaggtatttgtcccccagttactcggaacgagactcactttgatgccggcgcaaagtttcatgtgccgaatgtgaccccctatatacggtacttcgtgagctttgttctccaattccaatttcatgaagcgctttgtaaagaagccggctacgagggacccttacaccaatgtgacatttaccggagcaccaaagccggcgccaagctgagaaaggttctgcaggctggatcaagcagaccttggcaggaagtgctgaaagatatggtgggcctcgacgcccttgatgctcagccgctactaaagtacttccaacccgtgacacaatggcttcaggagcagaaccagcaaaacggggaggtgctgggttggcctgagtaccagtggcatcctcccctcccagataattacccagagggaatagatcttgtgacagacgaggcggaagcctcgaagttcgtagaggaatatgaccgaacttcccaggtggtatggaatgagtatgccgaggcaaactggaactacaatactaacatcactacagagactagcaaaattctgcttcagaaaaatatgcaaatcgccaatcacaccctgaagtatggcactcaagcgcggaagttcgatgtgaaccagctccaaaacactacaatcaagcgcatcattaagaaagtgcaggatcttgagagggccgccctgcccgcacaggagctggaggaatataataaaattcttctggacatggagacaacgtactccgtggctacagtgtgtcacccaaatgggtcctgtttacagctcgaacccgatctaactaacgtgatggcaacatcccggaagtatgaagacctcttgtgggcctgggaggggtggcgcgacaaagctggaagagccattttgcagttctatcctaaatacgtcgagctgatcaaccaggctgcgcgcttgaatgggtacgtcgatgccggcgactcctggagaagcatgtacgaaactccgtccctggagcaggatttagaaagactgtttcaggagctgcagcctctgtacttgaacctgcatgcatacgtgcgcagggccctgcaccgtcactacggcgcccagcatatcaacttggaaggccctatcccggcccacttattgggcaatatgtgggcgcagacatggtcaaacatttatgatcttgttgttccctttccaagcgcacctagcatggacaccacggaagccatgctaaaacaaggttggacgccacgccgcatgttcaaagaggccgatgattttttcacctcactcgggctgctgcccgtccctcctgagttctggaacaagtcgatgctggagaagcccacagatggtcgcgaggtagtctgccacgcgtcagcatgggatttttataacggaaaggactttcgtattaagcagtgtacaaccgtgaatctggaagatctagtagtcgcccatcatgaaatgggccacatccagtacttcatgcagtacaaagatctccccgtggcactccgggaaggcgcaaatccaggtttccatgaagcaataggtgacgtgttagccctctccgtgtccacccccaaacatctccattcactaaacttgctcagttccgaaggtgggagtgacgaacacgatatcaacttcctaatgaagatggcacttgataaaatagccttcataccatttagctacctcgtggaccagtggcggtggagggtgtttgatgggagcattaccaaagaaaattataaccaagagtggtggtctttgcgtctgaaatatcaggggttgtgccccccagtgccgcgcacacagggtgactttgaccccggagcgaaatttcacattcccagctccgtgccctacatccggtatttcgtatctttcatcattcagtttcatccattcagtcagcataccgctgcctag

SEQ ID NO: 178982 - DNA, 1428 bp, synthetic construct
  misc_feature 1..1428: note = Description of Artificial Sequence: Synthetic coding sequence
  source 1..1428: mol_type = other DNA
atgggcgccgccagcggccggcggggccccggcctgctgctgcccttgcctttactcctgcttctgcctcctcagccagccctggccctggatcctggcctgcagccaggaaattttagtgcagatgaggctggggcccagctcttcgcccagtcatacaattcatctgccgagcaggtgttatttcagtccgtggcagcctcttgggctcatgataccaatatcacggcagagaatgccaggaggcaggaagaggccgccttattatcccaagaatttgccgaagcctggggacagaaggccaaggagctgtatgagcctatatggcaaaattttaccgatcctcagctacggcgcattatcggggcagtgcgaacactgggctcagccaacttacctctggctaagaggcagcagtataacgctctcctgagcaacatgagtcggatctactccacagctaaagtgtgcctccccaataagacggccacatgttggtctctagatcccgacctgacaaatatcctggcatcttcccgctcttatgctatgcttctcttcgcctgggagggctggcataacgctgcaggtataccactgaagccgctttacgaggacttcaccgcactgagcaacgaagcctataagcaggatggattcacagacaccggtgcctattggaggtcctggtataactcccctacatttgaagatgatctggagcatctctaccagcaacttgagcccctctacttgaacttgcatgcattcgtgagacgcgcacttcataggagatatggcgaccggtatataaatcttcggggaccgatccctgcccacctcctaggcgacatgtgggctcagagttgggaaaatatatacgacatggtggtgccgttccccgataaacccaatttagatgtaacttcaactatgctacaacagggctggaatgccacccacatgttccgcgtcgccgaagagtttttcacgtctctggaactttcaccaatgccccccgaattctgggagggtagcatgttagaaaagcctgcagacggcagggaagtggtgtgtcacgcctctgcctgggacttttacaacagaaaagacttccgcattaaacaatgcaccagagtgacgatggaccagctgtcaacagtgcaccacgagatgggtcacattcagtattacttgcagtacaaagaccttccagtctcactgcgtcgaggagcgaaccccgggttccacgaggcaattggggacgtactggcattatcagtgtctacaccagagcacttgcacaagataggccttctcgacagagtcaccaatgacactgagccctccattcgtggctcagtcctgcttctccccgaaaccaagcctacccttatgctggagctgagctttatgtttcagatgtag

SEQ ID NO: 178983 - DNA, 1080 bp, synthetic construct
  misc_feature 1..1080: note = Description of Artificial Sequence: Synthetic coding sequence
  source 1..1080: mol_type = other DNA
atgatcctgaacagcagcaccgaggacggcatcaagcggatccaggacgactgcccaaaagcaggccggcacaattacatatttgtaatgatcccaaccctttactctattatcttcgtggtggggattttcggcaattccttagtggtgatagtgatctatttttacatgaaactgaaaaccgtggcttcggtgtttttattgaatctggcgctggctgacctctgcttcctgctaaccctgccgctgtgggcagtgtacactgctatggagtacagatggccttttggcaactacctgtgcaagatcgctagcgcctctgtatcttttaatttatacgctagcgtcttcctgctgacatgtctttcaatcgatagatatctggccattgtgcacccgatgaaaagcagactacgtagaaccatgttagttgctaaggtaacctgtataatcatctggctgctggctggcttagcttcattaccggccataattcatcgcaacgtcttttttatcgagaacacaaacatcaccgtttgtgcctttcactatgaaagtcagaattcaacgctacctatcgggctcggccttacaaagaatatcctggggttcctcttccctttcctgatcattttaacctcatatacacttatctggaaagccctcaaaaaggcctacgagattcaaaaaaacaagcctagaaatgacgacatctttaaaatcattatggccatagtgctgtttttctttttctcttggatcccacaccaaattttcacctttcttgacgtcctgatccagcttggtatcatcagggactgcaggatcgctgatattgttgatactgcaatgcccatcaccatctgcattgcctacttcaacaattgtctcaacccgctgttttacggcttcctgggtaaaaagttcaaacggtatttccttcagcttttgaaatacataccgcctaaggcaaaatcccattcaaacctgagcaccaaaatgagtaccctgtcgtacagaccgtcggataacgtaagcagctctaccaagaaaccagccccctgctttgaggtcgagtag

SEQ ID NO: 178984 - DNA, 1080 bp, synthetic construct
  misc_feature 1..1080: note = Description of Artificial Sequence: Synthetic coding sequence
  source 1..1080: mol_type = other DNA
atgatcctgaacagcagcaccgaggacggcatcaagcggatccaggacgactgcccaaaggccgggaggcacaactatatctttgtgatgattcccaccctgtattcaataatctttgtcgtgggcatttttgggaactcactcgtggtcatagttatctatttttacatgaagctcaagaccgttgcgtcagtgttccttctgaacttagcccttgccgacctgtgcttcctgctgaccctgcctttatgggctgtgtataccgcaatggagtatagatggccttttggtaactacttatgtaagattgcatctgccagtgtgagtttcaacctgtatgcctctgtgttcctgcttacatgtctgagtatcgacaggtatctggccatcgttcaccccatgaagagccgactgaggaggacaatgctggtggcaaaggttacttgtattattatttggctgcttgcaggcctggccagcctgcctgcaataattcacaggaacgtgttcttcattgaaaatacaaatatcaccgtttgcgccttccactacgaaagccagaacagcaccttgcctatcggtttaggcctaacaaagaacatactggggtttctgttccccttcctgataatactgaccagctacactctaatttggaaagcactgaagaaggcctatgagattcagaaaaacaagcctcgaaatgacgatattttcaagatcatcatggctatcgtgctgttctttttcttctcttggatccctcatcagatctttacattcctggatgttctcatccagctgggcattataagagactgccgtatcgcggatattgtcgacactgccatgcccatcaccatctgtatagcctactttaataactgtctcaacccactcttttatggcttcctgggcaagaaatttaagagatattttctgcagcttctgaaatatattccgccaaaagctaagtcccattcgaatctgagcaccaaaatgagtacgctgtcctacaggccttcagataatgtgtcctcatctactaaaaaacctgccccgtgctttgaagtcgagtag

SEQ ID NO: 178985 - DNA, 1080 bp, synthetic construct
  misc_feature 1..1080: note = Description of Artificial Sequence: Synthetic coding sequence
  source 1..1080: mol_type = other DNA
atgatcctgaacagcagcaccgaggacggcatcaagcggatccaggatgactgccctaaggccggccggcacaactacatctttgtcatgatccctaccctgtatagtatcatttttgtggtaggaatctttggaaacagcctggtggtgattgttatttacttttatatgaaattgaaaaccgtagcgtcagttttccttctcaatctcgcactcgcagacctttgtttccttttaacgctgccactttgggccgtttacacagcaatggagtaccggtggccctttgggaattacctgtgtaaaatcgcttccgcatccgtctcttttaatctgtacgcttcagtgtttttgctgacttgcctgtcgatcgacagatacttggcaattgtgcatcccatgaaaagcagattaaggagaacaatgctcgtagcaaaggtaacatgtatcatcatctggctgctggcaggcttggcctctctacccgccataatccacagaaatgtatttttcattgaaaacaccaatatcacagtgtgtgcattccactatgaatctcaaaactctaccttgccaattggactgggcctgaccaagaatattctaggattcctgtttcccttcctaatcatcctgacctcctatacgctgatttggaaagcccttaagaaagcctatgagattcagaagaacaaacctcggaatgacgatatttttaaaataattatggctattgtcctcttcttctttttttcttggattccccaccagatcttcacatttttggatgtcctcatccaactggggatcatccgagactgtcggatcgctgatatagttgacaccgctatgccgatcactatttgtattgcctattttaataactgtctcaaccctctcttttatggatttttgggcaagaaatttaagaggtatttcctgcaactccttaaatacataccccctaaggcgaaatcccatagcaatctgagcaccaaaatgtctactctgtcatataggccctctgacaatgtctcatcttccacaaaaaagccggctccctgttttgaagtggaatag

SEQ ID NO: 178986 - DNA, 1080 bp, synthetic construct
  misc_feature 1..1080: note = Description of Artificial Sequence: Synthetic coding sequence
  source 1..1080: mol_type = other DNA
atgatcctgaacagcagcaccgaggacggcatcaagcggatccaggacgattgtccaaaggccggccggcacaactacatcttcgtcatgattccgaccctgtacagcatcatattcgttgtgggcatcttcggtaattctttggttgttattgtgatttacttctacatgaaattaaagacagtggcatctgtgttcttactgaatttggccctcgctgacttatgttttctgttgacactccctctatgggccgtgtacacagccatggaatacaggtggccgttcggcaattacctgtgtaagatcgcaagtgcctctgtttcctttaacctctatgccagtgtctttttgctgacttgcctgtccatcgaccgttacctggccattgtgcacccaatgaaatctcgcctgaggcggactatgctcgtcgctaaggttacttgcataattatttggctactggccgggcttgccagcctgcctgccataatccacaggaacgtgttctttatagaaaacactaacattactgtatgtgcatttcattatgaaagtcaaaactcaaccctgcccattggcctgggcctcacaaaaaacattctgggcttcctgtttcctttcctcattatcctaaccagttacacactcatttggaaagcgctaaagaaagcctatgagatccagaaaaacaaacccagaaatgacgatatatttaagatcataatggccatagtgttgttcttttttttttcatggatcccgcaccaaatctttacattcctagacgtgctgatacaattgggtatcatccgcgattgcaggattgccgatattgtcgacacagctatgcctatcactatatgcattgcctactttaacaactgtctaaaccctctcttttacgggttcctgggtaaaaagtttaagcgttatttcctacagctcctgaaatacattccacccaaagctaaatctcactcaaacctctctacaaagatgtccaccctgtcttacagacctagtgataatgtgtcctcatctacaaagaagcccgcaccgtgcttcgaggtggagtag

SEQ ID NO: 178987 - DNA, 1080 bp, synthetic construct
  misc_feature 1..1080: note = Description of Artificial Sequence: Synthetic coding sequence
  source 1..1080: mol_type = other DNA
atgatcctgaacagcagcaccgaggacggcatcaagcggatccaggacgactgcccgaaggccggtagacacaactatatctttgtgatgataccgaccctctactctattatcttcgtggtagggatctttggcaactcactcgtggttatcgtgatatacttctacatgaaattgaaaacagtcgcgtccgtattcttgcttaacttggctctggctgatctctgtttcctgctcacacttcccctgtgggcagtctatacagcaatggagtacaggtggcctttcggaaactatctgtgtaagatagctagcgcctcggtgtccttcaacttgtatgcctccgtatttttgctcacctgtctgtcaatcgaccggtacctggcaatcgtgcacccaatgaagtctcgtctcagacggaccatgctcgtcgcgaaggtgacttgtattattatttggttattagccggactcgcaagcctccctgcgataattcaccgtaacgtgtttttcatagagaacaccaatattactgtgtgtgcattccattatgaatctcagaacagcacattgcctataggcctcgggctgaccaagaacattctagggttcctgtttccttttttgataattttgacctcttatactcttatatggaaagcattaaagaaggcctatgagattcagaaaaacaagcctcggaatgatgatatttttaaaatcatcatggccatcgttctcttcttctttttttcttggattccgcaccagatttttacctttctcgacgttctgatccagctgggtattatccgcgactgcaggattgctgacatcgttgataccgctatgcctatcactatctgtatcgcctatttcaacaactgcctgaatccgcttttttatggctttctaggaaaaaagtttaagcgatacttcttacaactgctgaaatacatcccccccaaggcaaaaagccattccaatctgagcacgaaaatgtcaacactatcctatcgaccctccgacaacgtgagctcttctacgaagaagcccgcaccgtgcttcgaagtggagtag

SEQ ID NO: 178988 - DNA, 1080 bp, synthetic construct
  misc_feature 1..1080: note = Description of Artificial Sequence: Synthetic coding sequence
  source 1..1080: mol_type = other DNA
atgatcctgaacagcagcaccgaggacggcatcaagcggatccaggatgattgtcctaaggctgggcggcacaattatatcttcgtcatgataccaacactgtattctataattttcgtggtcgggatcttcggcaactctctagtcgtaattgtgatttatttctatatgaaactgaaaaccgtggcctcagtgttcctgctaaacctggcattagcggacttgtgttttctactgacactgcccttatgggcagtgtacaccgccatggaatatcgttggcctttcggaaattatctgtgcaagatcgcgtctgcctctgtatcttttaacttatacgcctccgtgtttcttcttacctgcctctccatcgaccgctacctagccattgttcacccgatgaagtcgaggttgagaagaacgatgttggtagctaaagtcacgtgtatcattatttggctcctagctggcctggccagcctccctgcaatcatacatagaaacgtgtttttcatcgagaacacgaacatcacagtttgtgcattccactacgagtcccaaaatagcaccctgcctatcggcctcggcctgacgaaaaacatcctgggattcctgttcccatttttgatcatcctcacttcatacacccttatctggaaagcattgaagaaggcctacgagattcagaaaaataagcctaggaacgacgacatcttcaaaattatcatggcaatcgtgctgtttttcttcttttcctggattccacaccagatctttaccttcttggatgtcctaattcagctaggaatcatcagagattgccgaatcgctgacatcgtcgacaccgcaatgcccattaccatttgtattgcctactttaataactgcctgaaccccttgttttatggattcttgggaaaaaaatttaaacgatatttccttcagctgctaaagtatattccacccaaggctaagagccatagcaatctctccaccaaaatgagtaccctgtcttaccgcccaagcgacaatgtcagctcctccacaaaaaagcccgctccttgtttcgaggtggagtag

SEQ ID NO: 178989 - DNA, 1080 bp, synthetic construct
  misc_feature 1..1080: note = Description of Artificial Sequence: Synthetic coding sequence
  source 1..1080: mol_type = other DNA
atgatcctgaacagcagcaccgaggacggcatcaagcggatccaggacgattgcccaaaagccggccgccacaattacatttttgtcatgattccaaccctgtacagcatcatcttcgttgtaggaattttcggcaacagtttagttgtaatcgttatatatttctacatgaaattaaaaaccgttgcttccgtcttccttctgaatttggctttagctgatctctgcttcttgctaactctgcctctgtgggccgtgtacaccgccatggaatatcggtggcctttcggaaactacctatgtaagatcgcctccgcatccgtgtccttcaacctctacgcttctgtttttctcttaacatgcttgtcaattgacaggtacctcgctatcgtccaccccatgaaaagtaggctgagacggacaatgctagtcgcaaaggtaacttgcattatcatctggcttctggctggcctggctagcctgcctgccattatacaccggaacgtgttcttcattgagaatacaaatataactgtatgtgccttccattacgagagtcaaaactcaacacttcccatcggcttggggctgacgaagaatatcttggggtttcttttcccattcctcattatcctgacaagctacacgcttatctggaaggccctgaagaaagcatacgagatccaaaaaaacaagcccaggaacgatgatattttcaaaattatcatggctattgtgctgttctttttcttcagttggatcccccatcagatctttactttcctcgacgttttgattcagctgggcattattagggattgtcgaatagcggatattgtagacaccgctatgcctatcaccatttgtattgcttacttcaacaactgtctaaaccctctcttctatggtttcctaggtaaaaagtttaagaggtatttccttcagctactgaagtatatcccgcccaaagctaagagccattctaacctgtccactaaaatgagtacgctgagttaccgtccatcagacaacgtgtcatcgagtactaaaaagccagctccctgctttgaagtggaatag

SEQ ID NO: 178990 - DNA, 1080 bp, synthetic construct
  misc_feature 1..1080: note = Description of Artificial Sequence: Synthetic coding sequence
  source 1..1080: mol_type = other DNA
atgatcctgaacagcagcaccgaggacggcatcaagcggatccaggacgactgccctaaagccggcagacacaattatatctttgtaatgatccctactctttatagcattattttcgtcgtcggaatattcggaaactccctggtggtgatagtaatctacttttatatgaagctgaagacggtcgccagtgtctttctgctgaatctggccctggccgacctttgtttcctgctgactctccccctgtgggctgtgtacaccgcgatggaatatagatggccatttggaaactatttgtgcaaaatcgcctcagcaagtgtgagctttaacctctacgcgtcagtctttctgctcacttgcctctccattgaccgatacctggccatagtccaccccatgaagagccggctcagacgcaccatgctggtcgcgaaggtgacatgtattataatttggctgttggcgggactggcttcactgcctgcaattatccacagaaatgtttttttcatcgagaacacgaacattactgtgtgtgcctttcattatgagtcacagaatagcactcttccaatcgggcttggtctcacaaagaatatactgggtttcctgtttccgttcctcattatattgacaagttacaccctgatctggaaggccctgaaaaaggcctacgagatacagaagaataaacctcgaaatgacgatatctttaagatcattatggctatcgtgctgttcttctttttttcctggatcccccatcagatttttaccttccttgatgtgctcatccagctggggatcattcgggactgtcggatcgcagacatcgtggacaccgccatgccaattacgatctgtattgcctattttaacaactgcctgaatccactgttttacggcttcttaggaaaaaagttcaaaagatatttcctccagctgctcaagtacattccccccaaagcgaaatctcactcaaaccttagcaccaagatgagcaccctatcctatcggccaagtgacaacgtttcctcttctacaaagaagcccgccccctgcttcgaggtcgaatag

SEQ ID NO: 178991 - DNA, 1080 bp, synthetic construct
  misc_feature 1..1080: note = Description of Artificial Sequence: Synthetic coding sequence
  source 1..1080: mol_type = other DNA
atgatcctgaacagcagcaccgaggacggcatcaagcggatccaggatgactgccctaaagctggtaggcacaattacatcttcgtcatgattcctaccctttacagtattatcttcgtggtgggaatctttggcaactcacttgtggtcatagttatttatttttacatgaaactaaagacagttgcatcagtgttccttcttaatctggcgctggcggacttgtgtttcctgttgaccttgccactctgggcagtgtacactgcgatggaataccggtggccctttgggaactatctatgcaaaattgcatctgcctctgtctcatttaacctttatgcgagtgtgttcctgcttacctgtctgtctattgatcgctacttggctattgtgcatcccatgaagagtcggcttcggcgcacaatgctagtcgccaaggtgacatgcatcataatctggttgctcgccgggctggcctcactgcccgcaatcatccatagaaatgtcttctttattgagaacaccaacataacagtctgcgccttccattacgaaagtcagaattccaccctgccgataggcctggggctgaccaagaatatcctgggttttctttttccctttctcatcattctgacttcctatactctcatctggaaagcattaaagaaagcatacgaaatccaaaaaaataagcctagaaacgacgatatctttaaaattatcatggctatagtcctgttcttttttttttcttggattccacatcagatcttcacctttctggacgttctgatccaacttggtattatcagggattgcagaatagcagatatcgtggacaccgccatgcccataacaatatgcatcgcttacttcaacaattgccttaaccccctcttctatgggttccttggcaagaaatttaaaaggtacttcctccagctgctaaaatatatcccacctaaagccaagagtcacagcaacttaagcacgaaaatgagcactctgtcctatagaccctcagacaatgtctcctcctctacaaagaaaccagcaccatgttttgaggtggaatag

SEQ ID NO: 178992 - DNA, 1092 bp, synthetic construct
  misc_feature 1..1092: note = Description of Artificial Sequence: Synthetic coding sequence
  source 1..1092: mol_type = other DNA
atgaagggcaacagcaccctggccaccaccagcaagaacatcaccagcgggctgcacttcgggctggtgaatatcagtggaaataacgagtccaccctgaactgctcccaaaagccaagcgacaagcatctggacgcgatccccattttgtactatattattttcgtgattggttttctcgtgaacattgtggttgtgacattgttttgttgtcagaaggggccaaagaaggtcagctctatctacattttcaacttggcagtggccgacttgcttctgctagcaactctcccactctgggcaacgtactattcgtacagatacgactggctgttcggaccagtgatgtgcaaggtctttggatccttcttaacacttaacatgtttgctagcatcttcttcataacatgtatgagcgtggacaggtatcagagtgtcatctacccttttctgagtcagaggcgaaacccctggcaggcaagttacatcgtcccactggtttggtgtatggcttgcctgtcttccctcccaactttttactttcgtgacgtgcggacaatcgaatacctgggcgttaacgcctgcatcatggcctttccaccagagaagtacgcccaatggtccgccggaattgcgctgatgaaaaacattctgggcttcatcatacctctgatatttatcgccacttgctattttggcatcagaaagcacctcctgaagacaaacagctacggtaaaaaccgtattacccgggatcaagtcctgaagatggcagctgcggtcgttctggcgtttatcatctgctggctaccgttccatgttctgacgttcttagatgccctggcctggatgggcgtcataaacagctgtgaggtgattgctgtgattgatctcgcacttcccttcgccattctgctcgggttcactaactcctgcgtgaaccctttcctctattgctttgtcggcaaccgtttccagcagaaactccgaagcgtctttagagtgcctataacctggctccagggaaaaagagagtcaatgagctgcagaaaatcctcatctctaagagagatggagacgttcgtctcctag

SEQ ID NO: 178993 - DNA, 1458 bp, synthetic construct
  misc_feature 1..1458: note = Description of Artificial Sequence: Synthetic coding sequence
  source 1..1458: mol_type = other DNA
atgcggaagcgggccccccagagcgagatggcccccgccggcgtgagtcttcgggctaccattttgtgtttgctcgcttgggcaggactagctgcaggcgatcgtgtttatatccatcccttccatctggtcatccacaatgagtccacctgcgagcaattagctaaggccaatgctggcaaacccaaagaccccacctttattccggcgcctatccaggccaagacctctcccgtggatgagaaggcactgcaagaccagctggtgctggtggcagcaaaactggacaccgaggataaactgcgtgcagcgatggttgggatgctggccaatttcctggggtttagaatctacggaatgcatagcgaattgtggggggtggtgcatggcgcaaccgtgctctcaccaacagccgtgtttggaaccctagcctctctctatctgggagcccttgaccatactgccgaccggttacaagccattctgggggtgccttggaaggacaaaaactgtacttcccgactcgacgcacataaagtgctcagcgctctacaggccgttcaaggactcttagtcgcgcagggtagagcggattcccaggcgcagctgctcttgtctaccgttgttggagtcttcactgcgcccggtcttcatcttaaacagcctttcgtgcaggggctggctctgtatacaccggtggtcctgcctcggtcactggactttactgagctggacgtggctgccgagaagattgatagattcatgcaggcagtgactggctggaagactgggtgcagtctgatgggagccagcgtggatagcactctggcatttaatacgtacgtgcactttcagggcaagatgaaaggatttagcctcctggctgagccacaggagttttgggtggacaacagcacctcggtcagcgtccccatgctgtcaggcatgggcacctttcaacattggtccgacatccaggacaacttctctgtgacccaggtgccgtttacagagtcagcctgtctcctcctcattcagccgcactatgcttctgatctcgataaggtggagggcctcacctttcaacagaattcactgaactggatgaagaagttgtcacctcggacgatccatctgactatgccgcagctcgtgttgcagggatcttacgatctgcaggacctgttggcgcaggcagagttgcctgccatccttcatacagagttgaatttgcagaagctgtctaatgacagaattagagtgggcgaggtgctaaactccatctttttcgagttggaggcagatgagagggaacctaccgagagtacccaacagctgaacaagcctgaagtgttagaagtaacgctgaataggccatttctgtttgcagtttatgaccaaagcgccactgccctgcattttttagggcgcgtagcaaatcccctgtccacagcatag

SEQ ID NO: 178994 - DNA, 1212 bp, synthetic construct
  misc_feature 1..1212: note = Description of Artificial Sequence: Synthetic coding sequence
  source 1..1212: mol_type = other DNA
atgcggaagcgggccccccagagcgagatggcccccgccggcgtgtcactgcgcgccaccattctgtgcttactcgcatgggccggccttgcagctggggatcgtgtttacatccacccgttccacctggtcatccacaatgaatccacctgtgagcagttggccaaggctaacgccggcaagccaaaagaccctactttcattccagctccgatccaagctaagactagtcctgtggatgagaaggccctgcaggatcagctcgtccttgtagcagctaagttagacacagaggataagctgagagccgcaatggtgggcatgctggccaattttctggggttccgcatttacggcatgcactcagagctgtggggcgtggtccatggcgcaaccgtcctttctccgaccgccgtgtttgggaccttagcctccctgtatctgggcgctctggaccacacagccgacaggctacaagctatcctggacgtggccgctgaaaagatagacaggttcatgcaggccgtgacaggttggaagacggggtgttcattaatgggggctagcgtcgacagtactctggctttcaacacttatgtgcactttcagggaaagatgaagggattcagcctgctggccgaaccccaggagttttgggtagacaatagtacctccgtgtccgtccctatgctgagtggaatgggcacctttcagcattggtctgatatccaggacaactttagcgtgacacaagttccctttacagagtcggcctgcctgctactgattcagcctcattacgctagcgacctggacaaggtggagggcttgacctttcaacaaaatagtttgaattggatgaaaaaattgagcccacgtaccattcacttaacaatgccacaactcgtactgcaaggatcctatgacctccaggacctcctcgcccaggcagaactcccagccattctccacacggagctcaatttgcagaaactcagtaatgaccgaatacgcgttggcgaagtgcttaattctattttctttgagctcgaggcagacgaacgcgaaccaactgagagcacccagcaacttaacaagcctgaagtcctggaagtgaccctcaaccgccctttcttgttcgcagtttatgaccagtcagctacagctctccactttctcgggcgtgtcgcaaaccctttgtccaccgcttag

SEQ ID NO: 178995 - DNA, 1479 bp, synthetic construct
  misc_feature 1..1479: note = Description of Artificial Sequence: Synthetic coding sequence
  source 1..1479: mol_type = other DNA
atggtgaagttccccgccctgacccactactggcccctgatccggttccttgttcccctcggaatcacaaacatagcaatcgactttggagaacaagccctcaataggggaattgcagctgtaaaagaagatgctgtggagatgctagcatcgtatggcctggcatacagcttaatgaaattcttcactggaccgatgagtgattttaaaaatgtcggccttgtttttgtaaatagcaagagagacaggactaaggcagtgttgtgtatggtggtggctggagcaatcgccgcagtgtttcacacgctgatcgcctacagcgacctgggatactacattattaacaagctgcatcacgtggacgaatcagtgggcagcaagactcggagggcattcttatacctagctgcattcccattcatggacgccatggcgtggacccacgccgggattctcctaaagcacaagtattcattcctggtaggatgtgcttcaatatctgacgtgatcgctcaagtggtattcgtggctatccttctgcatagtcacctggagtgtcgagaacctctcctcatccccatcctgtccctctacatgggcgcattggtgaggtgtaccaccttatgcttggggtattataaaaacattcacgatatcattccagatagatctggacctgaactgggaggcgacgccacaatcagaaagatgttgtccttttggtggcctctcgcccttatattggcaacccaaaggatctctagaccaatagtgaatcttttcgtgagccgggatctagggggctctagcgccgctactgaggccgttgcaatccttacagcaacctatccagtggggcatatgccttacggatggctgaccgagattcgcgcagtgtatcccgcgtttgataaaaacaatccttccaataagttagtctcaactagcaatacagtgaccgcggcacatattaagaaattcacattcgtgtgcatggctttgtctctgaccctttgcttcgtgatgttttggacacccaatgtgtctgagaaaatcttgatcgacattattggtgtagactttgcttttgccgagctctgtgtggtgccactgcgtatttttagcttcttccctgtacctgtgaccgtccgcgcccacctgaccggatggttgatgactcttaagaagacattcgtgctagctccctcctccgtgctgcgaatcattgtgttaatcgcatctttagtcgtactgccgtacttaggcgtgcatggagcgaccctaggcgtgggatccctgttggctggcttcgtcggggagtctactatggttgcaatcgccgcatgctacgtttatagaaagcagaagaagaagatggaaaatgaatctgccacagaaggcgaagacagcgctatgacggatatgcccccaaccgaggaggtgactgacattgtggaaatgcgggaggagaacgagtag

SEQ ID NO: 178996 - DNA, 885 bp, synthetic construct
  misc_feature 1..885: note = Description of Artificial Sequence: Synthetic coding sequence
  source 1..885: mol_type = other DNA
atgggcgccctggtgcggtgcaccaccctgtgcctgggctactacaagaatattcatgacatcatccccgaccgtagcggaccagagctgggcggagatgcgacgatccgtaagatgctcagcttctggtggcccctggcactaattttggctacccaaaggatcagtaggcccattgtgaacctgtttgtgagccgcgacctggggggatctagcgcagcaaccgaggccgtggctatcctgaccgccacgtaccccgtgggccacatgccctacggctggctgactgaaattcgagccgtgtatccggccttcgacaaaaataacccctccaacaaattggttagcacatccaatactgtaacggctgcgcatatcaaaaagtttactttcgtttgcatggccctgtccctaactctatgctttgtgatgttttggacacccaatgtaagcgaaaaaattctgatcgacattatcggagtcgactttgcctttgccgaactgtgcgtcgtgccgcttagaatcttttccttctttccggtgccggtgacagtgcgggcacatcttaccgggtggttgatgaccctgaagaaaacttttgtgctcgcccccagctccgtgttaaggatcattgtgctgattgccagtttggtcgtgctgccttacctcggtgtgcatggcgccactctgggggtaggttctcttctggcaggattcgtgggagaatcgacaatggtggctatcgctgcctgctacgtttaccggaagcagaaaaagaagatggagaatgagtcagctaccgagggggaagatagcgctatgaccgacatgcctccaacggaggaggtaaccgatattgtagagatgcgagaagagaatgagtag

SEQ ID NO: 178997 - DNA, 471 bp, synthetic construct
  misc_feature 1..471: note = Description of Artificial Sequence: Synthetic coding sequence
  source 1..471: mol_type = other DNA
atgtggaccttcgtgacccagctgctggtgaccctggtgctgctgtcctttttcttggtgagttgtcagaacgtcatgcacatcgtccgcggctcgctgtgctttgtgctcaaacacatacatcaggagctcgataaagaacttggtgaaagcgaaggcttgtcggacgacgaagagacaatcagtacccgtgtcgttcggaggagggtatttctgaagggcaatgagtttcagaatattcccggcgagcaagtgaccgaagaacagtttaccgatgaacagggaaatatcgtcacaaaaaagattattaggaaggtcgtcagacagattgatttatcatctgccgacgctgcccaggaacacgaagaagtaacagtggagggtccattggaggacccctctgaactcgaagtcgacattgattattttatgaaacacagtaaagaccacacaagcactcccaacccgtag

SEQ ID NO: 178998 - DNA, 5694 bp, synthetic construct
  misc_feature 1..5694: note = Description of Artificial Sequence: Synthetic coding sequence
  source 1..5694: mol_type = other DNA
atggcccaggccgccaagcagctgaagaagatcaaggacatcgaggcccaagcattacaggaacaaaaggaaaaggaggagagcaaccgaaagagaagaaacagatcccgcgatagaaaaaagaaagcggatgcagcaacgtcttttctgagagccgcgcgcagcggcaaccttgacaaagcactagaccatctgcgcaacggagttgacattaatacctgtaaccagaatgggctgaacggactgcacctggctagcaaagaaggacatgtcaaaatggtcgtggaactgctgcataaggagatcattctggagactacaacaaaaaaagggaatacagctctgcacatcgcggctttagcgggacaagatgaggtggtgagagagttggtcaactacggggccaacgtgaacgcgcagtctcaaaagggcttcacacctctgtacatggccgcccaggaaaaccacctcgaggtagtcaagttccttctcgaaaatggtgcaaaccagaacgtagcaacagaagacgggttcactccactggcagtcgccctccagcaggggcatgaaaatgttgttgctcacctgatcaattacgggacaaagggcaaagtgcgactacccgcccttcacatcgctgcacggaacgacgacactcgaacagccgcagtcttgcttcagaacgatcccaacccagatgtgttgagcaagaccggttttacacctctacatattgccgcccattacgagaacctgaacgtggcacagctattactgaaccggggagccagcgtgaattttaccccccagaacggaattaccccgctgcacatcgcctcacgccgtgggaacgtgattatggtacggttgctgctggatcgcggcgctcagattgagacgaaaacaaaagatgagttaacccccctacactgcgccgcccgcaatggacatgttcgcatcagcgaaatcctgctagatcatggcgcacccatccaggcgaaaaccaagaacggactgtcccctattcacatggccgcccagggggatcatctggactgcgtgaggctgctgctccagtacgatgctgagatcgacgacattaccttggatcaccttacccctctgcacgtggccgcccactgcgggcaccacagggttgccaaagttctgctggacaagggcgctaagcctaacagtcgggctttgaatggcttcactccactccacatagcttgcaagaagaaccacgtccgagtgatggagctgcttctcaaaacaggcgcgtccattgatgccgtgactgagagtggtctcaccccactgcatgttgccagcttcatgggacacctgcccatagtgaagaatttgctccagaggggggcatcaccaaatgtcagcaacgtcaaagtggaaacaccactgcatatggcagctcgggcagggcacactgaagtcgccaagtacttgctgcaaaataaggccaaggtaaatgcaaaggctaaggacgaccagacccccttacattgcgctgcccgcatcgggcataccaacatggtcaagttattacttgagaacaatgccaacccaaacttggccacgaccgctggccacactcccttacatatcgccgcccgtgagggccatgttgaaacagttctggccctgctcgagaaggaggcttcccaggcgtgcatgacaaagaagggattcacccctcttcacgtcgcagctaaatacggaaaagtgagagtggcagagttactgctggagagagacgctcaccctaacgcagccggcaaaaatggcttgacccccctgcacgtagccgttcatcataacaacctggatattgtgaaacttctactccctaggggagggagtccccattcccctgcttggaacgggtacacacctctgcacatcgcggcaaagcagaatcaagtggaagtggctcgttctttgcttcagtacggtgggtcagctaacgctgagagcgttcagggcgtcacccctctccacctcgccgcgcaggagggtcatgccgaaatggtcgctctgttgctaagcaaacaggcaaacggaaacctaggaaataaatccggactcaccccattgcatctcgtggcccaggaaggtcacgtcccggttgccgatgtcctgattaagcatggagtcatggtcgatgctacgacccgtatgggatacactcctctgcacgtagcttctcattatgggaacatcaagctggttaagttcctcctacagcaccaggctgacgtaaacgccaagacaaagctgggctacagtcctctgcatcaggccgcacaacagggtcacaccgacatcgttacgttgttgctgaaaaatggcgccagtcccaatgaggtttcatcagatggcacaactcctctggccattgctaagcgcctgggttatatctcagtgaccgatgtgctcaaagtggtgacagacgagacaagctttgtgttggtcagtgacaaacatagaatgtcgttccccgagaccgttgatgagatccttgatgtctccgaggatgaaggcactgcgcacattacgattatgggcgaggagctgatatccttcaaggcagagagacgggattcacgggacgttgacgaggagaaagagttgctcgacttcgttcctaagctggatcaagttgttgaaagccccgccatcccacgcattccctgtgctatgcccgagactgttgtaattaggagtgaggaacaagagcaggcctcgaaagagtatgatgaggactcacttatcccctcttcacccgctacagagacttccgataatatctcacctgttgctagtcccgtccatacaggctttctagtcagctttatggtagatgccaggggcggaagcatgcggggctcaaggcacaacggcttgcgggtggtgatccctccacggacctgcgctgctccaacaaggatcacttgccgtttggtcaagccacagaagctctccacaccaccccccctggccgaagaggaaggactggcatctagaatcatagcgctcggacccaccggagcccagtttctcagtcctgtcattgtggaaattccacactttgcttcacacggtcgcggcgaccgtgagttggtggtgctacgcagtgaaaatggctcggtctggaaagagcaccgaagtcggtacggcgaatcctatcttgaccaaatcctgaacggcatggatgaagaattaggaagcttggaggaattagagaaaaaacgcgtgtgccgaattataaccaccgacttccctctctactttgttatcatgagcagactgtgccaagactacgacaccattggaccagaaggtgggtccctgaagagtaaactggtccctctggtacaggcgacatttcctgaaaatgcagtgactaagcgagtgaaactggcacttcaagcacaacccgtgcccgacgagctggtaacaaaacttctgggtaatcaggctacgttcagccccatcgtcacagttgaaccccggaggcgtaaatttcaccggcctatcggtttgaggatcccactgcctccatcttggacggataacccaagggattctggggaaggtgacacgacgtctctaagactcctatgtagtgtgatcggagggaccgatcaggcccaatgggaggacattacaggaactacgaagctggtgtacgctaacgaatgtgcgaattttaccacaaatgtgtctgccaggttctggctttctgactgcccaagaactgccgaagctgtgaatttcgccacattgctgtataaagagctcacagcagtgccttatatggccaagttcgttattttcgctaagatgaacgaccccagggaagggcggctcaggtgttattgtatgactgacgacaaggtggacaaaacactcgagcaacatgaaaacttcgtcgaggtggcacgttcaagggatatcgaggtgctcgaagggatgagtctgtttgctgagctcagcggtaatctcgttcccgtcaagaaggccgcgcagcagcgatctttccactttcaatcttttcgcgaaaaccggcttgctatgcctgtgaaggtgagggactcatcgcgcgagcccggagggtcgctgagcttcctgcgaaaggctatgaagtatgaagacacacagcatattctctgccacctgaacattaccatgccaccatgcgccaagggttctggtgcagaagaccgacgccgcacccccactccactggccctaagatactccatcctgtcagagtctacgccgggaagcttgagcggcaccgaacaggcagaaatgaagatggctgtaatatctgagcatctcgggttaagctgggccgaactggcccgtgagctgcagttctccgtggaggatataaatcgcatccgggttgaaaacccaaactcattgcttgagcagtccgtagccttgttgaatctctgggtgattagagagggacagaatgcaaatatggaaaatctgtatacagcactccagtctatagacaggggagagattgtcaatatgctggaaggtagcggtagacagtcccgaaatcttaagcccgatcgcagacacacagacagggattattcgttaagtccatcacagatgaacgggtactcgagccttcaagatgaactgcttagccctgcaagtctgggatgcgccctgtccagccccctccgagcggaccagtactggaacgaagtcgcagttctagacgccattcctctggccgccactgagcacgatacaatgttggaaatgagcgacatgcaggtgtggtccgccggattgacaccgagtctggttaccgctgaagactcgtccctggagtgttctaaagccgaggacagcgatgccactggtcatgaatggaaactcgaaggggcactcagcgaggagccccgtggccccgagctcggatcactggaactggtagaagatgatacggtggatagcgacgcaaccaacggactgatcgatctgctggagcaagaggaaggtcagcggtcagaagaaaaactaccggggtccaagagacaagatgacgcaaccggtgctgggcaggacagtgaaaacgaggtgtcattagtgagcggacatcaacgagggcaggccaggatcacccattcaccaaccgtgagccaggtgactgaacgtagtcaggaccgactgcaggattgggacgccgacgggtccatcgtgtcctacctgcaggatgctgcccagggatcgtggcaggaggaggtcactcaaggcccacactcatttcagggaactagcaccatgaccgagggcctggagcctggcggatcccaggaatacgaaaaagttctggtgagcgtgtcagaacacacttggactgagcagccagaggcagagagctcacaggctgacagagaccgccgtcagcagggccaggaggaacaagtgcaggaagcaaagaatactttcacccaggtagtgcagggtaatgaatttcagaatatcccaggagaacaggttaccgaggaacagtttaccgacgagcaaggcaacattgtgaccaagaagatcattagaaaagtggttcgtcagattgatttgtcgtctgccgatgctgcacaggaacacgaagaagatcacacttcaacccccaacccatag

SEQ ID NO: 178999 - DNA, 5643 bp, synthetic construct
  misc_feature 1..5643: note = Description of Artificial Sequence: Synthetic coding sequence
  source 1..5643: mol_type = other DNA
atgccctacagcgtgggcttccgggaggccgacgccgccaccagcttcctcagagccgcacggagcgggaacctcgacaaggccctcgatcacctgcgtaatggagtcgacataaacacatgcaatcagaatggcctgaacggcttgcacctcgcgtccaaggagggccatgtcaaaatggtggtggaattattgcataaagaaattatcctcgagactacgactaaaaaaggcaatactgcgttgcatatcgcagccctggccggccaggatgaagttgttagagaactcgtaaactacggtgcgaacgttaatgcgcagtctcagaaggggttcacccccctttacatggcggcacaggaaaatcatttggaggtggtcaagttcctgttagaaaacggagccaatcagaatgtggccacagaagatgggtttacgcctctcgcagtggccttgcagcagggccacgaaaacgttgtggcacatctgatcaactatggcaccaaggggaaggtgagactccctgccctgcatatcgctgctcgaaatgacgacactcgtaccgccgccgtgctactacagaacgaccccaacccagatgtcctctcaaagacaggctttacaccccttcacattgccgcgcattacgagaacttgaatgtcgctcagctgttgctcaataggggagcatcagttaatttcaccccacagaacgggatcacaccccttcatatcgctagcagaagaggaaatgtgattatggtaaggctactgttggaccgcggagctcagattgagaccaagaccaaagacgagctgacaccactgcattgcgccgcccggaatggccatgtgcggatctcagagattctcttggaccacggcgcccctatacaggcaaagaccaagaatggtctcagtcccatccatatggcggcgcagggggatcatctggactgtgttcgcctgctgctgcaatacgacgccgagattgacgatattaccttggaccacttgaccccactgcacgttgctgcccattgcggacatcacagagtcgcaaaggttctgctggataagggcgccaagccaaactctcgggccttgaacggtttcactcctctgcacatcgcctgcaagaaaaatcatgtgcgggtgatggaactcctcctgaagaccggggcttccatagacgccgtgacggaaagcggcctcacacccctccatgtggcatcatttatgggccacctcccaattgttaaaaatctgttgcaaagaggcgccagccctaacgtctccaacgtgaaggtggagaccccactgcatatggccgcccgcgccgggcacactgaggtcgctaagtacctcctccagaacaaagcaaaggtcaatgctaaggcaaaagatgaccagacccctttgcactgtgctgctcgaatcggccacactaacatggtaaagctcctgcttgagaataacgcaaaccctaatctcgctaccaccgcggggcacacaccacttcatatcgccgctagagaggggcatgtcgagacggttttggcccttctggaaaaggaagcaagtcaagcttgcatgactaaaaaaggattcacccctttacacgtggccgccaagtacggaaaagtgagagtggctgaactgctgctggagagagatgctcaccctaacgccgcaggcaagaacggcctcaccccgctacatgtcgccgtgcatcataacaacctcgacatcgttaaactccttctccctcgaggcgggtcccctcattcccctgcttggaatggatacaccccgcttcacatcgccgctaaacagaatcaagtggaagtggctcggagtctcctccagtatggtggttccgcgaatgcagagtctgtgcagggcgtcacccccctccatctggccgcccaagagggccacgccgagatggttgccctgttactgtcaaaacaggctaacgggaaccttggcaacaaatcaggactgacccctctgcaccttgtggcacaggaagggcacgtcccggttgctgacgtgcttatcaagcatggggtgatggtggacgctaccaccagaatgggctacactcctttacacgtggctagccattacggcaatatcaagctcgtaaagtttctcctgcagcaccaagccgatgtaaatgccaaaaccaagctaggctactcccccctccaccaggccgcccagcagggtcatacggatatcgtgacccttcttctcaaaaatggcgcttcccctaacgaggtctcttcggatgggaccacgcccctggccatcgctaagcggctggggtacatctctgtgacggacgtgttaaaagttgtcaccgatgaaacaagtttcgtcctcgtctccgataagcatagaatgtccttccctgagaccgttgacgagatattggatgtgtccgaagatgaaggggaagagttaatcagctttaaggctgaacgccgcgactccagagatgtcgatgaagagaaagagctgctagatttcgtgcctaaactggatcaagtcgtggagtctcctgccatccccaggattccatgcgctatgccggagaccgttgtgatcagatccgaagagcaggagcaggcgtcaaaggagtatgacgaagactcactgataccctcctccccagccactgaaacaagtgataatatatcccctgttgcatcacccgtgcataccggattcttggtttcctttatggtagatgcgagaggtggctccatgagagggagccggcacaacggattgagggtcgtaattccgccgcgcacctgtgctgccccaacacggattacgtgccgcctcgtcaagccacaaaagctttccacacccccccctttagccgaggaagaaggactggcaagtcggattatcgcattgggacctacaggcgcacagttcctgtccccagttatagttgaaattcctcattttgctagtcatgggcgaggcgacagagagctcgtcgtgctgcgcagcgagaatggcagtgtgtggaaggaacaccggagccgatacggcgagtcttacctggaccaaatcctgaacggaatggatgaagaactggggtctctggaggaactcgagaagaaacgagtctgcagaatcatcacaactgactttcctctgtacttcgtaattatgtctcgtctgtgccaggactacgacactatcggaccagaaggtggtagcctcaaatctaaactcgtgccactggtccaggctaccttcccggaaaatgccgtgacgaaacgggtgaagttggcccttcaagcccagccggtccctgacgagttggttaccaaactgctggggaaccaggctacattttcccctattgtgacagtcgaacccagacggaggaagttccatcggccaatcggcctacgtattccccttcctccatcctggactgataatccacgagactctggcgagggtgacaccacgtcactcagactcctgtgcagcgttattggaggcaccgatcaggcccagtgggaagacattactggaaccacgaagttagtgtacgcgaacgagtgtgctaactttacaaccaatgtttccgcccggttttggcttagcgattgtccaagaaccgcagaggccgtgaattttgcaactttactgtataaagagctaaccgcagtgccctacatggccaaattcgtaatctttgctaaaatgaacgatccgagagaaggcagactgagatgctattgcatgactgatgataaagtcgacaagacccttgaacagcacgaaaatttcgtcgaggtggcccggtccagggatatagaggtccttgagggtatgagcttgttcgccgaattaagcggtaatcttgtgccagtcaagaaagctgcgcagcagagaagttttcactttcagtccttccgggagaatagacttgccatgccggtcaaggtgcgggattcttcacgtgagcccggcggatctctttcctttcttaggaaggccatgaaatacgaagatacacagcatatcctttgccacctcaatataactatgcctccttgcgctaagggtagcggcgctgaagaccgtaggaggacacctacgccactggcactccggtactccatcctgagtgaaagcacccccggatctctgagcggtacagagcaggccgaaatgaagatggctgtgatttctgagcatctaggcctgtcctgggccgagctggctagagagctccaattttctgtggaggacatcaatcgtatcagggtcgagaatcctaattctttgttagaacagtcagtagctctgcttaatctctgggtgataagggagggacaaaatgcaaacatggaaaatctctacaccgcactacagagcattgacaggggcgaaattgtaaacatgctagagggcagcggacgacagtctaggaatttgaagcctgataggcggcacaccgacagagattattcactgtcacctagtcagatgaacggatattcatctctccaggacgaattactgagtcccgcctctttgggatgtgctctctcctctcccctgagggctgatcagtattggaacgaggttgcagtccttgatgccatcccactggccgccacagaacatgatacaatgctagagatgtctgacatgcaggtgtggagcgccggcttaacgccaagcctcgtaacagctgaggattcatcgctggagtgttcgaaagcagaggacagcgacgcaacaggacatgaatggaaactggagggcgcgctgagcgaggaacctaggggtccggagcttggctccttggagcttgtcgaggacgatacagtcgactcagacgccactaatggactaattgatctgctggagcaagaggaagggcaacgatccgaagaaaagctaccagggtccaaaaggcaagacgacgccactggtgccggccaggattctgagaacgaagtgtcgctggtgagcggtcaccagcggggtcaagctcggataacccatagccccaccgtttcacaagtcaccgagagaagtcaggacaggttgcaggactgggatgcggacggcagtatcgtgtcttatctgcaggatgccgctcagggctcttggcaagaagaagtcacacaaggaccacactcattccaggggactagcacaatgaccgaagggcttgagccgggggggtcccaggaatatgagaaggtactggtctcagtatccgaacacacttggaccgagcagcctgaagcagaaagctcccaagcagaccgcgacaggagacagcagggccaggaagaacaggtccaagaggctaagaatacttttacccaggttgtgcaaggaaacgaattccagaacataccaggagagcaggttaccgaggaacagtttacagatgagcaaggcaatattgttacgaaaaagatcatccgcaaagtagtgaggcagatagatctctcctcagcagacgcagcccaggagcacgaggaggtggagctccgcggctctggtctgcagcccgatttgatagagggacggaaaggggctcagattgtgaaacgggcgagcctgaagcgaggtaaacaatag

SEQ ID NO: 179000 - DNA, 468 bp, synthetic construct
  misc_feature 1..468: note = Description of Artificial Sequence: Synthetic coding sequence
  source 1..468: mol_type = other DNA
atgtggaccttcgtgacccagctgctggtgaccctggtgctgctgagtttttttctggtgagctgtcaaaatgttatgcatatcgtgaggggtagcttgtgcttcgtgctaaagcacatccaccaggagctcgacaaggagttaggggaatccgagggcctgtctgatgatgaagaaacaatatcaactagagttgtgaggcgtcgggtgttcctcaaaggcaatgaatttcagaatatccctggtgaacaagtgacagaggaacagtttacagacgaacagggaaacattgtgaccaagaaaatcatccgaaaagtcgttcgtcagattgacttgtctagtgccgacgctgcacaagagcacgaagaagtggagctgcgtgggtctggattgcagcctgatctcatagagggcaggaagggagcccaaattgtgaagcgagccagccttaagcgggggaagcaatag

SEQ ID NO: 179001 - DNA, 5646 bp, synthetic construct
  misc_feature 1..5646: note = Description of Artificial Sequence: Synthetic coding sequence
  source 1..5646: mol_type = other DNA
atgccctacagcgtgggcttccgggaggccgacgccgccaccagctttttgagagccgccagatccgggaaccttgataaagccctcgaccatctgaggaatggcgtcgacatcaatacgtgcaaccaaaacggactcaatggcctgcacctagcatccaaagagggacacgttaagatggtggtggagttgctacacaaggagatcatcctggagacaaccaccaaaaaaggaaataccgcgctgcatattgctgccctggctggccaggatgaggtagtaagagagttagtgaactatggggccaatgtgaacgcacagagtcaaaagggctttacccccctgtatatggcagcccaggagaaccacctggaggtggtgaaattcctgttggaaaacggtgctaatcagaacgtggccaccgaagatggatttactccactggccgtcgctcttcaacaggggcacgaaaatgtggtagcacacctgatcaactacggtacgaagggtaaggttcgtctgcctgccctgcatatagcagccaggaacgatgacacaaggactgctgcggtgcttctccagaacgatcccaaccctgatgtcctctctaagacaggcttcaccccactgcatatcgccgcgcactatgagaatttgaatgtcgcccagctgctgctcaaccgcggcgcttcagttaactttacaccgcaaaacggtattacaccactccatatcgccagccgcagaggtaatgtgatcatggttcgactgcttctggacaggggagcgcagattgagacgaagacaaaggatgagttgactccactgcattgcgccgctagaaacgggcacgtccgtatctctgaaatactgctggatcatggggctccaatccaagcaaagactaagaacggcttgagcccaatccatatggcagctcagggcgaccatctggactgtgtaaggcttctgctgcaatacgatgccgagatcgacgacattaccctggaccacctcacccctctccacgtagcggcgcattgcggccaccatcgcgtagcaaaggtcttgctcgataaaggagcaaaaccgaacagtcgggccctgaatggtttcacaccgctacatatcgcctgtaagaaaaaccacgtccgggtgatggaacttctgctcaagactggcgcgtctatagacgcggttacagagtcaggattaacacctctacacgtagcttccttcatgggacatctgccaattgtcaaaaacctgctgcaacggggcgccagccccaatgtgagcaacgttaaggtggaaactcctctgcacatggcagctcgggccggtcacaccgaagtggctaagtatctgcttcaaaacaaggctaaggttaatgccaaggctaaggacgaccagacgcccctacactgtgctgcccggattggtcacaccaatatggttaagctcctgctggagaataatgcaaatcccaacctggcaacgacagccggtcacacacctctgcacatcgcggctcgcgagggacacgtggagactgtgttggccctcctcgagaaagaagcctctcaagcttgtatgactaaaaaaggttttacaccgctccacgttgccgcaaagtatggcaaggtaagggtggccgagctgctgctggagcgggatgcccatcctaatgcagccggaaaaaatggcctgacgccactccatgtcgccgtacatcacaataatctggatattgtcaagttacttctccctaggggcgggtcaccccattcgcccgcttggaacggctatacacctctgcacatcgccgccaagcagaatcaggtggaagtggcgcgatcactgcttcagtatgggggatccgcaaatgctgagagcgttcagggggttacccccctgcacctcgctgcccaagagggacatgccgagatggttgccttattgttatccaaacaagctaatggtaacttgggcaacaagagcgggcttactccattacacctggtagcccaggaaggccacgtgcctgtggcggatgtgttaattaaacacggcgtcatggtcgatgcaacaacccgcatggggtatacacccttacacgttgcctctcactacggcaacatcaagctggttaagttcctcctccagcatcaggcggatgtgaatgctaaaaccaagttaggttattccccattacatcaagcagctcaacagggacacactgacattgtcactctgctcttgaaaaatggggcttctcctaacgaggtttcatctgatggaactactcctctagcaattgcgaaacgcctggggtacatatctgttactgacgtgctgaaagtcgtgacagacgagacttcttttgtgttggtttctgataagcatcggatgagcttccccgagaccgtggatgagatcctcgatgtgtcagaggatgagggggaagaactgataagtttcaaggcggaaaggcgtgatagccgcgacgtggatgaggaaaaagagctgttagatttcgtgccgaagcttgaccaggtggtggaatcaccagcaatccccaggatcccatgtgccatgcctgaaacggtggttattcgttccgaagagcaggagcaagctagtaaggagtatgatgaggactctttgatcccatcctccccagctaccgagaccagcgacaacattagtcctgtggcctctccggtgcatactgggtttctggtaagtttcatggtggacgctagaggagggtccatgcgagggtcccgccacaatggccttcgcgtcgttatcccacccaggacgtgcgcagccccaacacgaatcacttgccgactggtgaagccgcagaagctgtccactccccctccgttggctgaggaagagggcttagcatctagaattatcgctctgggccccaccggtgcacaattccttagccctgtaattgtcgagattccgcacttcgcctctcacggaaggggcgaccgggagctggtggtgctgcgctccgaaaacggtagcgtttggaaggaacatcgatctcgatacggagaatcatacttggaccagatcctgaatggcatggatgaagagctgggtagtttggaagagctggagaagaagcgggtctgtcgaattattactactgatttccccttgtactttgtgataatgtctcgactgtgccaggattatgacaccattggccctgaagggggttccctgaagagcaaacttgtgcccctcgtacaagctacctttcccgaaaatgccgtgaccaagcgcgttaagctggcattacaggcccaacctgtcccggatgaactggtcacaaaactccttggtaaccaggccacattctcacccatcgtgaccgtggaaccccgccggcgcaaatttcacagaccaattggcttgcggatcccactacctcccagctggactgacaatccgagggactcaggcgaaggagacaccacctctttaaggcttctttgcagcgtgattgggggaactgaccaggctcagtgggaagacatcactggcacgaccaagttggtgtatgcgaacgagtgtgccaattttaccaccaacgtttccgcacggttttggcttagtgattgccccagaacagctgaggccgtgaacttcgccaccttgctttataaggaactgaccgctgtcccttatatggccaagtttgtcatatttgcaaagatgaatgatccacgggagggacgactgagatgctattgcatgacagacgacaaagtggacaagacgttagaacagcatgaaaattttgtggaagtggctcggtctcgtgacattgaggttttggaggggatgtctttgttcgcagaactgtcagggaatcttgtccccgtgaagaaggcagctcagcagcgctcttttcacttccaatcattcagagagaatcggctcgctatgccggtgaaagtgcgagatagctcacgcgagccggggggttctttgagcttccttcgtaaagctatgaagtacgaggatactcagcatatcctctgtcacctgaatattactatgccaccctgcgccaaggggtccggagctgaggaccggcgcaggacccctacaccacttgctttaaggtattccatcctctctgagtcaacccctggcagtctttccggcacagaacaggcagagatgaagatggccgtcatatccgagcatttggggttgagctgggccgagctggctcgtgagctgcaattcagcgtggaggatatcaatcgcatccgcgtcgagaatcctaactccctgctggaacagtcagttgctctactgaatctgtgggtgattcgggaggggcagaacgctaatatggagaatctgtatactgccctgcagagtatagaccgcggcgagattgtgaatatgttagaaggtagcggcagacagtctcgaaaccttaaaccagatcgaaggcatacagaccgggattactcactgagtcctagccaaatgaacgggtactcatctctccaagatgagctgctcagcccagcatcactcgggtgcgctctctccagtcctctgcgtgcggatcagtattggaatgaggtggcagtgctcgacgcaataccgcttgcagcaactgagcacgacaccatgcttgaaatgtcagatatgcaggtctggagcgccggactgaccccatcattagtgaccgccgaggactcttctttggaatgtagtaaggccgaagattcagatgcgacagggcacgagtggaagctggagggtgcgctgtctgaggagcccagagggcctgagctcggatcactggaactcgttgaggatgatactgtcgattccgatgccacaaacggtctcatcgatctgctggaacaagaggagggtcagagaagcgaagagaaactgcccgggtctaaaaggcaagacgatgcgactggagccgggcaggactctgaaaatgaggtgtccttagtgagcggacatcagcgcggccaggctcggatcacacatagcccaaccgtgtctcaggtgacggaacgctcccaagatagactgcaggactgggacgcggacgggtctatcgtatcttacctccaggatgcagcacaagggtcctggcaggaagaagttacgcaagggcctcacagttttcagggaacatcgacaatgactgaaggcctcgaacctggtgggtcacaagaatacgagaaggtcctggttagcgtgagtgaacacacttggaccgaacaacctgaggccgagagctcacaggctgacagggatagacggcaacagggtcaggaggaacaggtgcaagaggctaagaatacttttacgcaagtggttcagggcaacgagtttcaaaacattcctggcgaacaggtcacagaagaacaatttacagacgaacagggaaacattgtcacgaagaaaatcatccggaaggtggtcagacaaatagacctgtcctccgctgacgctgcacaggaacatgaagaggtgacagtggagggcccactggaagatccatctgagctggaggtcgacatagactattttatgaagcacagtaaagatcacacgtccacgccgaacccatag

SEQ ID NO: 179002 - DNA, 330 bp, synthetic construct
  misc_feature 1..330: note = Description of Artificial Sequence: Synthetic coding sequence
  source 1..330: mol_type = other DNA
atgtggaccttcgtgacccagctgctggtgaccctggtgctgctgagctttttcctagtgtcatgtcagaacgtcatgcatatcgtgaggggatctctatgctttgtgctgaagcatattcaccaggagcttgacaaggaacttggggagagtgaaggactatccgatgatgaagaaaccatctcaacacgcgttgtaaggcggcgcgtatttctgaagggcaacgaatttcagaatattcctggtgagcaggtgaccgaggaacagtttactgatgagcagggcaacattgtgacaaagaaggaccacacttccacccccaacccctag

SEQ ID NO: 179003 - DNA, 5577 bp, synthetic construct
  misc_feature 1..5577: note = Description of Artificial Sequence: Synthetic coding sequence
  source 1..5577: mol_type = other DNA
atgccctacagcgtgggcttccgggaggccgacgccgccaccagctttctgcgagccgcgaggtctggtaatttggataaggcactggatcatctgcggaatggagttgatataaacacatgcaaccaaaacggattgaatgggcttcacctggcctcaaaagaagggcacgttaagatggtggtcgaactgctgcataaagaaattatcctggagacaaccaccaagaagggtaacacagcattgcatatcgcagcattggccggacaagacgaggtggtcagagagcttgtgaactacggagccaatgtgaatgcccagtcacaaaaaggctttacccctctgtacatggcagcgcaagagaaccacctggaggtcgtgaagtttctcctcgaaaacggagcaaaccagaacgttgcaaccgaagatggatttacccccctggccgtagcactacagcagggccatgagaacgtggtggctcatctgatcaattatggaactaaaggtaaagtgagactaccggcactccacatcgctgctcggaatgacgatacccggacagctgcagtgttgttacagaatgaccccaatccagatgtgctctccaagactggattcacaccccttcatatcgcggctcactatgagaatttgaatgtcgcacagcttctactcaaccgaggggcctccgtgaactttactccccagaacggtatcacgcctctgcatatcgcttctaggaggggcaacgtgatcatggtgcgactgctgctggatcgcggtgcccaaatagaaacaaagaccaaggatgaattaactcctctgcactgcgctgctcggaatggacatgtgcgtattagcgagatcctgctggaccatggagctccaattcaggcaaagactaagaacggactgtcaccaatacatatggctgcacaaggcgatcatctggattgcgtgagactgctcctgcagtatgacgctgaaattgatgacattaccctggaccacctgaccccactgcatgttgccgcacactgcggtcaccacagggtcgccaaggtgctactggataaaggggccaagcctaattctagagccctcaatggctttacccctctgcatatagcctgtaaaaaaaaccatgtacgcgtcatggagctcctcctgaagacaggcgcgtctattgatgctgtgacagaatccggattgacacctctgcatgtggcatctttcatgggacacctgcccatcgtcaaaaacctactccagaggggcgcttcacctaacgtttcgaatgtcaaagtggagactcctctacacatggctgctagggccggccatactgaagtcgctaagtatttactgcagaacaaggcaaaggttaacgcaaaagctaaggatgaccagacaccgttacactgcgcggcccggatcggtcacactaatatggtaaagctgctcttagaaaataatgccaatcctaacctggccaccacggccggccacactcctctccacattgccgctcgggaaggccacgtggagaccgtcctggccttattggagaaagaggcctctcaggcatgcatgacgaagaaaggtttcaccccccttcacgtcgccgctaagtacggcaaagtgagagtggcggaactgctgctggagagggatgcccacccaaacgccgccggaaagaatggcttaacccctcttcatgtcgcggttcatcataataatctggacatcgtaaaacttttactacctagaggaggctcccctcatagcccagcctggaatggctacacacctctgcacatcgccgccaagcagaaccaggttgaggtggctcgcagtctgctccagtacggaggaagcgccaatgcggaatccgtccagggtgtcacccccctgcatcttgctgcccaagaggggcatgccgagatggtagccttgctcctgtcaaagcaggctaacggcaacttggggaacaaatccggccttactcccctgcatttggtggcacaggaaggtcatgtgcccgtggcagacgtgctgataaaacatggagtcatggtggatgccaccacgcggatgggctacactccactgcacgtggccagccattacggaaacattaagctcgtcaagtttctgctgcaacaccaggcagacgtgaatgcaaaaacaaagctgggatattctccactccatcaagcggctcagcaagggcataccgacattgtcacactgttgttaaaaaacggggctagtcctaatgaagtttcctccgatgggacaacacctttagctatcgccaagcgcctaggctacataagtgtgaccgacgtgctaaaggtggtgaccgatgagacatccttcgtgttggtgagcgataaacatcgaatgtcattcccagaaacggtcgatgaaattttagatgtgtctgaggacgagggggaagagttaatttcgtttaaggctgaacggcgtgatagtcgtgatgtcgacgaagagaaggagctgctcgattttgtgcctaaacttgaccaggtcgtggagagccccgcaatacctcgtatcccctgcgctatgcccgaaacagtggtgatccggtcggaggaacaggagcaagcatccaaagagtatgatgaagattcgctgatacccagtagccccgctaccgagacttccgataacattagtccagtagccagccctgtgcatacaggcttcttagtctcctttatggttgatgcccgcggtggaagcatgcgcgggagtcgccataacggactcagagtggtgatacctccacgaacttgtgccgcccctactcgcatcacatgtaggctggtgaaacctcagaaactgtccactcccccgcctctggccgaagaagaaggactcgcaagcagaataatcgctctgggaccgacgggggcccagtttctgtcacccgtgatcgtggagataccccatttcgctagtcacgggagaggcgatagggagctagttgtgttgagatcagagaacggcagtgtctggaaggagcataggagtcgttatggggagagctatctggaccagatcctcaatgggatggacgaagagctagggtctcttgaagagctcgagaagaaacgcgtttgccggattattacgactgattttcctttgtatttcgtgatcatgtcgcgcctgtgccaggactatgacacaatagggcctgaaggcggatcccttaaatccaaattggtgccactagttcaggctacattcccagaaaatgcagtgacaaagcgggtgaaactagcactccaggcccagcccgtgcctgacgaacttgtcactaaattgctgggcaaccaggcaacctttagccccatcgtgactgtggaacccaggcggcggaagttccacagaccaatcggactgcggattcccctccctccctcatggacagataatccacgagacagcggggagggcgatacaacaagcctccggctcctgtgcagcgtaattggcggcaccgatcaagcccagtgggaggacataacaggtaccacaaagctggtctatgccaatgagtgcgccaatttcactaccaacgtctcagcccgtttctggctctcggactgtcctagaaccgccgaggctgtaaattttgcaaccttgctctacaaagagctcacagccgtcccatacatggctaagttcgttatctttgcaaagatgaacgaccccagggaaggccggcttcggtgttactgcatgacagatgataaggtggataaaacactggagcagcacgagaattttgtcgaagtcgctagatctagggacatagaggtgctggaaggaatgtcactgttcgctgagctgtcagggaacctcgtgcctgtcaaaaaggcggctcagcaaagatcattccattttcaaagtttcagggagaacagacttgccatgccagttaaggtaagggattcaagtagggagccaggcggctctctgtcctttctaagaaaagccatgaaatacgaagatacccagcatattctctgccacctgaatatcacaatgcccccttgcgcgaagggaagcggtgccgaagataggaggagaactccaactcctttggctctccggtactccatcctgagcgagagtacccccggtagcttaagcggcacagagcaggctgagatgaagatggccgtgatttcagaacatttggggctgtcttgggcagagttagctagggagttgcagttcagcgtggaagacatcaatagaatcagggttgagaaccccaatagcctgctggagcaatctgtcgcactgttgaacctatgggtcatacgggaaggtcagaatgccaacatggaaaatctgtataccgccctccagagcatcgacagaggcgagattgtcaacatgctggaaggttctggaagacagagtaggaatttgaagcctgatcggagacataccgaccgggattacagtttgtctcccagccaaatgaacggatacagctcactgcaagatgaactgctctcccctgcctccctgggctgcgcgctgagcagtcccttgcgggcagatcagtattggaacgaggtcgccgtgttggacgctatccctttggctgccactgaacacgacaccatgctcgagatgtcagacatgcaggtctggtcagcaggcctaacacctagtctcgtgactgcagaggactcgtccttggagtgttccaaggcagaagactcagacgccacgggtcatgagtggaagcttgagggcgccttgagtgaggaaccgagaggaccagagttgggctcactagaactggttgaggatgatactgtggatagtgacgctacgaatggcctcattgacctgttagaacaagaggaaggccaacgatccgaagagaaactgcccgggtctaaacgacaagacgacgccacaggtgctggtcaagacagcgagaatgaggtcagcctggtcagcgggcaccagcgtggacaagcaaggatcacacattcccctactgttagccaggtgaccgaacggtcacaggaccggctccaggattgggacgctgacggctctattgtgtcatatctgcaggacgcagcgcaggggtcatggcaagaagaggtgacacagggtccccattctttccagggaacatctacaatgactgaaggtcttgagcccggggggtcccaagagtatgagaaagtcctcgtgtctgttagcgaacacacttggacggagcagccagaggctgagagctcacaggccgatcgtgaccgacgccaacaggggcaagaggagcaggttcaagaagcaaaaaatacatttacgcaagtcgtgcagggcaatgagtttcaaaatatcccaggggagcaggtaaccgaggaacagttcactgacgagcaaggaaatattgtgacaaaaaaggtggagctgcgaggcagtggcctgcagccagatctcatcgaagggcgaaagggcgcacagattgtgaaacgcgctagcttaaagaggggtaagcagtag

SEQ ID NO: 179004 - DNA, 4560 bp, synthetic construct
  misc_feature 1..4560: note = Description of Artificial Sequence: Synthetic coding sequence
  source 1..4560: mol_type = other DNA
atgccctacagcgtgggcttccgggaggccgacgccgccaccagcttcctgcgggccgcccggtcaggaaacttggacaaagcccttgatcatctaaggaatggcgtggatattaacacctgtaaccagaatggactcaatggcttacacctggccagcaaagaggggcatgtgaaaatggtggtggaactattgcacaaagaaatcattctggagacgactacaaaaaagggaaataccgctctgcatattgcagccctagccggtcaagacgaggtggtgagagaactggtgaattatggtgcgaacgtcaatgcccaatctcagaagggattcacccccttgtacatggccgcccaggaaaaccacctggaggtggtcaagttcctgctggagaatggggccaaccagaacgtcgccacagaggacggcttcactccgctggccgtggccttgcagcagggccatgagaacgtagtggcacatttgatcaattacggaacgaagggaaaagtcaggctcccggctttacatattgccgcacggaacgatgacaccaggactgcagcagtgttgctgcaaaacgatcccaatcctgacgttcttagcaagactggattcacaccgctgcatattgcagcacactatgagaatctcaacgtggctcagctcctgttgaatcgcggagcatccgtgaacttcacccctcaaaatgggatcacacccctgcatattgcgtctaggagaggcaacgttattatggtgaggctgctgctggacaggggcgctcagatcgagacgaagaccaaggacgagttgacgcccctccactgcgccgccagaaacggacacgtacgtatatccgagatccttctcgatcatggtgcccctatccaggccaagaccaagaatggactgtcacccatccatatggcagcccaaggcgatcacctagattgcgtgcgactgctgctgcagtacgacgccgaaattgatgacatcacgctagaccatctgacgccactgcatgtggctgcccactgcggccaccatcgggtggcaaaagttctgctggacaagggggccaagccaaatagtcgcgctctaaacgggtttaccccgctgcacatcgcgtgtaaaaagaaccacgtccgtgtgatggaactgctgctgaagacgggcgcctccatcgatgccgtgaccgagtctgggctgacgcctctgcacgtggccagcttcatggggcatcttccaattgtcaagaatttactgcagaggggtgcttcgcctaacgtgagcaatgtgaaggtggagactccattacatatggcagcaagggccggacacactgaggtcgcaaagtaccttttacagaataaggctaaagtcaatgccaaggccaaggatgaccagactcctctccattgcgcagcccgcatcggacacactaacatggttaagctgcttttagaaaacaacgcgaatccgaatctggccaccaccgctggccacacccccctccacatcgccgcaagagaaggtcacgtggagacagtgctggccctcctagaaaaggaggcgagccaagcgtgcatgacgaagaaaggtttcacccccctacacgtcgccgcaaagtacggcaaagttagagtcgccgaactgcttctcgagcgcgacgcccatccaaacgcagccggaaagaatgggctgacgcctctacacgtggccgtccaccataataacttggatattgtcaaactgcttcttcccagaggaggatccccccacagccctgcctggaacgggtacaccccacttcatattgctgcaaagcaaaaccaggttgaggtcgcgcgaagccttttacagtacggtgggagcgctaacgccgagtcagtccagggcgtgacacctctccacctggctgcccaagaagggcacgccgaaatggtggccctgctcctgagtaagcaagcaaatggaaaccttggcaataaaagcggcttgaccccattacacctggtcgcccaggagggacacgtgccagtggctgatgtgctgataaagcatggagttatggtcgacgctaccactcggatgggctatactcccctccacgttgcttcgcactatgggaacatcaaactggtgaagttccttttgcagcaccaggccgatgtgaacgctaaaactaagttaggctatagtcctctccatcaagcggcacagcaagggcatactgatatcgtgacactgttactgaagaacggggcctcccctaacgaagtgagttccgacggtactactcctctggcaatcgccaagcgcctgggatatatttctgttaccgacgttctcaaagtggtaactgacgagaccagctttgtcctagttagcgataagcacaggatgagttttcctgagacagtggacgaaatcctggatgttagcgaagatgaaggagaggagttgattagctttaaagccgaacggagagacagtagggacgtagatgaggagaaagaacttttggattttgtgccaaagttggatcaggtggtggagagccccgcaattccacgtatcccctgcgcaatgcccgaaacagtggttatcagaagtgaggaacaagaacaagcttccaaggaatacgacgaggacagcttaatcccctcaagtcccgcaacagagacctcggacaacatctctccagtagcgtcgccggtacatactggcttcctggtgtcttttatggtggacgccagaggcggtagcatgcgaggcagccggcataatgggctgcgggtggttataccacctagaacttgcgccgctccaacaagaattacatgccgcctggtgaaaccgcagaagctgagcactcctcccccgcttgccgaagaagagggtctcgctagcagaatcatcgcactgggacccacaggagctcaattcttatcacctgtgatcgtggagatcccccattttgcatcacacggacgtggcgatagagagctggttgtgcttaggtcagagaacggcagtgtctggaaagaacacaggtcccggtacggggagtcctacttggaccagatcctgaacggaatggacgaggagcttggttccttagaggaattggaaaaaaaacgcgtctgtcgaatcatcaccaccgattttcctctttatttcgtgataatgtctcgcctctgtcaggactatgacacaataggacctgagggggggtcactgaagagcaagttggttcccttagtgcaggcaacgtttccggaaaatgcggtaaccaagcgggtgaaattggcactgcaggctcaacccgtgccagacgaactcgtgactaagcttttgggaaatcaagcaaccttttcaccaattgtgacagtagagccaagacgcaggaagtttcataggccaatagggttgcgcattccccttcccccaagttggactgacaatcccagggactccggcgagggtgatactacaagcctgcggctgctgtgcagcgtcatcggcggaaccgaccaagcccagtgggaggacatcaccggaaccaccaagttagtttacgccaacgaatgcgctaactttacgacgaatgtatcagcgcggttttggctgagcgactgtccgcggacagctgaggccgtgaactttgcaacactgctgtacaaggaacttacagccgtcccctacatggcgaaatttgtaatcttcgctaagatgaatgatccccgcgaaggcagactacggtgctattgtatgacagatgacaaagtggacaagaccttggaacagcacgagaacttcgtggaagttgccagaagtcgcgatattgaggttctggaggggatgtccctgttcgccgaattgagcgggaacctggtaccagtgaaaaaggccgcccaacagcgatcctttcacttccaatcatttcgggagaacaggctggcgatgccagtcaaggtaagggactcatcccgcgagcccggcggttccctgagctttctgcggaaagcaatgaagtatgaagacacccaacatatcctttgtcacttgaacatcacaatgcccccctgcgctaaaggaagcggggccgaggaccgcaggcggacacccacccctttggcactgaggtactcaatcctgtctgagtcaactcccggttctctgtctggcaccgagcaggccgaaatgaaaatggccgtaatttctgaacatctaggccttagctgggccgaacttgcgcgcgagctgcagttctctgtagaggatattaatcggatccgggtggaaaaccccaactctctgttggagcaaagcgtagcactgctgaatctgtgggtgattagggaagggcaaaacgctaacatggagaacttatatacagcattgcagagcattgatcggggcgagatcgtaaatatgttggagggctctggacggcaatcccgaaatcttaagcctgaccgacgccatacagaccgcgactatagcctttccccaagccaaatgaatggtatctcgaccaataatccatag

SEQ ID NO: 179005 - DNA, 5505 bp, synthetic construct
  misc_feature 1..5505: note = Description of Artificial Sequence: Synthetic coding sequence
  source 1..5505: mol_type = other DNA
atgccctacagcgtgggcttccgggaggccgacgccgccaccagcttcctcagagcagcccgatctggcaacctggacaaggccctggatcacctgcggaatggggttgacataaacacctgtaatcaaaatggcttaaacggcttgcacctagcatcaaaggaagggcacgtcaagatggtggtggagttgttgcacaaggagatcatcctcgagaccacgactaagaagggcaatacggctctccatatagcggcattggccggccaagacgaggtcgttcgagaactagtgaattatggggcaaatgtcaacgcccaaagccagaaggggttcactccattatacatggcagcacaggagaaccacctcgaggttgtgaagttcttgcttgaaaacggcgccaaccaaaacgtggccacagaagatggctttactccccttgctgtcgctctccagcagggccatgaaaatgtcgtggcgcacttaatcaactatggtactaaaggcaaagttcggctgcctgcactccacatagccgcaagaaacgatgatacacggaccgcagcagtgctgttgcagaacgacccaaaccccgatgtcttgtccaagaccggcttcacccctctgcacatagctgcccattatgaaaacttgaatgtggcccaactgttactgaatcgcggtgcttcagtgaacttcacgcctcagaacggaattaccccactccatatcgcaagtaggcggggaaacgtgattatggtcaggctgctattagaccgcggggcccaaatcgagacaaaaacaaaggatgagctgacccccttgcactgtgcagcccgaaatggccacgtaaggatctctgagattcttctggaccatggcgctccaatccaggcaaaaacaaaaaacggactgagtccaattcatatggccgctcagggcgatcacctggattgcgtgcgtctgctcctgcaatatgacgccgaaatcgacgacatcactctggatcacctgacgccgcttcatgtggccgcacattgcggccatcaccgagtagccaaggtgttgcttgataaaggcgcgaagcccaactcacgcgccctaaacgggttcactcccctgcatattgcctgtaagaagaaccatgtccgggtcatggagctgctgctgaagacaggcgcctctatcgatgccgtgacagaatccgggttaactcctctgcatgtggcaagctttatgggccacttgccgattgtgaagaacctacttcagcgcggtgctagccctaacgtgtcaaacgtgaaggtagaaactccccttcacatggctgctagagccgggcataccgaggtggccaagtacctgttgcagaataaggccaaggtcaacgctaaggccaaggacgatcagaccccactgcactgcgccgccaggataggacacaccaacatggtaaaacttctgttggagaataatgccaatcccaatcttgccactacagccgggcatactccactgcacattgcggcgcgcgaaggacatgtcgaaaccgtcctggctctcctggaaaaggaagcatcacaggcctgcatgaccaaaaagggcttcacaccattacacgttgccgcaaagtatggcaaggtccgcgtggccgaactcctactggagagagatgcgcaccccaatgccgcaggcaagaatggactgactcccctacacgtcgccgtgcaccataataacctagatatcgtgaagctcctgttgccccgcggaggatctccgcacagccctgcctggaacggatacacgccactccacatagcagctaagcaaaatcaagtcgaggtggcccgttcactgttgcaatacggcggctccgcgaacgcagagtcagtacagggcgttacacctctgcatctggcagcgcaggaagggcatgccgagatggtggccctgttgctgagtaagcaggcaaacggtaacctgggcaacaagtccggccttactccacttcacttggtcgctcaagaaggtcacgtccccgtggcggacgtattgatcaaacatggagttatggtagacgccaccacaagaatgggctacactcccctgcacgttgcatcgcattacggcaatatcaaactggtgaagtttctgctccaacatcaggcagacgttaacgctaaaaccaaactgggatactcaccccttcatcaggcagcacagcagggccataccgatattgtgaccttactgctgaagaacggagcaagcccgaatgaggtaagcagcgatggcaccacaccactggcgattgctaaaaggttgggctacatcagtgtgactgacgtgctgaaggtagtcaccgacgagacaagtttcgtgctcgtttcagataaacaccgcatgtccttcccagagaccgtcgacgagatcctggatgttagtgaggacgagggcgaagagctgatttcatttaaagctgaaagaagagacagccgtgatgttgatgaagaaaaggagctcttagatttcgtgcccaagttagatcaggttgtagagtctcctgcaatccctagaatcccctgcgcaatgccagagacggttgtgattcggagtgaggagcaggaacaggcgagtaaggagtacgatgaggactctctgatcccctcatcaccagcgacggaaacatctgacaacatttccccagtggcttcaccagttcacaccggttttttggtgagctttatggtggacgctcggggtgggagtatgagaggctctcgccacaacggcctgcgggtggtcataccccctaggacttgtgcggcgcccacacggatcacctgtcgcctcgtgaagcctcagaagctctccactccaccacctttggctgaggaagaagggctcgcatcccggatcatcgctcttggacccacaggcgcccagttcctatctcctgtgattgtggagatcccacacttcgcttcccacggccggggggatagagagctagtcgtgcttaggtctgagaatgggtcggtgtggaaagagcaccggtcacgctacggagaatcatacctggaccagatcctcaacggcatggacgaagaactcggaagcctcgaggagctcgaaaagaaaagagtctgccgcatcatcacgaccgactttccactgtattttgtgataatgagtagactttgtcaggactacgacactatcggacccgaggggggatcgctgaagtccaaattggttcccctggtccaagccactttccctgagaacgcagtgacgaagcgtgtaaaacttgccctgcaagcccaacccgtgcctgacgaattggtaactaagctgctcggaaatcaagcaacttttagccccattgtgacagttgaaccgcggcgcaggaagttccaccggcctattggcttgaggatcccattgcctccatcctggaccgacaacccgagagacagcggcgagggagacactacctcccttaggcttctctgtagcgtcatcggggggaccgatcaggcccagtgggaggatattactggcacaacaaagctggtgtatgcaaatgaatgtgccaacttcacaactaacgtttctgccaggttctggttatctgactgtccacggactgccgaagccgttaactttgctacactgctttacaaagaactgaccgcagttccctacatggccaaattcgtgatatttgcaaaaatgaacgatccccgggagggcagactgaggtgctactgtatgactgatgataaagtagataagaccctagagcagcatgagaattttgtggaggtggctagaagtagggatatcgaggtcctggaaggaatgtccctattcgctgaactgtccggtaatctcgtcccagtgaagaaggccgcccaacagcgctcttttcattttcagtctttcagggagaatagactagccatgcctgttaaggtgcgcgacagcagtagagagccagggggaagcctgagcttcttgcgtaaagccatgaagtacgaggatacccagcacatactatgtcatctcaatatcaccatgccgccctgtgctaaagggagcggagctgaggatcgtcggcggaccccaacaccgcttgcacttaggtattctattctcagtgagagtactccaggcagcctgtctgggacggaacaggcagagatgaaaatggcagtaattagtgaacacttagggctctcgtgggccgagctcgccagagagttgcagttttccgtggaagatatcaacagaatccgcgttgaaaatccgaactctctccttgagcagagcgtggccctgttaaatctgtgggttataagggaggggcaaaacgccaatatggaaaacctgtacacagcactgcagagcatcgaccggggcgagatcgtgaatatgcttgaaggctctgggcgccagtccaggaacttgaagccagataggcgccacacggaccgggactacagcctgtcaccctcccagatgaatggatactcatcactgcaggacgagttacttagtccagcctccctgggttgtgccctgtcttccccactcagagcggatcagtactggaacgaggtagccgtactggacgctattccactggccgctaccgagcacgacacaatgctggaaatgtctgatatgcaggtgtggagcgctgggctgacccccagcctggtgactgcggaggactcatctcttgagtgtagcaaagcagaggattccgatgcaacaggccacgaatggaagcttgaaggggccctgagcgaagagccacgtggtcctgaactgggcagtttggaactggtggaggacgatacagtggactctgacgccacaaacggtctgatcgacttgctggaacaggaggaaggtcagcgatcagaggaaaaactgcccggaagcaagcgacaggacgatgccactggagccggccaggactctgagaacgaggtgtccttggtttctggccatcaaaggggccaagcccgtattacacacagcccaactgtgtctcaggtgacagaaagaagccaggaccgtctccaggactgggacgccgacggaagtattgtaagctatttacaggatgccgcccaggggtcttggcaagaggaggttacccaggggccacactcttttcagggcacatccaccatgacggaaggattagaaccaggcggtagccaagagtacgagaaggtcctggtgtctgtaagtgagcatacatggactgagcagcccgaggcagaatcatcccaggccgaccgagatcgcaggcagcagggacaggaggaacaggtgcaagaggcgaagaatacgttcacacaggtcgttcagggaaatgaatttcagaacattcctggggaacaagtgactgaggagcagttcaccgatgaacagggcaatatcgtgactaaaaaggaccatacgtctacccccaacccctag

SEQ ID NO: 179006 - DNA, 5718 bp, synthetic construct
  misc_feature 1..5718: note = Description of Artificial Sequence: Synthetic coding sequence
  source 1..5718: mol_type = other DNA
atgccctacagcgtgggcttccgggaggccgacgccgccaccagcttcctcagagctgccagaagcggcaacctggacaaggccttggaccacttaaggaacggagttgacataaatacctgcaaccagaatggtttgaatggtctccacctcgccagcaaggagggacacgtcaaaatggtggtcgagctgttacacaaggagataattttggagaccacaacaaaaaagggtaacacagcactccacatcgctgcactggccggccaggatgaagtagtgcgtgaacttgtgaactacggagctaatgtgaatgcacagtcccaaaaggggttcacgccattgtatatggcggcccaagaaaaccatctggaagtcgtgaagtttttgcttgaaaacggagcaaaccagaacgtggccacagaagatggcttcaccccactcgcggtggccttacagcaggggcacgaaaacgtggttgctcaccttattaactatggaacaaagggaaaagtgaggttacctgcacttcatattgccgctaggaatgacgacacacggactgctgcggttttgttgcagaacgaccccaatcctgatgtgctgtccaagactgggtttacccctctccatatagccgcgcattatgagaacctcaatgtggcccagttgctgttgaatcgcggggcttccgtcaatttcacgccccaaaatggcataacaccacttcatattgcgtccaggcgaggaaacgttataatggtgaggcttctcctggaccgaggagctcagattgagacaaagacaaaagacgagctgacacccctgcattgcgctgcccgaaacggtcacgtgcgcatctcggaaattctgttggatcatggagcccctatacaggccaaaacaaaaaatgggcttagtcctattcatatggcggcccagggggatcatcttgattgcgtgcgtttgctgcttcaatacgacgcagagatcgacgatatcacactggatcacctcacccctctgcacgtggcagctcattgtggtcatcaccgtgtggccaaggtgctgctagataagggggcgaagccaaattcccgtgctttgaacggatttacacccctccacatcgcttgtaaaaagaatcatgtacgagtgatggagttgttactgaagaccggcgccagtatcgatgccgtgactgaatccggtttgactcctctgcacgtcgcctccttcatggggcatctcccgatcgtgaagaatcttctgcaaagaggtgcaagcccaaatgtgtcaaacgtaaaggtggaaaccccccttcacatggcagctagagcaggccacacggaggtagctaaatacttattacaaaacaaggctaaggtcaacgcaaaggctaaggacgaccagacccccctgcattgtgctgctcggattggacacaccaacatggtgaagctgctcctcgagaacaacgctaaccccaatcttgccacaaccgcgggccacaccccgctgcacattgcagcacgagaaggacacgtcgagaccgtcctagcacttttggagaaggaggctagccaagcatgtatgacaaagaagggatttacccctcttcatgtcgccgcaaagtacggcaaggtgagggtggctgagttactattggaacgcgacgctcacccaaacgcagcaggaaaaaatggcttaacccccctacacgtggcagttcaccataataacctggacattgtaaagttactattgcccaggggcggctcaccgcatagccctgcttggaacggatacactcctctgcacattgctgcaaagcagaatcaggtcgaggtggctcgctcactgctgcaatacggtgggagcgcaaacgccgagagcgtgcagggagtgacccccctacacctggcagcccaagaaggccatgccgaaatggtggccctgctccttagtaaacaggcaaatgggaacctaggtaacaaaagcggtttgaccccattgcatctcgtcgcccaagagggacacgttccagtagccgacgttctcatcaagcatggcgtgatggtggatgccactactagaatgggctatactcctttacacgtcgccagccactatggaaatataaaactggtgaagtttctgctgcagcatcaggcagacgtaaatgccaaaaccaaactcggatactccccgctgcaccaggcagctcagcagggtcacacagatatcgtcacactactcctcaaaaacggtgcgagcccgaatgaggtcagctccgacggaactacccctctggcgatcgcaaaaaggctggggtacataagcgtgacagatgtattaaaggtcgtgaccgacgaaactagctttgtgctggtaagtgataagcatagaatgagctttcccgaaactgttgatgagatcctcgacgtaagtgaagacgaaggcgaggagctgatctccttcaaggctgaaagacgcgacagtagagatgtggatgaggagaaagaactgctggacttcgtcccaaagctcgaccaggttgtggagtctcccgccatccctcggatcccatgcgcaatgccagagaccgttgtcatccgatccgaagagcaggagcaggcatctaaggaatacgacgaagactctcttatcccgagttccccagccacggaaacatccgacaatatcagccccgtagcgtctccagtccatactggattcctggtcagttttatggtggacgcccggggggggtctatgaggggctctcggcacaatggattaagagttgtgatcccccccaggacttgcgccgcccctacacggatcacatgccgcttagtaaaacctcagaagctctccacgccgccacccctcgcagaagaagaaggactcgcaagtaggattatcgccctcggccctactggagctcagtttttgtccccggtcatagtggaaatcccccatttcgcttcacacggcaggggtgacagagaacttgtagttctgagaagcgaaaatgggtcagtctggaaggaacatagaagtaggtatggtgagtcctatctggaccagattcttaacggcatggacgaggagctgggtagtctcgaggaacttgagaagaaacgagtctgtaggatcatcactactgacttcccactttacttcgtgatcatgtctagactctgccaagattacgatactatcggtcccgaagggggatcattgaaatctaaactggtgcctctggtccaggcaacattcccggagaacgccgttacaaaaagagtgaaactggctctgcaagcacagcccgttcccgatgagctggttaccaagctgctgggtaaccaagctacctttagccccattgtaaccgtagagcccagaagacgaaaattccaccgccctatcggactgcgcatccccctcccacctagctggactgacaacccaagggatagtggagagggtgatacaacgagtctcagactactctgttctgtaatcggtgggactgaccaagcccagtgggaggacattaccggtactaccaagttggtgtacgccaatgaatgcgcgaacttcacaaccaacgtgagcgctaggttttggttaagtgattgtcctcggaccgctgaggccgtcaactttgctaccctgctgtataaggagctgacagccgttccatatatggcgaagttcgttatcttcgctaaaatgaacgaccctcgggagggacgtctgagatgttactgtatgacagatgataaagtagataagactttagagcagcatgaaaacttcgtcgaggtggctaggagcagggacatcgaggtgctggagggaatgagtctcttcgccgagctatcaggaaacctggtgcccgtgaaaaaggccgctcagcaaagatcatttcatttccagtcttttcgggaaaatcggcttgccatgccggtaaaggtacgcgatagtagccgagagcccggtggttctctgagcttcctcagaaaggccatgaaatatgaggacacccagcacattttatgtcacttgaacattaccatgcccccttgcgccaaagggtccggcgcagaggatcggcgacggacacctactcctctggctttgaggtacagcatcctctcagaatctactcccggttccctcagcggcaccgaacaggccgaaatgaaaatggccgtgattagtgagcacctcggccttagttgggccgaactggccagagaacttcagttttccgttgaagacatcaaccgcattcgggttgaaaatcccaacagcctcctcgagcaaagtgtggccctattgaacctctgggtcattcgagagggacagaatgcaaatatggaaaacctgtacacagccttgcagagcatcgacagaggagagattgtcaacatgctcgagggaagcggccggcagtctcgaaatttaaaacccgacagacgtcacaccgatagagactattctttatcacccagccagatgaatggatactcctctctacaggacgaattgctgtctcctgcgtcccttggctgcgccttaagttctcctctccgcgccgatcagtattggaacgaagtcgctgtgctggatgccatccctttggctgcaaccgagcatgatacaatgcttgagatgtccgatatgcaggtctggagcgctggcctgactccaagtttggtgacagctgaggatagttccctggagtgtagcaaagctgaggactccgatgctacagggcatgagtggaaactggaaggcgctctgtctgaggagcccagaggccctgagcttggaagcctggaattggtcgaagatgacaccgtggactctgacgcgactaacggactcattgatctccttgaacaggaagaaggacagaggtctgaggaaaagctaccagggtcgaagcggcaggatgacgcaacaggcgccggacaggacagcgagaatgaggttagcttagtgtctggacatcagagaggtcaggcccggattacccacagtcccacagtgagtcaagtgactgagcgttctcaggaccggcttcaggattgggatgctgatggcagcattgtaagttacctgcaggacgcggctcagggctcctggcaggaggaggtgacccaaggcccacattcctttcaaggaacttccacgatgaccgaaggcctggaacctggcggatcccaggagtatgaaaaggtgctcgtgagcgtgagtgagcacacctggaccgaacagccggaagccgagagttcacaagccgaccgagatagacgtcaacagggccaggaagaacaagtacaggaagccaaaaacacattcacccaagtggtgcaggggaatgaattccagaacatcccgggtgagcaggtcacagaggagcaatttactgatgagcagggcaacattgtcaccaaaaagataatcaggaaggtggtcagacagattgatctttccagcgcagatgccgcccaggaacacgaggaagtcacagttgagggtcccttggaggacccttccgaattggaagtcgatattgattatttcatgaagcactctaaagtggagctgcgaggatctggtttacagcccgacctgatcgagggccgcaagggggcccaaatcgtaaaaagggcgtccctaaagaggggaaagcaatag

SEQ ID NO: 179007 - DNA, 5421 bp, synthetic construct
  misc_feature 1..5421: note = Description of Artificial Sequence: Synthetic coding sequence
  source 1..5421: mol_type = other DNA
atgccctacagcgtgggcttccgggaggccgacgccgccaccagcttcctgcgcgcagcgaggtccggaaacctggataaggcactggaccacctccgcaatggggtcgatatcaatacatgcaaccagaacggactgaacggactgcacctggcctccaaagagggtcacgtgaaaatggtggtggagttactgcataaagaaatcattctggagacaactacaaagaaaggaaataccgctctacacatcgctgccctggccggccaagatgaagttgtgcgcgagctcgttaactacggggccaacgttaacgctcagtctcaaaaaggctttactcctctatatatggccgcacaggaaaatcatctcgaggtggtcaagttcctccttgaaaacggggccaatcagaatgtggccacagaagacgggtttacaccactcgcggttgctttacagcagggtcacgaaaacgtagtagcccaccttatcaattatggcacaaaaggcaaagttcgcctgcccgccctgcacatagccgccaggaatgacgacactcgtacggccgcagtgctgttacagaacgatcccaatcctgacgtgctgagtaaaaccggattcactcccctgcacatcgccgcacactatgaaaaccttaacgtggcacagctgctgcttaatcggggcgccagtgtcaatttcacccctcagaacggtataactcctctgcatatcgccagccggcgcggtaacgtcattatggtcagacttctgctggaccggggggcacagattgagacaaaaacaaaggacgagctgacaccattgcactgcgctgctaggaatggacacgtccgcataagtgaaatactcctggatcacggagccccgattcaagccaagaccaaaaatggcttatcacccatccacatggctgctcagggcgatcatctggattgcgtccggcttctcctgcagtatgatgccgaaatcgatgatattacactggatcatctcacacctctccatgtcgccgctcactgcggccatcatagggttgccaaggtgctcctggacaaaggcgctaagccaaacagtagagccctgaacggtttcactccactacacatcgcttgtaagaaaaaccatgtccgagtcatggagttgttgttgaagactggagcatctattgatgccgtaacagaaagcggacttacgcccctccatgtggcaagcttcatgggacatctgccgattgtgaagaatctgcttcagcggggagcctcaccaaatgtctccaacgtgaaagtcgaaacccccctgcatatggcagccagagccggtcataccgaggttgcaaagtatcttttgcagaacaaagccaaggtgaacgcaaaagctaaagacgaccagacaccactgcattgtgcagccaggatcggccatactaacatggtgaagcttttgctggagaacaatgctaatcctaacctggctacgaccgcagggcacacacctctacacattgcagcaagagagggacatgtggagacggtgctggcattacttgagaaggaagcctctcaggcctgtatgaccaagaaaggcttcactcctctccacgtggccgccaagtatggcaaagttagagtggcggagctccttctcgagcgcgatgcccacccaaacgcagccgggaaaaacgggctgacgccactgcacgtggcagtgcaccataacaatctggacatcgtcaagctcttactcccacggggggggtctcctcactccccagcctggaatggatatacacctttacatattgccgcaaagcagaatcaagtggaggtggcacgctctcttctccagtatggaggctcagccaatgccgagtccgttcagggggttacacctttgcacctggcagcccaggaaggacacgccgaaatggttgcgctactactgtctaaacaagcaaatggtaatttaggaaataagtcgggcttgaccccactgcatctcgtcgcacaagagggccacgtgccggtagctgatgttctcatcaaacatggtgtcatggtcgacgccaccaccagaatggggtacacccccctccatgtcgcaagccattatggcaacatcaagcttgtgaagtttctactgcagcatcaagcagatgtcaatgccaaaaccaagctgggctactctccattacaccaggctgcgcagcaaggacatacagacatcgtcaccctgctgttgaagaatggagctagccccaatgaagtctctagtgacggcactacccccctcgccatagctaaacgcttgggctacattagcgtcaccgatgttctgaaagtggttacagatgaaaccagcttcgttctggtgtccgataagcataggatgtctttccccgagactgtggacgagatcttggacgtttcagaagatgaaggtgaagagcttatttctttcaaagcagagcggcgggacagtcgggacgtcgacgaggagaaggagttacttgacttcgtgccgaaactggatcaggtggtggaaagtcccgcgattccccggatcccttgcgctatgcccgagaccgtcgtgattcgaagcgaggagcaggaacaagcgagcaaagaatacgacgaggactccctgatcccatcgtctcctgccacagagacgtcggacaacattagtccagttgcatcccctgttcacactggcttcctggtgagtttcatggtggatgctagaggcgggagtatgagaggtagccggcataacgggcttcgagtagtgatcccgccaagaacctgtgccgccccaacccgcattacctgtcgcctggtgaagcctcagaagctctccacgccgccgccattggccgaggaggaggggctggcctcaagaataatagcactcgggccaactggagcccagtttctgagtccggtgatcgtggagatcccacacttcgcctctcatggccgcggtgatcgagaactggtagtgctgaggtctgagaacggctctgtatggaaagagcaccgcagccggtacggcgagtcataccttgaccaaattctgaatggaatggatgaggaattgggctcgttggaggaactagagaagaagcgtgtatgccgcattatcacaacggactttcctctctatttcgtcattatgtccaggttgtgccaggattacgacaccatcggacccgaggggggcagcctgaaaagtaagttggtcccattggtccaggccacattccctgaaaacgccgttactaaaagagtaaaactcgctttgcaggcccagcctgtgcccgacgaattagtgaccaaactgctcgggaaccaggccaccttctccccaattgtgacggtagagcctcgtaggagaaaatttcacagacccattggtcttagaattcccctgccccccagctggacggacaatcccagagattcaggcgaaggcgacaccacaagtctccggcttctgtgctccgtgatcggcgggaccgatcaggcccagtgggaggacattaccggaacgaccaagctcgtgtacgcgaatgagtgtgcgaacttcactacaaatgtctctgccaggttttggctgtccgactgtccacgcaccgctgaagccgtcaactttgccacgctgttgtacaaagagcttaccgcagtgccttacatggcgaaattcgtgatttttgccaaaatgaacgacccccgtgaaggtagactcaggtgctactgtatgacagatgataaagtggacaagaccctggaacagcatgaaaactttgtcgaggtcgcgcgatcccgggatatagaagtgctggagggcatgtcactgttcgctgagttatcggggaatctcgttcccgtgaaaaaggctgcccaacagcggtcctttcactttcagtcttttagagagaatcggctcgccatgccggttaaagtgcgggacagttcccgggagccgggcggtagtttgagctttttgcggaaagctatgaaatatgaagatactcaacacatcctttgtcacctgaacatcacaatgccgccatgcgcaaaggggagcggcgcagaagatagacggaggacccccacccctctggcactcaggtattcaattctgagtgagtccaccccagggtcactgtctggaaccgaacaggctgaaatgaaaatggccgtgatcagcgagcatctaggactgtcttgggccgaactggctcgagaattgcagttcagcgtcgaagatattaataggatccgcgtggaaaatccgaactctctgcttgagcaatccgtggcactcctcaatctctgggtgatccgcgaagggcaaaatgccaacatggagaatctatatactgcccttcagtccattgatcgtggagaaatcgtcaacatgttagaaggcagcgggagacagagccgcaacttgaagcccgacagacgtcataccgatcgcgattattcgctctctcctagtcagatgaatgggtactccagcctgcaggatgagttgctgagtccggccagcttgggctgcgcactgtcaagtcctctgcgtgcagaccaatactggaacgaggtcgctgtgctcgacgcaattcccctcgccgctaccgagcatgataccatgctagagatgagcgatatgcaggtgtggtctgccggcctaacccccagcctagtcaccgccgaggatagcagcctggaatgcagtaaagcagaggactctgatgccaccgggcacgaatggaaactggagggagccctttcagaagaaccacgaggcccagagttagggtccctggagctagtcgaagacgacacagtggatagtgacgcgacaaacgggctgattgaccttcttgaacaggaggagggtcaacggtcagaggagaagttacctggcagtaaaaggcaagatgacgctacaggcgctggccaagactctgaaaatgaagtgagcctcgtgagtggacaccagaggggtcaggcccgtatcacacatagcccaaccgtttcacaagttaccgagcgatcccaagataggctacaggattgggacgcggacgggtcaatcgtctcctacctacaggacgcagcccagggatcctggcaagaggaggtcactcagggaccccactcattccagggcacatcaaccatgactgagggtttagagccgggtggcagtcaggaatacgagaaggtgctcgtctcagtgtccgaacatacatggactgagcagcctgaagccgaatcctcccaggcggaccgcgacagacggcagcagggacaggaggaacaggtccaggaggctaagaacactttcactcaagtcgtccaagatcacaccagtactccgaatccctag

SEQ ID NO: 179008 - DNA, 330 bp, synthetic construct
  misc_feature 1..330: note = Description of Artificial Sequence: Synthetic coding sequence
  source 1..330: mol_type = other DNA
atgtggaccttcgtgacccagctgctggtgaccctggtgctgctgtcatttttcttggtgtcttgtcaaaatgtgatgcacatcgtgagaggcagcctttgctttgtgcttaagcatatacaccaggaactggataaagagttaggcgaaagcgaggggctgtcagacgatgaggagaccataagtacgcgggtagtccggcgcagagtcttcctgaagggcaatgaatttcaaaatatccctggagagcaggtgaccgaagaacagtttactgacgaacaggggaatattgtgacaaaaaaggatcacacaagcactccaaatccctag

SEQ ID NO: 179009 - DNA, 11775 bp, synthetic construct
  misc_feature 1..11775: note = Description of Artificial Sequence: Synthetic coding sequence
  source 1..11775: mol_type = other DNA
atgatgaacgaggacgccgcccagaagagcgacagcggcgagaagttcaacgggtcttcccagagacgcaaaaggccaaaaaagtccgactcaaacgcttctttcctccgcgcggcccgagcgggcaatctggataaggtcgtggaatatctgaaaggcggtatagacatcaatacctgcaaccaaaacggtctcaatgcacttcacctggcagcaaaagagggacacgtgggactagttcaagagttactgggtaggggctctagcgtcgacagcgcaactaaaaaaggcaataccgctttgcatatagcctcactggctgggcaagcggaagtggtaaaggtgcttgtaaaagaaggtgccaacataaatgcccagagccagaacggcttcaccccactgtatatggccgctcaggaaaatcacattgatgtcgtaaaatatttgctggaaaacggggcaaatcagtctacagcaacggaagatgggtttacaccactggcagttgcactccaacaggggcacaaccaggcggtggctatcctgctagagaacgatacgaaggggaaggttcgcttgccagcattgcatattgccgccaggaaggatgataccaagagcgccgccctgctgctgcagaacgaccataatgcggacgttcagtcaaaaatgatggtcaacagaacgaccgaaagcggattcactcccctacatattgctgctcactacggcaacgttaatgttgcgactctcctgctgaatcgaggtgcagccgtcgatttcactgccaggaacgggatcacccctctgcatgtggccagcaagaggggcaatacgaatatggtgaaattattactcgaccggggtgggcaaatcgacgctaagacgagagacggacttaccccattacattgtgcagcaagaagtggacatgatcaggtggttgaattgctgctcgagcggggagctcctctcctggcccgtaccaagaatggtctgagccctttacacatggccgctcagggagaccacgtagaatgcgtcaaacatctcctgcagcataaagctccggtggacgatgtgacactggattatctgaccgccctgcacgtggcggcccattgtgggcactatagggtcacaaaacttcttctggataaaagggctaatccaaatgcaagagccttgaacggtttcactcctttgcacatcgcttgtaagaaaaatagaataaaggtgatggaactgctggtaaaatacggcgcatccatccaggccatcactgagagcggtcttacccctatccacgtcgcggcttttatgggccatcttaatatcgtgctcctcctgcttcaaaacggagcatctccggacgttaccaatatcagaggcgagactgcactgcacatggctgctcgggccggacaggtggaggtcgtcagatgtctgctgcgaaatggcgccttggtggatgcccgtgcacgggaagagcagactccactgcatattgctagtagactaggaaagacagagatcgtgcaactactcctgcagcacatggcccatcccgacgcagcaaccactaacggctatacgcctctccacattagtgccagggagggtcaagtggacgtggcctccgtactgctggaagctggggcggcccactctctcgctaccaagaaaggattcacgccactacatgtagctgccaagtatggatcccttgatgtcgcaaaactcttactgcagcggcgcgctgcagctgactcagccggcaagaacggactcacaccactccacgtcgccgctcactatgataaccagaaggtcgctctgctgctgctcgaaaaaggagcttcaccacacgctactgccaaaaacggttatacgcctctgcacatcgcagctaagaaaaatcaaatgcagattgcctcgacattactgaactacggagctgaaacaaacattgtcactaagcagggggtgacaccactgcacctggcctcccaggaggggcatactgacatggtcacactgctcttagacaagggagctaacattcatatgagcaccaagtccggtctcacctccttgcaccttgcagcccaggaagacaaagtcaatgtggccgatatcctcacaaagcacggtgctgaccaggatgcgcacacgaagctgggatacactccgctcattgtcgcctgccattatggaaatgtcaaaatggttaactttctgctcaagcagggggcaaatgtgaatgccaagaccaagaatggctatacacctctgcatcaggccgcccaacaaggccatacacacatcattaacgtcttattgcagcatggcgcgaaaccaaacgctactaccgccaacggaaataccgcccttgcaattgctaaaaggttggggtatatctcagttgtggacacactaaaagtggtcactgaagaagtgactacaaccacaaccactattacagaaaagcataaactgaacgtgcccgaaaccatgactgaggtccttgacgtgagtgatgaagaaggtgacgatactatgactggcgacggaggagaatatctgaggcccgaagatctcaaggaactcggagacgactccctcccgtcatcacagttcctggatgggatgaactacctaaggtatagcctggagggtggtcggtcagacagtctacggtcattttcttcagatcgaagtcacacactaagccacgcttcatacttgagagactcggcggtaatggatgacagcgttgtcattccgagtcaccaggtctccacactggccaaggaggcggaacgcaactcttatcggctatcctgggggaccgagaatttggacaatgtggccctgagtagttccccaattcacagtggcttcttagtgagttttatggtggatgctcgcggcggagcaatgcgcggatgtagacataatgggttaagaattattataccacctagaaagtgcactgcaccaacacgggtcacttgcagacttgtgaaacgccatcggcttgcaaccatgcctcctatggttgagggcgaaggcctggccagccgactgatcgaggtgggcccaagcggcgcacaatttctcggcccggtcatcgttgaaatcccccattttgccgctctgagaggaaaagagcgcgaacttgtggtgctaagaagtgagaatggtgattcttggaaagagcatttctgcgattatactgaggacgagctaaacgaaatccttaacgggatggatgaggtgctggactcaccagaggatctcgagaagaagcgaatctgtaggatcattactagggacttcccgcagtacttcgctgtcgtgtctcgcatcaagcaagattcaaacttgattggtcccgaaggcggagtactgtcctcaactgtcgtcccacaggttcaggccgtgttccccgagggggctctcaccaagaggattagagtggggctccaggctcaacctatgcattccgagctcgtgaagaagatactgggaaacaaggctacgttcagcccaatcgtaaccttagaacctcggagacgcaaattccacaagcctatcaccatgactatcccagtcccaaaggcctctagtgacgtgatgttgaacggtttcggaggggacgcgcctacgcttcgcctgctttgtagcatcactggcggtaccaccccagctcagtgggaggacattaccgggacaacacctctcacctttgtgaatgagtgtgtgtcgttcacaacgaacgtgtccgcccgattttggctgattgattgtcgccaaatccaggagtccgtcacgtttgcctctcaggtttatagggaaattatctgtgttccttacatggctaaattcgtggtgttcgccaagtctcatgatcctattgaggcgcggctgcgatgcttttgcatgaccgatgacaaggtcgataaaacccttgaacagcaggagaacttcgcggaggtcgctcgcagccgagatgtggaagtcttggagggcaaacctatttatgtggactgttttggtaacctggtaccattgaccaagtctggccagcatcatatttttagcttcttcgcctttaaagaaaaccgactgccactcttcgtgaaggtgagggacacaacccaagaaccctgcgggcgcctgtcctttatgaaggagccaaagagcaccagaggcttagttcaccaggccatctgcaatcttaatatcactctgcccatttacacaaaagagtccgagtcagaccaggagcaggaggaagaaattgatatgactagtgagaagaacgatgaaacggagtcaaccgagacaagtgtgctgaaaagccatctggtcaatgaggtgcccgtcttggcctcccctgacttactctccgaggtttcagagatgaagcaggatctgattaagatgaccgccattttgaccacggacgttagcgacaaggccgggtctatcaaagtaaaggagctggtgaaagcagcggaggaagagcctggtgagccgtttgaaatcgtagagagggtcaaagaagacctggaaaaggtgaatgagatactgcgctctggaacctgcactagggacgaatccagcgtccagtccagcagatctgaacggggtttggttgaggaagagtgggtcattgttagcgatgaggagatcgaagaggcgaggcaaaaggcacctctggaaattactgagtacccatgcgtggaagtgcggatagataaggagattaagggtaaggtggagaaggactctaccggattagtgaactatcttaccgatgatcttaacacatgtgttccgctgcccaaagagcagctgcagaccgttcaagacaaagccgggaaaaaatgcgaagcgttggccgtcggtcgctcctctgagaaagaaggaaaggatatccctcccgacgaaacgcagagcacccagaagcagcacaaaccatccctggggatcaagaaacccgtaaggcggaagctgaaagaaaaacagaaacagaaggaagaaggattgcaggcaagtgccgagaaagcagagctcaagaaggggtcatccgaggaatctctcggagaggatcctggtcttgctccagagcctcttccaaccgtgaaagccacctcacctctcattgaagaaaccccaatcggctccataaaggataaagttaaagccctgcagaagcgcgtggaggacgagcagaaaggcagatccaagttgccaatccgtgtgaagggcaaggaggatgttcctaagaaaacgacacatcgcccccaccctgccgcttccccttccctcaagtcagagcgacacgcccctgggagtccctcacctaagaccgaaaggcacagtacattgagcagctctgcaaaaaccgagaggcacccacccgtgagcccttcatccaagaccgagaaacattctcccgtcagtccgtccgccaagacggaacgccacagccccgctagtagcagctcgaaaaccgagaaacacagtcccgtgtctccttcaacgaagacagaaaggcacagccccgtgagttccaccaaaactgaaagacacccgcccgtgagccctagcggaaaaaccgataaacggcctcccgtaagccctagcggacgcacagaaaagcatcctcctgtaagtccgggtcgtactgagaaacggctcccagtcagcccttccggtcggaccgacaagcatcaacctgtctcaacagcagggaaaacggagaagcatctccccgtcagcccctccgggaagacagagaaacaacctcccgttagtccaacttcgaagacagagcgaattgaagagactatgtccgtgcgcgaattgatgaaggctttccagtcggggcaggatccttctaagcacaagactggcctgttcgagcataaatcggccaagcagaaacaacctcaggaaaaaggcaaggtcagggtggagaaggagaagggcccaatcctgacccaaagagaagcccagaaaaccgagaaccagaccataaagcgcgggcagagactcccggtaacggggactgcggagtcaaaacgaggcgtcagagtgagcagcatcggagtcaagaaagaagacgccgccgggggaaaggagaaagtgctgtctcacaagatccccgagccggtgcagagtgtaccagaagaagagtctcatcgcgagagcgaagttcccaaggagaagatggctgatgagcagggcgatatggacctccagatatctcccgatcgtaagacttcaactgatttttctgaggtgataaagcaggaactggaagataatgataagtatcagcaatttcgattgagcgaggagacagaaaaggcacagctgcatctggatcaggtactgaccagccccttcaatacaacgtttcccctcgactacatgaaagacgagtttctgcccgctctcagtctgcagagtggtgctcttgacggaagcagcgaaagcctgaaaaacgagggggtggcggggtctccctgtggatctctgatggagggcaccccccagatcagttcggaggaatcctacaaacacgaaggattggccgaaacaccggagacatcacccgagtccttatctttctctcctaagaaatcagaggagcagaccggggagactaaggaatctactaaaactgaaaccacgaccgagatccgctctgagaaagagcaccccacgactaaggatatcacaggcgggagtgaggaacgaggcgccaccgtgaccgaggactccgagacttctacagaatccttccagaaggaggccactctcgggtcccctaaggatacatcacctaagagacaggacgattgcactggcagctgctcagtggctcttgcgaaggagactcctactgggctgaccgaagaggccgcctgtgacgaggggcagcggacctttgggtctagcgctcataaaacccagacggactcagaggttcaggaatccacagcgacatccgacgaaacaaaagcattaccactgcccgaggccagcgtgaaaacagataccggaacggagagtaagccacaaggggtaattagaagcccccaagggcttgagctggctctgccttctcgtgacagcgaagtcttgtctgcagtggccgatgatagtctcgccgtgagccacaaagatagtttagaggcttctcctgtgctggaggataacagctcccacaaaactcccgatagtttggaaccgagtccacttaaggagagcccctgtagggactcgttggaatcttcccctgtggaaccgaagatgaaagccggcatctttcccagccactttccactgcctgcagcggtggctaagactgaactgctgactgaggtcgcaagcgtccgctccagattgttacgagaccccgatggctcggccgaggacgatagtcttgaacagactagcctgatggaaagttccggcaaatctccactttccccggatacaccttcatccgaagaagtctcatatgaagtgacccctaagaccaccgacgtgtcaactccaaaacccgccgtcatacatgaatgcgcagaggaagacgattcggagaacggagagaaaaaaagatttacccccgaggaggagatgtttaagatggtcacaaagatcaagatgttcgacgagctcgagcaggaggccaagcagaaacgggattacaagaaggaacccaaacaagaggagagtagttctagcagtgacccagacgccgattgttctgtggatgtggacgagcctaaacataccggcagcggagaggatgaatccggagtgcctgtgctggttacttcagagtcacgaaaagtgagcagctcttccgaaagtgagccagagttggcacagcttaagaagggcgccgatagcggactgctgcctgagcctgtgataagagtccagcctccctcccctctcccctcttccatggactccaactcgagtcctgaggaagtacagtttcaacctgttgtctctaaacagtatacattcaagatgaatgaggatactcaggaagagcctggtaaaagcgaggaggagaaagattcagagtcccacctggccgaagatagacacgcagtaagcaccgaagccgaagataggtcatacgataaactgaacagagacacggaccagccaaaaatctgcgatgggcatggttgtgaagccatgagcccaagttcttctgccgctccggtttcttccggactccagtctcccaccggggatgatgtggacgagcagcctgtgatttataaggagagtctcgccctgcaggggacccacgagaaagacacggagggggaggagctcgacgttagtagggcagagagtccccaagctgactgtccatccgaaagtttctcaagttccagcagtctgccacattgccttgtgagcgaaggaaaggaattggacgaggacatttccgccacatccagcatacagaaaacagaagtcactaaaaccgacgagacctttgaaaacttacctaaggactgcccttctcaagatagttccattacgacccagaccgatcgcttcagtatggacgtgcccgtaagcgatctcgccgagaatgacgagatctatgatcctcagattacctctccatacgagaacgtgccttcccagtcttttttttcttctgaggagagcaaaacacagaccgatgcaaaccacacgacatcttttcacagcagcgaggtgtactctgttacaatcacgagtccagtcgaggacgtcgtggtggcctcaagctcttccggcacggttctgtccaaagaaagcaacttcgaaggccaggatatcaagatggagtcccagcaggagtcaaccctatgggagatgcagagtgatagcgtgtcgtcctccttcgagccaacaatgtctgccactacgacagtggtcggggagcaaatttcgaaggtcattatcaccaagacagacgtggattctgactcatggtctgagattcgggaggatgacgaagcctttgaggcccgtgttaaggaggaggagcagaagatcttcggtctgatggtcgatcggcagtcacagggaacaacaccagatacaacaccagcacgcacaccaacagaggagggcacccccacgtccgagcagaacccctttctcttccaagaaggaaagctctttgagatgacacgatcaggggctattgacatgactaagagaagctatgctgacgaatcatttcatttttttcagatcggacaggaaagcagggaagagactctctcagaagatgtcaaagagggagcaaccggcgcggacccgctaccactggagacctcagccgaatcacttgccctgtccgaatcaaaggaaacggtggacgatgaagccgacctgctgcccgacgatgtaagtgaggaagtagaagagatcccagcttcagacgcacagcttaattctcagatgggaatctcagcctccacggaaactccaacaaaggaggctgtcagcgtcggcacaaaggacctgccaaccgttcagacaggagatatacctcctttgagcggggtaaagcagatctcctgtcctgacagctcagaacccgccgtgcaagtgcagttggacttcagtacattgacaagaagtgtgtattccgacagaggagatgacagtccggactctagtcccgaagagcaaaaatctgtgatcgagatcccaaccgctcctatggagaacgtgccctttacagaaagtaagtcaaagattccagtgagaaccatgcctacttctaccccggccccaccaagtgctgaatacgaaagttctgtctccgaggacttcctttcaagcgtggacgaagaaaataaggctgacgaggccaaaccaaaaagcaaactaccagtaaaggtacccctccagagagttgaacaacagttatccgacttagacacatcagtgcaaaagacagtggccccgcaaggtcaagatatggcctccatcgcacccgataataggtctaagagtgagtcggacgctagctctttggattcaaaaacaaagtgtcccgtgaagactaggtcctatacagagacagagaccgagtcccgagagagggccgaagaattggagttggagtccgaggaaggtgccaccaggccaaagatactcacatcaaggctgcccgtcaagtcaagatctaccacttcttcttgtcggggcggaacaagccctactaaagagagtaaagaacatttcttcgatctctatagaaactcaatcgagttttttgaggagatttcagacgaggccagtaagctcgtggacagactcacgcagtcagagagggaacaggagatcgtcagtgatgatgaatcctcatctgctctcgaggtttcggtgatcgagaatctcccgcccgtagagaccgaacactctgtcccagaggatattttcgatacacgacctatttgggacgagagcattgagactctgatcgaaaggatcccagatgaaaatggccatgatcatgccgaagatccacaggatgagcaagagaggatcgaagagagactggcatacatcgccgatcacctgggtttcagttggaccgagctggctagagaactcgacttcacagaggaacaaatacatcaaattagaatagagaaccctaattccctgcaggatcagtcccacgccctactgaaatactggctggagagagacggcaaacatgctaccgacacgaatctggttgaatgcttgaccaaaatcaacagaatggacatagtacatctgatggaaactaataccgaaccactccaagagcgaataagccactcttatgctgagattgagcaaactattacactggatcacagtgagggtttttcagtgctgcaagaagagctctgtacagctcaacataagcagaaagaggaacaggctgtgtccaaggagagcgaaacgtgcgatcacccccctatcgtcagcgaagaagatatctcggtagggtatagcaccttccaagacggcgttcccaagaccgaaggggattcttctgcaactgctcttttcccacagacacacaaggagcaggtccagcaggacttctccggaaaaatgcaggacctcccagaagaatcttctttggaatatcagcaggagtactttgtaacaacccccggcacggaaacctcagagacacagaaagccatgattgtcccaagctcaccatcaaagactccggaagaagtgtctacccctgccgaagaggaaaaattgtacctgcaaacccccacctcatctgagaggggcggcagccccattatccaggagcccgaggaacctagcgagcaccgagaggaaagttcacctagaaaaacgagcctggttatcgtggaaagcgcagataaccaacccgagacttgtgagagactggatgaggacgccgcttttgagaaaggtgacgacatgccagaaatcccaccggagactgtcacagaggaggaatacatagacgaacacggccacactgttgtgaagaaagtgacccgaaagatcattagaaggtacgtcagctcagaaggtaccgagaaggaggaaattatggtgcagggcatgccacaagaacctgtcaatattgaggagggggatggttacagtaaagtcatcaagagagtcgtgttgaagtctgataccgaacagagtgaggataacaatgagtag

SEQ ID NO: 179010 - DNA, 5592 bp, synthetic construct
  misc_feature 1..5592: note = Description of Artificial Sequence: Synthetic coding sequence
  source 1..5592: mol_type = other DNA
atgagccaccacatccagcggagcgacagcaacgccagcttcctgagggctgcgcgggccggcaacctcgataaagtggtggagtacctcaaaggggggatcgacatcaacacatgcaatcagaacggcttgaacgccctgcacctagcagccaaagaaggccacgtgggcctcgttcaagaactgcttggaagggggtcatcagtggatagcgcaactaagaaaggcaataccgcactacacatagcatcgctggcaggacaggccgaggtagttaaggtgctggtgaaggaaggtgccaacatcaacgcgcagtcccaaaatggtttcacgccgctttatatggccgcccaggagaaccacatcgatgtggtgaagtaccttctggagaacggggcgaatcagagcacagcaaccgaggatgggtttactcccctcgcggtggccctacagcagggccacaatcaggctgttgccatcctgcttgagaacgataccaagggcaaggtgcgcttgccggccttgcacatagcagccagaaaggatgacacaaagtctgcagccttgctactgcagaatgaccacaatgcagatgtgcagtctaaaatgatggtcaaccgcactaccgaaagtggattcacacctctgcatatcgcggcccattacgggaacgtgaacgtcgcaacactgctgctgaaccgtggggccgcagttgatttcactgccagaaacgggattactcccctgcatgtcgctagtaagagggggaacacaaatatggtaaagttgctgctggatagaggtggccaaatcgacgcaaagacccgcgatggtctcaccccccttcattgtgcagccagatcaggacatgaccaggtagttgaattgctcctggagagaggagcaccacttttggcccggaccaagaacgggctgtcccccctgcacatggccgcccagggcgaccacgtggaatgcgtgaaacatctcttgcagcacaaagctcccgtggacgatgtcacacttgattatctgactgctttacacgtggcagctcactgtggacattatcgggttacgaaactgcttctggacaagcgcgccaacccaaatgcaagagcccttaatggctttaccccactccatatcgcctgcaagaagaacaggatcaaagtgatggagctgttagtgaagtatggggcttccatacaggcgattactgaatccgggcttacccccatccacgtcgctgccttcatgggtcatctgaacatcgtactgctgttgctccaaaatggcgcctcccctgacgtgactaatatccgtggggagaccgctcttcatatggccgctagggccggacaggtggaagtggtgaggtgcctgctgcggaatggggccctggtggatgctagggccagagaagagcagacaccactgcacattgccagcagactgggtaaaacagaaattgtccaattactgctgcagcacatggcccaccccgatgccgccacgacgaacggatacaccccgctccacatttccgctcgtgagggacaggtcgacgtggcctcggtgctcttggaggcaggggctgctcactcgctcgccaccaaaaagggctttacccctctgcatgtcgcggccaaatacggctcactggatgttgccaagcttctgctccagaggcgcgctgccgccgacagcgctggcaagaatgggctcacccctctccatgttgccgcccattacgacaaccaaaaagtggcgctgttgcttctggagaagggcgcttcaccacacgccacagcaaagaatgggtacactcccttacatattgctgcaaaaaagaaccagatgcagatcgcatctacgcttctaaattacggcgctgagaccaatatcgtgaccaagcaaggggtcactcccctacatctcgcgagccaagagggtcataccgatatggtcacacttcttttagataagggggccaatatacacatgagcacgaagagtgggctgacttccctgcacctggcagcacaagaggacaaagttaatgtggccgacatccttacaaagcacggggctgaccaggatgcccacaccaagctaggttacacgccactcatagtcgcatgtcactacgggaatgtaaagatggtaaactttctgctgaagcaaggagccaacgtgaatgccaagacaaagaatggttatacgcctctgcaccaggcggcccaacagggacatacccatattattaacgtactgctccagcacggagcgaagccaaacgccaccacggccaacggcaataccgccttggccattgctaagcgacttggctacatctccgtcgttgacacgttaaaagtggtcaccgaagaggtgacgacaactactacaactatcaccgaaaaacataaactgaatgtcccggagacaatgacggaggtcctggacgtctcagacgaagagggcgacgatacaatgaccggggacggcggggagtatctgcggcctgaggacctcaaagaactgggcgacgattcgctgccatccagtcagttcctcgacggtatgaattacctgcgctatagcctggaaggcggcaggtcagatagcctgcggagcttctcatcagataggtcgcataccctgtctcacgcttcatacttacgagacagtgcagtgatggatgattcggtggtaattcccagtcatcaagtcagcacactcgcaaaggaggcagagaggaactcataccgtttgagttggggcactgagaacctggataacgtggctctgtctagcagccctatacattccggacgggctagcccttgcctcgagcgcgacaactcatcattcctagtttcctttatggtggacgccagaggcggagctatgcgggggtgtaggcacaacggcctgaggattatcataccaccccggaaatgtaccgcacccacacgagtgacatgcagacttgtcaagaggcaccgcctggcaacaatgccaccgatggtggagggagagggccttgcttctcgtcttatcgaggttggcccctctggtgcacagttcttgggaaagctccacctccctactgcgcccccacctctcaacgagggagaatcacttgtgagtaggatcttacagctgggaccccccggtaccaaattcctggggcctgttatcgtcgagatcccgcactttgcggcccttagaggcaaggagcgggagttagtggtgctccgatccgagaacggggacagctggaaagaacatttttgtgattatacagaagacgaattaaatgaaattttgaatgggatggatgaggtgctggattcgcctgaagatctggagaaaaaacgaatctgcagaatcatcacccgggacttccctcaatatttcgctgtggtgagtcgcatcaagcaagattcgaacctgattgggcccgaggggggagtgttatcctcgaccgtggttccccaggttcaggctgtgttccccgagggggcccttaccaaaagaatcagagttggacttcaggcgcaacccatgcattccgaattggtgaaaaagatccttgggaataaggctacgttctcccctattgtgacgctggagccaagacgaagaaaatttcataaacccattacgatgaccatccccgtccctaaggcctcatccgacgttatgctgaacgggttcgggggcgacgctcccacactacgtctgttgtgtagcataacaggcggaaccacccctgcacaatgggaggatattactggaacaacccctctgacgtttgttaacgaatgcgtgagctttaccaccaatgtcagtgcccggttctggttgattgactgccggcagattcaagaaagtgtcacattcgcgtcccaggtctacagagagatcatctgcgtgccctacatggccaaattcgtcgtgtttgccaaaagccacgaccctattgaagctcggcttcggtgcttctgtatgaccgacgataaagtggataagacccttgaacaacaggagaactttgcagaagtggcacgcagcagagacgtcgaggtactggagggaaaacctatttacgtagattgtttcggtaatctcgttccattaacaaagtccggacagcaccacatcttttctttctttgcatttaaggagaatcgccttcccctgttcgtcaaggtgcgtgatacaactcaggagccgtgtggccgcttatcttttatgaaggagcctaaatctactaggggcctggtgcaccaggcgatctgcaatctgaacatcaccctaccaatctacaccaaggaatcggaatcagaccaggaacaggaggaagaaattgggcaggaatcccgaaggtatccgcaggatgagcaggagcgtatcgaggaacggttagcatacatcgcggaccacttaggctttagctggactgagctcgccagagaattggactttacagaggaacagatccatcaaatccggatcgagaatcctaatagcctccaggatcagtcccacgcacttcttaagtactggctggagcgggacggcaaacatgccacagacactaacctcgtggagtgccttacgaagataaatcgtatggacatcgtccacctgatggagaccaatactgaacccctacaggagcgcataagtcattcttatgcagagatcgagcagacgataacactggaccattcagagggtttctccgtgctgcaagaggagctgtgtacagcccagcacaagcaaaaggaggaacaggctgtctctaaggagtccgagacctgcgaccacccacccatagtgtccgaggaggacatatcagtgggatatagcacattccaagatggagttccgaaaaccgaaggggattcaagtgcaactgccctctttcctcagactcataaggagcaggtgcagcaagattttagcgggaaaatgcaggacctgccggaggaatcctcattggaataccagcaggagtacttcgttacaacccctggtaccgagacctctgagacccaaaaggccatgatagtacctagcagtcccagcaaaaccccagaagaagtctccactccggctgaggaggaaaagctgtatctgcagacaccaacctcaagcgagcggggtggctcccctatcatccaggagccagaagaaccctccgaacacagagaggaatcaagcccacgcaaaacatcactggtgattgtggaatccgccgataaccagcctgagacatgtgaaaggcttgacgaggatgcagcattcgagaaaggcgacgacatgccggagattccccctgaaaccgtcaccgaagaggagtatattgacgagcatggtcataccgtggtcaaaaaggtcacacggaaaatcattaggcgctatgtcagttcagaggggacagagaaggaggagatcatggttcaaggaatgcctcaggaaccagtgaatattgaggaaggagacgggtattccaaagtgattaagagggtcgttcttaagtctgacaccgagcaaagcgaggactctatggagtag

SEQ ID NO: 179011 - DNA, 11874 bp, synthetic construct
  misc_feature 1..11874: note = Description of Artificial Sequence: Synthetic coding sequence
  source 1..11874: mol_type = other DNA
atgatgaacgaggacgccgcccagaagagcgacagcggcgagaagtttaacggcagctcccaaagacgcaaacgacccaagaaaagcgactccaacgcatctttcctgcgggccgcccgggcagggaacctcgacaaggtggtcgaatacctgaagggaggaattgacatcaatacatgcaaccaaaacggcttgaatgcccttcatctggccgcgaaagaaggtcacgttggcctggtgcaagagctccttggcaggggctcaagcgtggactctgctacaaaaaaaggcaacaccgccctccatatcgcgagcctcgccggacaggcggaggttgtgaaagttctggtgaaagaaggagccaacatcaatgcgcagtcacaaaatggctttacccctctttacatggctgctcaagagaaccatattgacgtggttaagtaccttttggaaaacggggccaatcagtcaacagctacagaggacggcttcacaccgcttgccgtggcgctgcagcagggacataatcaggctgtagccatcctgctagagaatgacaccaagggtaaggttcgtctaccagccctgcacatagctgcacggaaggatgatacaaaaagcgctgccttgcttcttcagaacgatcataacgcggacgtgcagtcaaagatgatggttaatagaaccacagagtctggatttacgcctctgcacattgctgctcactatggaaatgtcaatgttgcaacactactacttaacagaggcgctgccgtggactttacagctaggaatggcattacacctcttcacgttgctagtaaacgcggtaataccaacatggtgaagctcctgctggaccgcggtgggcagattgacgcaaagacgagggacggacttacacccctgcactgtgctgctcgctcaggccacgaccaggttgtggaactcctgttggagagaggcgctccactactggcaagaacgaagaacggcctgagcccgttgcacatggctgcccagggggaccacgtggagtgtgttaagcacctgctgcaacacaaggcccctgtagacgatgtcactctggattacttgacagcccttcatgtggccgcccattgtggacactatcgggtaaccaaactgctcttagataaaagagccaatcccaacgcccgtgcactgaatggctttacccccctgcacattgcctgcaaaaaaaatagaatcaaggtgatggaactgctcgttaaatacggagcctccattcaggcaatcactgagtccggtctcacccctatccacgtcgccgcattcatgggccatctgaacatcgtcttactccttctgcaaaatggagcgtcgcctgatgttactaatattcggggagaaactgcacttcatatggctgccagagctggccaagtggaggtggtccgctgcctgctgcgcaacggggcactggtggatgcccgggctcgggaagagcagacacctctgcacatagcgtcgcgtttgggaaagactgaaattgtgcagctgctcctgcagcacatggctcacccagacgctgcgacaacgaacgggtacaccccccttcacatttcagcccgtgaaggacaggttgacgtcgcctcagtcttgctcgaggctggagccgcccatagcttggcgacaaaaaaagggttcaccccactacatgtggcggccaagtacggctccttggacgtagcaaagcttctgttacagcgcagagccgccgccgacagcgctggaaaaaatggtctcacacccctgcatgtcgctgcacactacgataatcagaaagtggctctgctacttttagagaaaggcgcttcccctcatgctacagccaagaacggctacaccccgctgcacatcgccgcgaagaagaatcagatgcagattgccagcacactgctcaattacggggctgagacgaatattgtgactaaacagggcgtgacacccctgcatctcgcgtcccaggaagggcacaccgatatggttacactgctactcgataagggagctaacatacatatgagcacaaaatctggtctcacatctttgcatctggctgctcaagaggacaaggttaatgtggcagacatactgaccaaacacggcgccgaccaggatgctcacacaaagctcgggtatacccctttaattgtggcctgccactacggaaacgtcaagatggtgaactttctactgaaacagggagccaacgtcaacgccaaaaccaaaaatggatacacacccctgcaccaggccgcgcagcagggccacactcacattatcaatgttttgttgcagcatggggcgaaacccaatgcgacaacggcaaatggtaacactgcgctggctattgccaagcgccttggttacatctccgtggtggacaccctgaaggtagtcaccgaggaggtaaccaccactacgacaaccattacggagaaacacaagctgaatgtgcctgaaaccatgactgaggttttggacgtctcggacgaggagggcgatgacaccatgactggcgatggcggggaatatctgagacccgaagatctaaaggagttaggggatgactcgctgccaagctctcaattcctggatggcatgaactatcttagatacagcttggaaggcggccggagcgatagcttgcggagctttagctctgaccgcagccacacacttagtcatgctagctatctgcgcgattcagccgtgatggacgactccgtcgtgatcccttcgcatcaggtttcgacgctggcgaaagaagcagagcgcaacagctacagactgtcttggggaacagagaatctcgacaatgtggccttgtcaagttccccgattcactccggatttctcgtctctttcatggtggatgccagaggcggcgccatgcggggctgtaggcataacggtcttcgtatcattatcccacctaggaagtgcacggctcctactcgggtgacttgcaggttagtgaaacggcataggctggccacaatgcccccgatggtggagggtgagggccttgctagcaggctcatcgaggtgggcccttctggcgcacagtttctcggaaagctccatcttcccactgcaccaccccctctgaatgagggggagtccttggtctcccgtattctgcagttaggcccccccggaacaaagtttctggggccggtgatcgttgagatccctcattttgctgcacttagggggaaagaacgcgagctggtggtactgaggtcggaaaacggcgactcttggaaggagcacttctgtgactacacagaggatgagctgaacgaaatcctgaacggcatggacgaggtcttggatagtccggaggacctcgagaagaagaggatttgtcggattatcacacgcgatttccctcagtatttcgccgtggtcagccgaatcaaacaagatagcaatcttattggccctgagggaggagtgctgtctagcaccgttgtacctcaggtccaggctgtgttcccagaaggcgccttgactaagagaatcagagtgggattacaggcccagcccatgcactcagagctagtgaaaaagattctgggaaataaagctacctttagtcccatcgttaccctggagccacgccgaagaaagttccacaagccgattaccatgactatacccgtgcccaaagcgagttccgatgtgatgttgaacggttttggaggagatgcccccaccctgagacttctgtgctccattaccggagggaccaccccggctcagtgggaggacattacgggcactactccgctcacttttgtgaacgaatgcgtaagctttaccaccaacgtttccgcacggttttggctcatcgactgtcgacaaattcaggagtccgtgacttttgcaagccaggtgtatagagaaattatctgcgtgccatatatggccaagttcgtcgtgttcgctaagtcgcatgacccgatagaagcgaggttgaggtgtttttgcatgactgatgacaaagtggacaagactctcgagcagcaggaaaatttcgccgaagtagcgagatccagggacgtggaggtgttggaaggtaaacctatctacgtggattgcttcgggaatttagtgccgttaactaagtcaggacagcaccatattttcagcttctttgcctttaaggagaatcgccttcccctgtttgtgaaagtacgggacacaacacaggaaccctgtgggagactgtcattcatgaaagagcccaaaagtacaaggggacttgtacatcaagcaatttgcaacctgaatataacgctgccaatctacaccaaagaatcagaatccgatcaggagcaggaagaggaaatcgacatgaccagtgagaagaacgacgaaacggaatctacagaaacctcagtgttaaagagccatctggtcaacgaagtgcccgtgctcgcatctccggacttgctctctgaagtgtctgagatgaagcaggatttaatcaaaatgaccgccattttaactacagacgtatctgacaaagccggaagtataaaggtcaaggagctggtgaaagccgccgaagaggaaccgggggaaccattcgagatagtcgaacgggtgaaagaggatctggagaaggtcaacgaaatactgagaagcgggacctgcactagagatgaaagctccgtgcagagttcgagatcagaacggggtctggtggaagaggaatgggttatagtgagcgacgaggagatcgaagaggcgagacagaaagctccattagagatcactgagtatccatgcgttgaggttcgaattgacaaagaaatcaaagggaaagtggagaaggactccaccggcttagtaaattatctaacagacgatctgaacacctgtgtgcctcttcctaaagagcagttgcagaccgtgcaggacaaagctggcaaaaagtgcgaggccctggcagtcggaagatcatcagagaaagagggaaaagatataccccccgatgagacacaaagcacacagaagcaacataaaccatctctcggaattaaaaagcccgtccggaggaaactgaaagaaaagcagaagcagaaggaagagggcctgcaggcctcggctgagaaggccgagctaaaaaagggatctagtgaggaatccctaggcgaggaccccggcctggcacccgaaccattacccactgttaaagccactagccctctgattgaggagacccctatagggtccattaaagacaaagtgaaggctctgcagaaacgtgtggaagacgagcagaagggacggagtaaattgcctatacgggtgaagggcaaagaggatgtgcctaaaaagacgacacacagaccacatcccgctgcaagtccctccctgaagtcagaacgccacgccccaggtagtccctcccccaagaccgaacgccatagcaccctgtccagttccgccaagacagaaagacacccaccagtctccccctcttcgaagactgaaaaacacagtccagtatcgccttcagccaagacagaaaggcactcaccagcttcttcttcctctaaaaccgaaaaacactctcctgtttccccaagtacaaagacagaaagacacagcccggtttcctcaaccaaaacagagcgccaccccccggtcagtccaagcggcaaaaccgataagaggcctcctgtcagcccctccgggcgaaccgagaagcaccctcctgtcagccccggacgcacagagaagcggctcccagtcagcccttctggaagaacagacaagcaccagcctgtctcaaccgcaggaaaaaccgaaaaacatcttcccgtgtcaccttcaggaaaaaccgagaagcagccccctgtatccccaaccagcaagacagagaggattgaggaaaccatgtctgtgagagagttaatgaaggcattccagtccggccaggatccctccaagcataaaactggcctctttgagcataagagcgccaaacagaaacagccacaagagaagggcaaggttagggtagagaaagagaaaggccccatattaacgcagagggaagctcagaagaccgagaatcaaacaattaaaaggggccagaggctgcctgtgaccggcacagctgagagcaaaaggggcgtcagagtgtcctccattggcgtgaaaaaagaggatgcagctggcggcaaggagaaagtgttgtcccataagattcctgaacctgtacaatctgtacctgaagaggagtcccaccgagaatccgaggtgccgaaagagaagatggccgacgagcagggtgacatggatctacaaatcagccctgaccggaaaacctctaccgatttcagcgaagtaataaagcaggagctggaggacaatgataaataccaacaattccggttgtcagaagagaccgagaaagcgcagttgcatctggaccaggtgttgaccagcccttttaacacaacttttccgttggattacatgaaagatgaatttttgcctgccctgtctctgcagtcgggggccctggacggctcttccgagtcactcaaaaatgagggcgtagctggaagtccctgcggcagcctgatggagggaaccccacagatttcctccgaggagtcttataaacacgaggggctggccgagacccccgagacaagccccgagtccctctctttttcgcctaagaagtcagaggagcagactggcgagacaaaggagtctactaaaacagaaactacgaccgaaataagatctgagaaagaacaccctacgacaaaagatattacaggggggagcgaagaaagaggcgccaccgtgacagaagactccgaaacgtccacggaatcgtttcagaaagaggctacgctgggcagtccaaaagacacctctcccaagcgtcaagacgattgcacagggtcctgttccgtggccctcgcaaaggagacgcccaccgggcttaccgaggaagccgcttgcgacgagggacaaagaacttttgggagctctgcccacaagactcagacagattcagaggttcaggagtctacagcaacgtcagatgagacaaaggctttacctttgcccgaggccagtgtgaagacggacaccggcacagagagcaagccacagggagtgatccgctctccgcaggggttagagctggctttacccagtcgcgactctgaagtgctgtcagccgtggcagacgattctttggcggttagccacaaagactctctggaggcctcacccgttctagaggataatagtagccacaagacaccagattcattggagcccagtcccctgaaggaatccccatgccgagatagtctggaatctagccctgtggaaccaaaaatgaaggccggcatcttccccagtcacttccctttacccgcagccgttgccaaaactgaactattaaccgaagtggcctccgtccgcagtcggttactgagggatcctgacggctctgcagaagacgatagtctggagcagaccagcttgatggagagctcggggaaaagtcccctgtctccggatacaccctcttccgaagaagtctcatacgaggtaacacccaaaaccacagacgtttcgacgcctaaacctgccgtaattcacgagtgcgccgaagaggacgactccgaaaacggggaaaagaagcgattcacaccagaggaagaaatgttcaagatggtcacgaagattaaaatgttcgatgaactggaacaagaggctaaacaaaagagggattataagaaagagcccaaacaggaggaaagtagctcaagtagtgaccccgacgccgattgttctgtagacgtggacgagcccaaacatacggggtccggggaagatgaatctggcgtccctgtgctggtgacttctgaatctagaaaggtgagctcctcatctgagtcggagcccgagctggctcagctaaaaaagggggcagattcggggctgctgcccgagcctgtgatccgcgtccagccacccagtccactgccgagcagcatggatagtaattcttctccagaagaggtgcaatttcagccggtggtaagcaaacagtacacttttaagatgaacgaagatacccaagaagagcctgggaaaagtgaggaggaaaaagatagtgagtcccatttggccgaagatcgtcatgcggtttctacagaggccgaggaccgtagctatgataagctgaacagagatactgatcagcctaagatttgcgatggtcatggctgtgaggcgatgagcccctccagcagcgccgcccctgtgtcctcaggccttcagtcaccaacgggagatgatgtggacgaacagcctgtaatatataaggaatctttggccctgcaagggacccacgaaaaggacacagagggagaagagctggacgtaagtcgtgcagaatcacctcaggctgactgtccttctgagtctttctcatctagctcttccctccctcattgcttagtctcagagggaaaggagcttgatgaagatattagcgcgaccagtagcattcagaagacagaagttacaaagaccgatgagacatttgagaatctgccaaaagattgcccctcccaggactcctccattacaacccagaccgatcggttctccatggatgtacccgtttcagatctcgctgaaaacgacgaaatctacgatccccagatcacttcgccatacgagaacgtcccaagccagtcgttcttctcgtccgaggaatccaagacccagaccgatgctaatcacactacatctttccactcctctgaagtctattctgtgactatcacaagcccagtggaagacgtggtggtggcaagcagttcttccggcactgtgctatcaaaagaatcaaatttcgagggtcaggacatcaagatggaaagtcagcaagaaagtactctgtgggagatgcagtccgatagcgtgtcctcaagctttgagcccactatgagtgctacaactaccgttgtaggggagcaaatcagtaaggttattattacaaaaaccgacgtggactcagatagctggtctgaaatacgcgaggacgatgaggccttcgaggccagggtcaaagaagaagagcaaaagatatttgggcttatggtggataggcagagtcagggcactactccggacacaaccccagctcggacaccaacagaagaagggacgccaacaagcgaacagaatccgtttctgttccaggaaggcaaactgttcgagatgacacggtctggcgccatcgatatgacaaagcgtagctacgccgacgaaagcttccatttctttcagatcggccaggagtcacgcgaggagaccctctccgaagacgtgaaagagggcgctaccggagcagaccccttgccgctggaaacctctgccgagtccctggcactgagtgagagcaaagagaccgtggatgacgaagcagatctgctgcctgatgacgtttctgaagaagtcgaggaaattccagcttcagacgcacagctgaactctcagatgggcatatctgccagtaccgaaactccgacaaaagaggcagtaagcgtgggcactaaagacctgcccactgtccagaccggcgacattccacccctctccggggtgaagcagatctcttgtcctgatagctccgagcctgcagtgcaggtgcagctcgacttttctacgcttaccaggtcagtctacagtgatcgcggcgatgactccccagattcttcccctgaggaacagaagtccgtaatcgaaatcccgacggctcctatggagaacgtacccttcactgaaagtaagagcaagattccagtcagaactatgcctacatcaacgcccgcacctccttccgcagaatatgaatccagtgtgtcagaggactttctgtctagcgtcgatgaggagaacaaagcagatgaggcgaaacctaagtcaaaattgcccgttaaagtccccctacaacgcgttgaacagcagctatcagacctagacacatcagtccagaagactgtcgccccccaaggacaggacatggcctccatcgcaccagacaacagatcaaagagcgaaagcgatgcaagtagccttgactcaaagaccaagtgtcccgtgaagacacgatcctatacagaaaccgagacagagtcaagggagcgcgcagaagaactggagctcgagtctgaagagggcgcaacaaggcccaagattctcacctccagattacctgttaagtcaaggagtaccacatcgtcctgcaggggagggacatcgcccaccaaggaaagcaaggagcatttctttgatctttatcgcaattcaattgaattttttgaggagatttccgacgaagccagtaagctggttgaccgactcactcagtccgagcgggaacaggaaattgtttctgatgacgaaagttctagtgcgctggaagtgtcagtgattgagaacctgcctcctgttgaaactgaacattctgtgcctgaagatatcttcgacacgcgaccgatttgggacgaaagtatcgagaccctcatcgaacgtatcccggatgagaacggccatgatcatgctgaggatcctcaggacgagcaagagaggatcgaggaaaggctcgcttatattgccgatcatttgggcttctcgtggacagagttagcccgggaactcgacttcacagaagaacaaatccatcagatcaggatagagaatcccaactctctccaggaccagtcgcatgcccttctcaagtactggctggagagagatggtaagcatgccacagacaccaacctggtggagtgcttgacaaagatcaatagaatggatatcgtacatctgatggagacgaacaccgaacccctacaggaaagaatctctcattcatatgccgaaatagaacagaccatcaccttggaccacagcgaaggttttagcgtcctgcaggaagaactttgtacagcccagcacaaacaaaaggaggaacaagcggtgtcaaaggagagcgaaacctgtgaccacccacccattgtctccgaggaagatatctcggtgggttatagcacttttcaagacggggttcccaagaccgaaggagatagttctgcaacagctctgttcccccagacccacaaagaacaggtccagcaggacttcagtggcaagatgcaagacctcccggaagaaagcagcttggaatatcagcaggaatactttgtaactacaccaggtaccgaaacctccgagacccaaaaagcaatgattgtgccctcctctccatcaaagacccctgaggaagtgagcacccccgcagaggaagaaaagttgtacctgcagactcccacttcttccgaacggggcgggtcacctatcattcaggaaccagaggagcctagcgaacaccgagaggagagctcccctaggaagaccagcctggttattgtagaatcagctgacaatcaaccagaaacatgtgagagactagatgaggacgcagctttcgaaaagggagatgatatgcctgagatacctcctgaaaccgttaccgaagaagagtatattgatgagcatggccataccgtcgtgaagaaggtgaccaggaaaatcatcaggcgttacgtttctagcgagggcactgaaaaggaggaaattatggtccagggtatgccacaagagcctgtgaatattgaggagggggacgggtatagtaaagtaattaagcgggtggtcctgaaaagtgacacagaacagagcgaggacaataatgagtag

SEQ ID NO: 179012 - DNA, 5619 bp, synthetic construct
  misc_feature 1..5619: note = Description of Artificial Sequence: Synthetic coding sequence
  source 1..5619: mol_type = other DNA
atgatgaacgaggacgccgcccagaagagcgacagcggcgagaagttcaatgggtcaagccaacgtcggaagaggcccaagaagagcgattccaatgcttcctttctcagggccgccagagccggcaacttggacaaggtggttgagtatctaaagggtggcatcgatattaatacatgcaaccaaaatggtttgaacgcccttcaccttgcagcaaaggaaggccatgtcggcctcgtgcaagaactgttgggaagggggagctcagtggactccgccacaaagaagggaaataccgctttgcacatcgcatctctcgccggacaggctgaagtggtcaaagttcttgtcaaagagggcgccaatattaacgcacaaagccaaaacggatttacacctctttacatggccgcccaagagaaccacatcgacgtggtgaagtaccttctcgagaatggtgctaatcagtcaacagccactgaggacggcttcacccccctcgctgtggcgttgcaacagggacataaccaagcagtggcaatactgttggaaaacgatacaaagggcaaggtgagactgcccgccttacatattgccgcgcggaaagacgacactaagtcagccgctctgcttctgcagaatgaccacaatgcggatgtccagagcaaaatgatggtgaacaggaccaccgaaagcgggtttacaccactacatatcgctgcgcactatggcaatgtcaacgtcgcaaccttgctcctaaaccggggcgcggccgtcgatttcactgcgcgcaatggaatcacccccctgcacgtggcaagcaaacgcggaaataccaacatggttaagctcctgctcgacaggggaggtcaaatcgacgctaagacacgcgatgggttaacaccattacactgtgcagcacggtccggccacgatcaagtggtggagctgctcttggagagaggtgctcccttattggcgcggaccaaaaatggtctcagtccattgcacatggccgcccagggcgaccatgtggagtgcgtcaaacacctcctgcagcataaagctccggtcgacgacgttaccctggactacctgaccgctctccacgttgcggcccactgcggccattatagggtaaccaaattactcctcgacaaaagagcgaatccaaacgcccgggctctcaatggcttcacacccctccatattgcctgcaagaagaatagaattaaggtgatggagttgcttgtgaagtacggagctagcatccaagccatcactgagtccggcctgaccccgattcacgttgccgctttcatggggcacctgaatatagtcctgctactacttcaaaatggggcctccccagacgttaccaacatcaggggcgagaccgccctgcacatggctgctcgcgcagggcaggtcgaggtcgtgagatgcctgctgaggaatggcgccctcgtcgatgcacgggcccgcgaggaacagactccccttcacattgcaagccggttaggcaagactgagatcgttcagctgctgttgcaacacatggcacatcccgatgccgctactacaaatgggtacactcccttgcacatctcggcacgagaagggcaggtggacgtggcatcagtcctgcttgaggccggggcagcacatagcctagcgacgaagaaaggatttactcctttgcatgtggcagcaaaatatggatctctggatgtcgctaaactgctgctgcaaaggagggcggccgccgactccgcgggtaagaatggtctgacacctctgcatgtggccgcacactatgacaaccaaaaggtggctttgctgctgctggaaaagggcgcttcaccgcatgcgaccgccaagaacggctacacacccttgcatattgctgccaagaaaaaccagatgcagatagccagtacactccttaactacggcgccgaaacaaatattgtgacgaagcagggtgtgaccccactgcatctcgcctcacaagaagggcacactgacatggttacactcctactggataagggcgctaacatccacatgtccacgaagagcgggctaaccagtctgcatctggctgcccaggaggacaaagtcaatgtggcagatatcctgactaagcacggcgccgaccaggatgcccacacaaaactgggctatacacctctaatcgtggcatgccactacggcaacgtgaagatggtgaatttcttacttaaacagggggccaatgttaatgccaaaacaaagaatggctacaccccactgcaccaggctgcacaacaaggtcatacgcacattatcaatgtactattacaacacggagctaaacctaacgccaccacagctaatgggaacacagctctggctatcgcgaagagactgggctatatctcagtggttgacaccctcaaggtcgtgactgaagaggtcacgacgacaactactacgatcacagaaaaacacaaacttaatgtacccgaaaccatgacagaggtccttgatgtctccgatgaagagggcgacgatacaatgactggggatgggggggagtacctccggcccgaagacctcaaagaattaggcgacgactctctgcccagctcgcaattcctggatgggatgaactatctgaggtacagtctagaaggtgggaggagtgacagcctgcgatcattcagttcagatagaagccacactctttcccacgcttcctacctgcgagactccgccgtgatggacgattccgtggtcatcccttcccatcaggtgtctaccttagccaaggaggcagagagaaattcctatcggctttcttggggcaccgaaaatcttgacaatgttgctctctctagtagccccatccactccggattcctggtctcttttatggtggatgcaaggggcggggccatgcgtggctgccgccacaacggactccggattatcatacctcctcgcaagtgtacagccccgacccgggtcacttgccggttggttaagcgacatagacttgcaaccatgccaccaatggtagagggcgaagggctggcgtcccgtctcatcgaagtcggcccttcaggagcccaattcttagggaagctacacctccccaccgcgccgcccccgctgaacgagggcgaatctctcgtgtctaggatccttcagctggggcccccgggaaccaaatttctggggccagttatcgtggagatccctcacttcgctgctttgaggggaaaagaacgcgagctggttgtgctacgaagcgagaacggggactcatggaaagagcacttttgcgactatacagaggatgaattaaatgagattttgaatggaatggatgaagtgcttgactcaccggaggacctcgagaagaagcggatttgtcgaatcattaccagggactttcctcagtactttgccgtggtgagtaggattaagcaagactccaacctcatcggtcccgaaggtggtgtcttatctagcactgtggtgcctcaggtgcaggcagtgtttccggaaggcgctctgacgaagaggatcagagttgggctgcaggctcagccaatgcactccgagctggtgaagaaaattttagggaataaggcaacctttagtcccattgtgaccctggaacctagaagacgcaagtttcataaacctatcacgatgaccataccagtcccaaaggcatccagtgatgtaatgctaaacggtttcggaggcgatgcacccaccctccgactactatgttctatcacaggcgggaccactccagcacagtgggaagatatcaccggcaccaccccactgaccttcgtaaacgagtgtgtctcctttactactaacgtctcagccagattctggctgatcgactgccggcagattcaagagagtgtgacctttgcatctcaggtataccgcgaaataatctgcgtgccctatatggcaaaatttgtggtattcgctaagagtcatgatcccatcgaggcacggctgagatgtttctgcatgaccgacgacaaagtggacaagaccctagagcagcaagagaactttgccgaagtcgctcggagtcgggatgtcgaggtgctggagggaaagcctatttatgtggactgttttggcaatctggtccccctaaccaaatccggccagcatcatatattttccttcttcgcatttaaggagaacagactgcccctgtttgtgaaggtacgggatacgacccaagaaccatgtggacggttgtcttttatgaaggagcctaagagcactagaggattggtgcaccaagccatctgtaatctgaacattaccctaccaatttacaccaaagagagcgaaagtgaccaggagcaggaggaagagatcgacatgacgtccgaaaagaatccacaggatgaacaagaaaggatcgaagagagactagcctatattgccgatcacctggggtttagctggaccgaactcgcccgtgagctcgacttcacagaggagcagatccatcaaattcggattgaaaatcctaattctttgcaggatcagtcacatgccttgcttaaatactggctcgaacgggatggcaaacacgcaaccgatactaatttggtggaatgtctcacgaaaattaacaggatggatatcgtgcaccttatggaaactaatacagaaccactgcaggaacgaatcagtcatagctacgcagagattgaacagacaatcactctggaccactctgaagggttctcagttctgcaggaggaactgtgcaccgcgcagcacaaacagaaagaggagcaggccgtgtcaaaggaatcagaaacatgcgatcacccgccgattgtgagcgaggaggacataagcgttggttactccactttccaggacggcgtccccaagaccgagggcgatagctccgccacagccctctttccgcagacgcacaaggagcaggttcagcaggacttttccggaaagatgcaggacctgcctgaagagtcttcactggaatatcagcaggaatacttcgttaccaccccgggcactgagaccagcgagacacagaaagccatgattgtgcctagcagcccaagcaaaaccccagaggaggtgtccacacccgctgaagaggagaagctctacctgcaaaccccaacctcttcggaacgcggcggttccccaattatccaggagccagaggagccgtcggagcatagagaggaaagctctccgcgtaagacctccctggtcatcgttgagtcagccgacaatcagcccgaaacctgcgagcggctggacgaggacgccgcctttgagaagggcgatgacatgcccgaaatcccaccagagaccgtgaccgaggaagaatacatcgacgagcacggccacaccgtggtgaaaaaggtcacccgaaaaatcatccgacggtacgtcagctccgaaggcaccgagaaggaagagatcatggtccaggggatgcctcaggagcctgttaacattgaggaaggggatggctacagcaaagtgatcaaaagggtggtgttgaagtctgatacagagcaaagtgaagataataacgagtag

SEQ ID NO: 179013 - DNA, 2988 bp, synthetic construct
  misc_feature 1..2988: note = Description of Artificial Sequence: Synthetic coding sequence
  source 1..2988: mol_type = other DNA
atggacgacagcgtggtgatccccagccaccaggtgagcaccctggccaaggaagccgagagaaattcgtacagactctcttgggggaccgagaatttagacaacgtggccctgtcatcaagccctatacattctggctttttggtgtccttcatggtggacgcccgggggggcgctatgcgtgggtgccggcacaacggcctgcggatcatcattcctccaaggaaatgcacggcgccgacgcgggtgacatgccggttggtgaaacgacacaggttggcgacgatgccccctatggtggaaggcgaagggttagcttcaagattgattgaggttggtcccagcggggcccagttcctcgggcccgtgattgtcgagatcccgcattttgccgcacttcgggggaaggagcgggaactcgtcgtgcttagaagcgagaacggggactcgtggaaggaacacttctgtgactatactgaagatgagcttaatgagatcttgaatggcatggatgaggttctggattctcctgaagatctggagaaaaagaggatttgcagaatcatcacacgggattttccacaatatttcgccgtagtgtctcgaatcaagcaggactctaaccttatcggtcccgagggcggggtgctctccagtacagtggtcccacaggttcaggccgtatttccggagggcgctcttacgaagagaattcgagtgggactgcaagcccagccaatgcattcagagctggttaagaaaatcctgggcaacaaggcaacattttcccctatcgtcaccctggagcctaggagaaggaagttccacaaacctattactatgacaattccggttccgaaagcctcaagcgacgttatgttaaacggcttcggcggggatgcaccgacgctccgtctgttatgctctatcaccggcggcaccacccccgcacagtgggaggacattacgggtactacccccctgaccttcgttaacgagtgcgtatccttcaccactaacgtaagcgcaaggttttggctgatcgactgtcgacagatccaggagtccgtgacattcgcttcacaggtgtatcgtgaaatcatctgcgtgccctacatggcaaagttcgtcgtgttcgctaagtctcacgacccaattgaagcccgcctgagatgcttctgtatgacagatgataaggttgataaaactctcgaacagcaggagaacttcgctgaagtggcccgatcgagggacgtcgaggtgctggaaggaaagcccatttatgtggactgctttggcaaccttgttcctcttaccaagtctgggcaacaccacatcttttcctttttcgcatttaaagagaacaggctcccactgtttgttaaggttcgagacactacccaggaaccctgcggaagactgtcattcatgaaggagcccaagtcaacaagggggttggtacatcaggctatttgcaacctcaacatcaccttgcccatctacaccaagacagaaactactaccgagatacatccacaggacgagcaggagcgaatagaggagcgacttgcttatatcgcggaccatctggggtttagctggacagagctggcccgagaactggactttactgaggaacagatccaccagatacgtattgagaaccccaactcacttcaagatcagagtcacgccctgctcaagtactggctggagagggatggaaagcatgcaacggacactaatctggttgagtgtctgaccaagataaatagaatggacatagtccatctcatggagacgaatacggagccactgcaggagcgaatctctcattcatacgcagaaatcgagcagactatcactctggatcattccgagggtttttccgtcctgcaggaggagctttgtacagcccaacataaacagaaagaggagcaggcggtcagcaaggaaagcgagacttgcgaccatcctcctattgtctctgaggaagacattagcgtcggatactctacttttcaggacggggtgcccaaaacagagggcgattctagtgctaccgctcttttcccgcagacccacaaagaacaggtgcagcaggatttctcagggaagatgcaagacttgcccgaggagtctagcctggagtaccagcaggaatattttgtcaccactcccggcactgaaacaagcgaaactcagaaggctatgatcgttccttcaagtcccagcaagacacctgaggaagtgtccacccctgcagaagaggaaaaactgtacctgcagacaccaaccagctctgagcggggggggtcacccatcattcaagagcccgaggaaccttccgaacatcgagaggaaagcagcccgaggaagacttccttggtcatcgtggaaagcgctgacaaccaaccagaaacatgcgagaggttggatgaggacgcagcgttcgagaaggagctcacggaagaacttggagaacttgaggcgtcctctgacgaggaagctatggtgaccaccagagtagtgcggaggagagtgattatccaaggggacgatatgcctgagatccccccagagaccgttacggaagaagagtatattgatgagcatgggcacaccgttgtgaaaaaggtgacccgcaaaattatccgtcgatacgtgtcgagcgagggcaccgagaaagaagaaattatggttcagggcatgccccaggaaccagtgaatatcgaggaaggagatggctactctaaggtgatcaaacgcgtagtactcaagagcgacacagagcagagcgaagttaccttgtgtgagcccagcattctctcttcgacctcccagttccaggccgagcctgtggaaggcagaagggtgagcaaagtggtgaagacaaccgtggtgctcggggagcgcatggaaaagcacttaggtgacagctcactcgctaccgatctgccttctgccaaagatgatttcgaggaatag

SEQ ID NO: 179014 - DNA, 3345 bp, synthetic construct
  misc_feature 1..3345: note = Description of Artificial Sequence: Synthetic coding sequence
  source 1..3345: mol_type = other DNA
atgaccaccatgctgcagaagagcgacagcaacgccagcttcctgcgcgccgctagagccggtaatctagacaaagttgtagagtacctcaagggggggatagatattaacacatgcaatcagaatgggctgaacgctctgcacctcgctgcaaaggaggggcatgtagggttggttcaagaactccttggcaggggaagctcagtggattctgccactaagaaggggaacacggctctgcacattgcatccctggctggccaggctgaggtcgttaaagtcttggtgaaggaaggagccaatatcaacgctcagtcacaaaacggctttacccctctatacatggcagcccaggaaaaccacatagacgtggtgaaatatctcctagagaatggcgccaatcagtccactgctaccgaagacggttttacaccattagccgttgctctgcagcagggtcataaccaggcagtcgccatcctgctcgaaaatgataccaagggaaaagtccggctgcctgcccttcacatagcagctagaaaagacgacactaaatctgcagctctgcttctgcagaacgatcataatgctgacgtccagagtaagatgatggtaaacagaaccacagaatccggctttacgcccctgcatattgccgcccattacggcaacgtcaacgttgctactctgttgctgaatcggggagcggccgtcgattttaccgcaagaaacgggataacccccctgcatgtagcctcgaaacgcggaaacacaaatatggtgaagttactcctcgaccgggggggacagatcgatgccaagaccagggatggattgactccccttcactgtgcagcccgcagcgggcacgatcaagtagtagagttgttgctcgaaaggggagccccactgttagctagaaccaagaacggcttgagcccactgcacatggcagcccagggagatcacgttgagtgcgtcaaacacctgctgcagcataaagcacctgtggatgacgtgactcttgactatcttacggcgctccacgtagccgctcattgcggccactatcgtgttaccaaactgctgctggataaacgtgccaaccccaatgctagagccttaaacggtttcactccactgcatattgcctgcaagaaaaataggatcaaggtgatggagttgttggtgaaatacggtgcctctatccaagccattactgagtctgggctgacccccatacatgtggctgcttttatgggacatctgaatatcgtgttgctgctcttgcagaatggcgcatctcccgatgttaccaacattaggggggaaacagcccttcacatggccgccagagctggccaggtcgaggtagtacgctgtttgctcagaaatggggcccttgtggatgcgcgagcacgggaagaacaaacacctcttcacattgccagtagactagggaagaccgagattgtacagcttctactgcagcatatggcgcaccctgacgcggccactaccaatgggtacacaccattacatatcagcgcaagggaaggtcaggtggatgtggcctccgtgctgctcgaggctggagcagctcattcactggccacgaaaaagggattcacgccacttcacgtggcggctaagtacggttccctcgatgtggccaagctcctactgcaacggagagcggccgcggacagtgcaggcaaaaacgggcttactccactgcatgtcgcagcccattacgacaaccagaaagtggccctgcttctactagaaaagggcgccagcccccacgccaccgccaagaacggttacactccactgcacatcgcagcgaagaagaaccagatgcaaattgcctctaccctgttgaactatggggcagagaccaacatagtcacaaagcagggcgtgactcctctgcatttagcatctcaggagggacacactgatatggtgaccctgttgctggataagggggcaaatatccacatgtctacaaagagtggacttactagcttacacctcgccgcacaggaagacaaagtgaacgtagctgatattctgacaaaacacggcgctgatcaggatgctcataccaaactcggatatacaccactgattgtggcctgtcactacgggaacgtcaagatggtgaactttctacttaaacaaggggctaacgtcaatgccaaaactaagaatggatatactcccctgcatcaggctgctcagcagggacacacccacattattaacgtgctgctacaacacggagcaaaacctaatgctaccaccgctaacggaaataccgccctcgcaatcgccaaaagactaggttacatcagtgtcgttgacactctgaaagtcgtgacagaagaggtgacaacgacgactacaactatcacagaaaaacacaaattgaatgtgcctgaaactatgactgaagttctggatgttagtgacgaagaaggagatgacaccatgactggcgacggtggagagtacctaaggcccgaagacctcaaagaacttggagacgattcgctccctagctcgcaatttctcgacggcatgaattatcttcggtatagccttgagggaggcagatccgactcccttagaagctttagcagtgatcgatcccacaccttgagccatgcctcttatctgagggactccgcagtgatggacgactccgttgtgatcccctcccatcaggtcagcacactggcaaaggaggcggagcgcaactcgtacaggctttcatggggtacagaaaacctagataatgtggctctgagctcaagtcccatacacagcggttttctcgttagcttcatggtggatgccagagggggggccatgagggggtgtcgacataacggactgcggataattatacccccacgtaagtgcaccgctcctacgcgtgtgacctgccgcctggttaagaggcaccgcctggccactatgccaccaatggtcgaaggagaaggtctggccagcagactgattgaagtcgggccatccggggctcagtttctgggcaagctacatcttcctactgcaccaccacctcttaatgagggcgaatcattggtgtctaggattctgcagctagggcctcccggcaccaagtttctcggtcctgttatcgtcgaaattcctcactttgccgcactacgcggtaaggaacgtgagctcgtggtgctgagaagtgaaaacggcgactcctggaaggaacacttctgtgattacacggaagatgagctcaatgaaattttgaacgggatggacgaggtcctggacagccctgaggacctggaatag

SEQ ID NO: 179015 - DNA, 5193 bp, synthetic construct
  misc_feature 1..5193: note = Description of Artificial Sequence: Synthetic coding sequence
  source 1..5193: mol_type = other DNA
atgatgaacgaggacgccgcccagaagagcgacagcggcgagaagttcaatggcagctcccaacgtcggaaacggccaaaaaaggtgacatgcccacagatgaagcccgaagccgcaaatatcgaaaaaagtgattctaatgcctccttcctccgggctgctcgggctggcaacctcgacaaggttgtggaatacctgaagggtggcattgatattaatacctgcaatcaaaatggattaaacgctctgcacctggcagcaaaggagggccatgtcggcctcgttcaagaattgctgggacgcgggtcaagcgtggactcggccacaaagaagggcaacactgcactgcacatcgcgtcacttgcaggccaggctgaggtcgtaaaagtactggtgaaggagggcgctaatatcaacgcacagagccaaaacgggtttacgccattatacatggcagcccaagagaaccacattgacgtagtcaaatatttattggagaatggcgctaatcagtcgacagcaacggaagatggtttcacaccactggctgtcgcccttcagcagggccacaatcaggctgtggcaatactcctggagaatgataccaaggggaaagtcagacttcctgctctgcatatagctgcgcggaaggatgacacaaagtcggcagcactgttgcttcaaaacgatcataacgccgacgtgcagagcaaaatgatggtgaatcggaccacggaatcggggtttacaccactgcacatagctgcccactacggcaatgtgaacgtggcaaccctgctgctgaatagaggggctgccgtggactttaccgcgaggaacgggattacgcctttgcacgtggccagcaagagaggcaatacaaacatggttaagcttctgttagaccgcggcggccagattgatgcaaaaactagagacggcctgacccctctccactgtgcagccagaagcggtcacgatcaagtcgtagaactgctgctggagagaggcgcgcctttgttggcacgtaccaagaatggcttgtcccctttgcacatggctgctcaaggagaccatgtggagtgcgtcaagcatctgcttcagcataaggcacctgtggacgatgtaactctggactacttgacggctctgcacgttgcagctcattgcggccattatagggtcaccaaacttctcctggacaaacgggccaaccctaacgcccgggccctcaacgggttcactccccttcacatcgcatgtaagaaaaaccgaatcaaagtgatggagttactggtcaaatacggtgcttccatccaggcgatcacagaaagcgggctcactccaattcatgttgccgcattcatgggtcatctgaacattgtacttctgcttctccagaacggagccagccctgacgtgacaaatatccggggggagacagctcttcacatggccgcccgcgccggccaggtcgaggttgtccggtgtctcctgcgtaatggtgccctcgtggacgctagagcccgggaggaacagacccctctgcatatcgcctctcggctcggaaaaaccgagattgtgcagctgctgctgcagcatatggcccaccctgatgctgccacaaccaatggttatacacctttgcacatcagcgcgcgtgaaggccaggtagatgtggcatctgttctgctggaagccggagccgcgcacagcctcgcgaccaagaagggatttacaccgctacacgtggcagcaaagtacgggagcctggatgttgctaaactactgctccagcgtcgcgcagctgccgatagtgccggcaagaatggactgacgcccctgcacgtggctgcccactacgataaccagaaagtcgctctacttctgttggagaaaggggcctcgccgcacgcaactgcaaaaaatggctatactcccttgcatatcgcagccaagaagaaccagatgcagatcgccagcacgctcttgaactacggcgccgagacaaacatcgtgactaagcagggcgtcactcccttacatctcgcgtcacaagaaggacataccgacatggtgacactccttctcgataaaggcgccaacatccatatgtcaacaaagtccggactgacctcactccatttggcggcccaagaggacaaggtgaatgtcgcagatatcctgaccaaacacggggccgaccaggacgcgcacactaaactgggatacacccccctaatcgtcgcttgccattatggaaatgtgaagatggtgaactttctattaaagcagggcgctaatgtcaatgccaaaacaaaaaacggctacacacctcttcaccaggctgcacagcagggccacactcacattattaacgtcttgttacagcatggcgctaagccaaacgccaccaccgccaatggtaacaccgctcttgccatcgcgaaaagactgggttacatcagtgtagttgacacgttgaaggttgtcactgaggaggtgacaacaacaaccacgacaataactgaaaaacataaactcaacgtcccggaaactatgactgaagtgcttgacgtgtccgacgaagagggcgacgatactatgacaggcgacggcggcgagtatctacgccctgaagacctaaaagaactgggcgacgactccctgccgtccagccagttcctcgacggcatgaattacctacgttattctctcgagggaggccgctccgactccctccggagcttctctagtgacagaagtcataccctgagtcatgcgtcttatctacgagacagcgccgttatggatgactccgtcgtgattccgtctcatcaggtatccaccttggccaaggaagccgaaagaaacagctatcgcctgagctggggaacggaaaacctggacaacgtcgcactgtcgagcagcccaatccatagcggttttttagtaagctttatggtggacgcccgaggtggggctatgagagggtgccgacataatggcctccgtatcattattcctccccgcaagtgcaccgcccctacaagggtgacctgccgactggtcaagcgtcatcggcttgctactatgccaccgatggtcgaaggagagggtttagcttctaggcttatcgaagtggggccaagcggagcgcagttccttgggaagcttcatctccctaccgctcctccacccctgaacgaaggtgaatctttagtcagtaggatactccagctcgggccccccggcacgaaatttctcggacccgtaatcgtcgaaatcccccacttcgccgctctccgaggaaaagaacgtgagctggtcgtgttacgatctgagaacggggattcatggaaagagcatttttgcgactatactgaagacgaactgaatgaaattctgaacggtatggacgaggtgctggattccccagaggatctggaaaaaaaacggatttgccgaatcatcacaagggattttccgcagtatttcgccgttgttagccgcataaaacaggacagtaatctgattggccctgagggaggtgtgctgtcgtcaactgtggtgccccaggtgcaggccgtgttcccagagggagccctgacaaaaaggatcagggttggactgcaagcccagcccatgcactctgagctcgtcaaaaaaattctgggtaacaaggccactttcagcccgattgtcactctggagcctaggaggcgcaagtttcacaagcctatcacgatgaccatccccgttccgaaggcctcttctgacgtgatgctgaatggtttcggaggggacgcgccgaccctgcgtctcttgtgctcaatcaccggaggcactacaccagcgcagtgggaggacataaccgggaccacacccctcacctttgtgaatgagtgcgtcagcttcaccaccaatgtgtccgctcgcttctggttgatcgattgtcgtcagatccaggaatcagttacctttgcctcccaggtgtatagggagatcatttgcgtgccatatatggcaaagttcgtcgtattcgcgaagagtcacgaccccattgaagctaggctccggtgcttttgcatgaccgacgacaaagtcgacaaaacactggaacaacaggagaactttgctgaagtggctcgatctcgcgatgtggaagtactcgaaggcaagcccatttacgtggattgttttggtaatctagtgccactgacaaaatctggacagcaccatatattttccttttttgctttcaaggaaaacaggctgccgcttttcgtgaaagtaagggacacaacacaggagccatgtggtaggctgtcctttatgaaggaacctaagtctactagaggcttagtgcaccaggctatttgcaacttgaatattaccctgcccatctacaccaaggaaagtgaatcagatcaggagcaagaggaagagatagatatgacttctgagaaaaacgatgaaacagagagcactgagacttcggtacttaagtcacatttggtaaacgaggttccggtgctggcaagccctgatctgttatcagaggtctcagagatgaagcaggatttaatcaaaatgacagccattctcacaactgatgtctctgataaggccggctctataaaggtaaaagagctagttaaggcagccgaggaggagccgggagaacccttcgaaattgtcgagagggtcaaagaggacctggagaaggttaatgagatcctgagaagcggcacctgtactagggatgaaagcagcgtgcagagcagccgcagtgagcgaggcctagttgaagaagagtgggtaatcgttagcgatgaggaaatcgaagaagcaaggcaaaaggctccccttgaaatcaccgaatacccttgtgtagaagtccggattgataaagaaattaagggcaaggttgagaaggacagtactggtctggtgaattacttgaccgacgatttgaacacttgtgtacctctgcccaaagagcagttgcagactgttcaggacaaggccgggaaaaagtgcgaagcgctcgccgtggggagaagtagtgaaaaagaaggtaaggacatccctcctgatgagacacagtctacacagaaacagcacaagccaagtttgggaataaaaaagcctgtgcgtcgaaaactcaaggagaagcaaaagcagaagtag

SEQ ID NO: 179016 - DNA, 5592 bp, synthetic construct
  misc_feature 1..5592: note = Description of Artificial Sequence: Synthetic coding sequence
  source 1..5592: mol_type = other DNA
atgaccaccatgctgcagaagagcgacagcaacgccagcttcctgcgcgccgcccgggctggaaatttagataaagtagttgagtacctgaaaggtggtatcgatattaacacttgtaaccagaatgggctgaatgccctgcatctggcggctaaagagggacatgtggggctggtgcaggagctccttggcaggggaagcagtgtggattcagctacgaaaaagggtaacactgcactgcatatcgcttcgctcgccggccaagccgaagtcgtaaaggtgctggtcaaagagggcgccaacatcaatgctcagagccagaacggtttcactcctttgtatatggcagcacaggagaaccatattgacgtcgtaaagtaccttctcgagaatggcgcgaaccaatctacggctacagaagatggcttcactcccttagccgtggcgttacaacagggccacaaccaagccgtggcaatccttttggagaatgacacaaagggcaaagtccgcctgcctgctctccacattgcggctagaaaggatgatacgaaaagcgctgcccttcttctccagaatgaccataatgccgatgtgcagagcaaaatgatggttaacagaactactgagtctggcttcacccccttgcacatcgccgcacactacggtaatgtcaatgtagctaccctgctgctgaatagaggagccgctgtcgattttaccgcccgaaatggtatcacccccttacatgttgcaagcaaacgcggaaatactaatatggtgaagctgctccttgaccgcggcggacagatcgacgccaaaactcgagatgggctgacccctttgcattgcgccgctcggtccggtcatgaccaggtcgtcgagttactgctggagagaggagccccgctgctagcgaggaccaagaatggcctctcgccactgcatatggcggcacaaggcgatcacgttgaatgcgttaagcatctccttcagcacaaggcccctgttgatgatgtcacactggactacctgaccgccctgcacgtggccgcccattgtggtcactatcgggtaacaaagcttttgctcgataagcgggcaaacccaaatgctcgggcactgaacggatttacccccttgcacatcgcctgtaaaaagaatagaatcaaggtgatggaactcttggttaagtatggggcctctatccaggcgattacagaatctggtcttacacccatccatgttgctgcctttatggggcacctcaatatcgttcttttgttgctacagaatggtgcttctcccgatgtgaccaatataaggggcgaaacggccctgcacatggcagccagagccgggcaagtggaggttgtgcggtgtcttctgagaaacggggcattggtcgacgcacgggcgcgcgaagaacagacacccttacatatcgctagtcggttaggaaagaccgagatcgtgcagcttctcctgcaacacatggcacatccagatgccgccacaacgaacggttatacacccctgcacatttccgcccgagagggccaggttgacgttgcctctgtacttctggaagcaggcgcggcacacagcctcgccacaaagaaagggttcacccctttgcacgtcgcagctaaatatggatccctggacgtggctaaactgctgctccaacggagagccgcggcggattcagccggtaagaacggacttaccccgctccacgtcgccgctcattatgacaaccagaaagtagccttattgctgctagagaagggcgcatctccacatgctaccgccaagaacggttatacgcccctacatatcgcggccaagaagaatcaaatgcaaatagcatcaacactgctgaactacggtgctgagactaacattgtgaccaagcagggcgttaccccattacatttagcgtcacaggaagggcataccgatatggttaccctgctgctcgacaaaggagcgaatatacatatgtccacaaagtcagggctgacctcgctccacctcgctgctcaggaggataaggtaaacgtagccgacattttaaccaaacacggcgccgaccaggacgcccacactaagctggggtacacaccacttatcgtggcgtgtcattatggaaacgtgaagatggtcaacttcctgcttaagcagggcgctaacgtgaacgcaaagactaaaaacggatataccccacttcaccaggccgcacaacaaggacatacccacatcattaatgtccttttgcagcatggagctaaacctaacgctactactgccaatgggaataccgctctggctatagcaaagcgcctgggttacatcagtgtcgtagacaccctcaaagtcgtgactgaggaggtcacgactaccactacaactattaccgaaaagcacaaacttaacgtccccgagaccatgaccgaagtgctagatgtctcagatgaggagggagacgatacaatgactggcgacggtggcgaatatctgaggccagaggatctcaaggagctcggagatgacagcctgccctcctctcaattcttggacggtatgaattatctcaggtactctcttgaaggaggtcgctctgacagcctgcgaagcttcagcagtgaccgttcccacaccctctcccacgcctcctacctgcgtgatagcgcagtcatggatgactctgtcgtgataccgagccaccaggtctcaaccttggccaaggaggcagaacggaacagttatcggttaagttggggaaccgaaaatctggacaacgtggccctctccagcagccctatccactcaggccgagctagcccatgcctggaaagagacaacagctccttcctcgtcagcttcatggtcgacgctaggggaggagcaatgcgtggttgccgtcacaacggtctaagaatcattatcccgcccaggaagtgtacggcacctacccgggtgacctgtagattggtcaaacggcacaggttagccactatgccacccatggtcgaaggagagggcctggcatcccgcttaattgaggtaggaccaagtggggctcagttccttggcaaacttcacctccccacagctccaccgcccctcaacgagggcgagtccctggtaagtaggattctgcagctcggccctcctggtacaaagtttttgggccctgtgatcgttgagattccccacttcgctgccctgcgtggaaaagaaagagaacttgtcgtgctacggagtgaaaacggagattcttggaaggaacatttctgcgattacaccgaggatgagcttaatgaaatcctgaacggtatggacgaggtgttagattccccggaagatctggagaagaagcgaatttgcagaattatcacacgcgatttccctcagtattttgccgttgtgagccggatcaaacaggattctaatttgatcgggcccgaaggtggtgtgctcagcagtacggtagtaccccaggtccaggcagtgtttccagagggcgccttgacaaaaaggattcgagtcgggctccaggcccagcctatgcatagtgaactcgttaagaaaatcctcggcaataaagccacattcagtccaatagtcacgcttgaaccaaggagaagaaagttccacaaacctatcactatgactattcctgtgcctaaggcttcttctgacgttatgctcaatggcttcgggggtgatgcccctacgctgcgcctgctctgtagcattaccggaggcactactccggctcagtgggaagacatcacaggcaccacccccctgacttttgtcaatgagtgcgtgtctttcacgaccaacgtgtcagctcggttttggctcattgactgcagacaaattcaggaatcagtcacctttgcgtctcaggtttatcgcgaaatcatctgtgtgccctacatggccaaatttgtggtcttcgctaagtctcatgacccaattgaggcccggttgagatgcttttgcatgaccgatgataaggtagataagactctggaacagcaggagaattttgcagaggttgcacgatcacgggatgtagaggttctggagggaaaaccaatctatgttgattgcttcggcaacttggttcccctcacaaagtccggacagcaccatattttctcctttttcgcctttaaggagaaccgccttcccctgtttgtgaaggtgcgcgacacaactcaggagccgtgcggccgcctgtcattcatgaaggaaccaaaatccactagaggcttggtgcatcaggctatctgcaacctcaacatcaccctgcccatctataccaaggaatcagaatcggaccaggaacaggaagaggaaatagatatgacaagcgagaagaacccgcaggacgagcaggagcgaattgaggaacgcctagcctatatcgctgaccacctggggttctcatggaccgagctcgcaagggaacttgacttcactgaagagcagattcaccagattagaatcgaaaatcctaacagcctgcaggatcagtcccatgctctgctgaagtactggctcgagcgcgacggtaagcacgccactgatactaacctggttgaatgtttgacaaaaatcaataggatggacatcgtgcacctcatggagactaacacagaaccgttgcaagagcgaatttctcacagctatgcagaaatcgaacagactatcaccctggatcattctgagggattctccgtgctgcaggaagagttgtgtacagcccagcacaagcagaaagaagagcaggccgtctccaaagagagtgaaacctgcgaccatccacccatcgtgtcagaagaggacatctctgtggggtatagtaccttccaggatggtgtgcctaagactgaaggcgatagctccgcgacggccctcttcccccagacccacaaggagcaggttcagcaggacttctcaggaaagatgcaagatcttcccgaagagagttctctggagtatcagcaggaatatttcgtgacaactcccggcaccgagacctcagagacacaaaaagccatgatcgtgccaagctctcccagcaaaacccctgaggaagtgtccactcccgctgaggaagagaaactttacttgcagacgccaacttcaagtgagcgcggcggatccccgatcattcaggaacccgaggagccttctgagcatagagaagagtcctcgccccgcaagacttcacttgtgattgtcgagagtgccgacaatcaaccagaaacatgcgagagactggacgaagacgccgcttttgaaaagggtgatgatatgccagaaatcccccctgaaacagtaacagaggaggaatacattgatgagcacggccacacggtggtgaagaaggttaccaggaaaatcattagacggtacgtatcatctgagggtactgaaaaggaggagataatggtccagggcatgccacaggaacctgtaaatatcgaagagggcgatggatacagtaaagttattaagagagtggtgttgaagtccgacactgagcagtccgaagacaacaatgagtag

SEQ ID NO: 179017 - DNA, 5586 bp, synthetic construct
  misc_feature 1..5586: note = Description of Artificial Sequence: Synthetic coding sequence
  source 1..5586: mol_type = other DNA
atggccagcagcgccagcagcagccccgccggcaccgaggacagcgcgccagctcagggaggtttcggctccgattactctcgttcctcacgcaagagcgatgcgaatgcaagttacctccgtgccgcgcgtgcaggccacttggagaaagcccttgactacatcaaaaatggggtggacatcaacatttgcaaccagaacggcctcaatgcattacatctggcttccaaggagggtcacgtggaagttgtgtccgaactcttgcagagggaagcaaacgtggacgcagcaacgaagaagggaaacacagctctgcacatagcatcgctggcaggtcaagccgaagtagtaaaggtgcttgttaccaacggggctaacgtaaacgcccaatcgcagaacgggtttactcctctgtatatggcagcacaggagaaccatctcgaagtggtcaaatttctcttggataacggcgcttcccagtctctcgccacagaagacgggttcaccccactggctgtcgcactgcagcagggccacgaccaggttgtgagcttgctgctcgagaacgatactaaaggtaaggtaagactgccagcacttcacatcgccgccagaaaggatgacactaaagccgccgcactgctccttcaaaatgacaataacgcagacgtagagtctaaatcaggatttaccccgcttcatattgccgcacactacggaaacataaacgtggctaccctcctgctcaaccgcgccgccgccgtggacttcactgccaggaatgatattacacccctgcacgtcgctagtaaaagaggaaacgcgaatatggtcaagctcctgctcgatcggggggctaaaattgatgcgaagacccgagatggcctgacacccttgcattgtggcgctagatccggtcacgaacaggtggtcgagatgctactcgacagagcagcaccaatcctgagcaagacaaaaaacggactgtcccccctacacatggccacacagggagaccacctcaattgcgtgcagctgctcttacaacacaatgtgcctgtggacgatgtcacaaacgactacttgacagccctgcatgtggccgcgcattgtggacactacaaagtggccaaggtgttgctggacaagaaagccaaccctaatgcgaaggctctgaatggattcactccactgcacatagcatgcaagaagaaccgcataaaagtgatggagctgctactgaagcatggagccagtattcaagccgtgaccgagagcggactcacccctatccatgtggcggcttttatggggcacgttaatattgttagtcaacttatgcaccacggagctagccccaacacaacaaatgtgaggggcgaaactgcactgcacatggccgcaagatcagggcaggccgaagttgtaaggtatctggtgcaggacggggcgcaagtggaggccaaggccaaagatgaccagacacccctgcacatctctgccagactgggcaaggctgacattgtgcaacagctgctgcagcagggcgcatcccccaacgcagcaacaacaagcggctacacccctctccatctgtccgccagagaaggccacgaggatgtggctgccttccttctggatcacggcgcctcactgtcaattactacaaagaaaggctttaccccacttcacgttgctgcaaaatacggcaagctggaagttgccaacctgctgctgcagaaaagcgcgtctcctgatgctgctggtaaatccggcttaacccccctccacgtggctgctcattacgacaaccaaaaggtggcgctgctcctcctggatcaaggcgcctctccccacgcagctgccaagaacggatacacacctctccatattgctgccaaaaaaaaccagatggacatcgccacaacgctgctggaatacggggccgacgccaacgcagtgaccaggcagggcatcgcctctgtacatctcgcagcccaggaaggacacgtggacatggtgagtttgttactcggaaggaatgcaaacgttaacctaagcaataagtccggtcttacaccacttcatttggcagcgcaagaagatagagtgaatgtcgccgaggtcctcgtaaaccagggagcccacgtagacgcccagacgaagatgggatatacccccttacacgtcggatgtcattacgggaacatcaagatcgtgaacttcctcctgcaacactctgctaaagttaatgccaagacaaaaaacggatataccccgctccatcaggcagctcaacaaggacacacacacattataaacgtgctgctccagaacaacgcctcacctaacgaactcacggtcaacggcaacacggcccttggcatcgcacggcggttgggctatatcagcgtggttgataccctgaagattgtcactgaggaaactatgaccaccaccacggtcactgagaagcacaagatgaacgttccggagactatgaacgaagtgttggacatgtcagatgacgaagtgcgaaaggcaaatgcgcctgaaatgctctcagatggtgaatatatcagtgatgtggaagagggagaggatgctatgacgggagacactgacaagtacctgggcccacaagatctgaaggagctgggagacgatagccttccagctgaaggatatatggggttctctctgggggcccgttccgcaagtctgcggagtttctccagtgaccgatcctacaccctcaaccgatcttcgtacgccagggattcaatgatgatagaagaactgttggttccttctaaagaacagcatctgacttttactcgggagtttgactccgattcgctgagacactactcctgggccgcagatactcttgacaacgtgaatctcgttagctccccaatacacagtggttttctcgtgtcgtttatggtggacgctcgcgggggctccatgagaggctcccggcaccacggtatgagaataattataccacctcgtaagtgcaccgcgccaacgcggatcacctgcaggctggtgaagaggcacaaactcgccaaccctccaccaatggttgagggggaaggcctcgcgagtcggctggtggaaatgggaccagcaggcgcccagtttttaggaccggttatagtggagattccccacttcggttctatgagggggaaagagcgggaactgatagtccttcggtcagagaatggagagacctggaaagaacaccagtttgattctaaaaacgaagacctgacagaacttctcaacggcatggacgaagaacttgattctccagaggaactgggtaaaaagcgaatttgcaggatcatcaccaaggattttcctcagtattttgcagttgtcagcaggatcaagcaagaaagcaaccaaattggcccagagggaggcatcttgagcagcacaaccgttccgctggttcaggcttcattccccgaaggtgccctcactaagcggattagggtaggcctccaggcccaacccgtgcccgatgagattgttaagaaaattctgggcaacaaggccactttctccccaatcgtgaccgttgagccgaggcggaggaaattccataagcccataacaatgaccatcccggtgccacccccaagtggcgaaggcgtctctaacgggtataagggcgataccactcctaacttaagattgctttgttccattactggcgggacaagcccagcacaatgggaggacatcacaggcacaacacctttaacattcatcaaagactgtgtgtcattcacaacgaatgtgagcgcaagattctggctcgctgactgccaccaggtgctggaaacagtcgggctagctacacagctctaccgggagctcatttgtgtgccttacatggcaaagtttgttgtgttcgccaagatgaacgacccggtcgagtcaagcttaagatgtttctgcatgaccgatgataaggttgacaagacactcgaacaacaggagaatttcgaagaagtggccagaagcaaggacattgaagttctcgaaggtaaacctatttacgtcgactgctatggtaacctcgcccccctgactaaagggggccagcagctggtcttcaacttttacagtttcaaggaaaataggctacccttcagcattaagattagagatacatcccaggagccctgcggaagattaagctttctcaaagagcctaagactacgaaggggctgcctcagaccgccgtttgtaacctcaacatcaccctgccagcgcataaaaagattgaaaagacggataggaggcagtccttcgcctccctggccctcagaaaaagatactcctacctaacagagccagggatgagccctcaatctccctgtgaacggaccgatattaggatggctattgtggccgatcacctgggactgtcatggaccgagctcgcccgcgagttgaacttttctgtggatgagatcaatcaaatacgagtcgagaatcccaattctctcattagtcagagcttcatgcttctcaagaaatgggtgaccagagatggcaaaaatgccaccacggatgccctcaccagcgtgctgaccaagatcaatcggatcgacattgtcactcttctggaagggcccatcttcgattacggcaatatcagcgggacccggtctttcgcagatgagaacaatgtgtttcatgacccagtggacggatacccttcacttcaggtggagctggaaacacctacaggtctgcactacaccccaccaactcccttccagcaggatgactacttctccgacattagctccatcgaaagtcccctgagaacgccttctcgcctatcggacggcctggtgccttctcaaggcaatatcgagcactccgcggacggtccaccggtggtgaccgccgaagacgcttccctagaagactccaagctagaagactccgttcctcttacagagatgcccgaagccgtggatgtcgacgagagccaactggagaacgtctgtctctcctggcagaatgaaacctcttccggcaatctggaaagttgcgcgcaggccagaagggtgacgggtgggctcctcgacagactggatgatagcccagaccaatgtcgtgactcaattaccagctacctcaagggagaggctgggaaatttgaggcaaacgggtcccacacggaaattacacccgaagccaagacaaagtcctactttccagagagccaaaatgacgtggggaagcagagtactaaagagacactcaaaccgaagatccatggcagtgggcatgtagaggaacctgcatctccccttgccgcttaccaaaagtctctagaagaaacgagcaagctgataattgaagagaccaagccctgcgtccccgttagcatgaagaagatgagccgcacttctccagccgatggaaagcccaggctgtccctgcatgaggaggagggtagtagcggtagtgagcagaagcaaggggagggcttcaaggtgaaaactaagaaggagatccgacatgtcgagaagaagtctcacagctag

SEQ ID NO: 179018 - DNA, 5607 bp, synthetic construct
  misc_feature 1..5607: note = Description of Artificial Sequence: Synthetic coding sequence
  source 1..5607: mol_type = other DNA
atgagcgaggagcccaaggagaagaacgccaagcccgcccaccggaaacgtaagggaaaaaaaagcgacgccaatgccagttacttacgcgcagcgcgggcaggtcatttagaaaaagccctcgattatatcaagaacggagtcgatataaacatttgtaatcagaacgggctcaatgcactgcacctggcctctaaagaggggcacgttgaagtggtgtcagaattgctccaacgagaggccaacgtagacgcagctactaaaaaggggaacacagccctccacatcgcatctttggctgggcaggctgaagtcgtgaaggtacttgtaacaaacggcgcaaacgtgaatgctcagtctcaaaacggcttcacacctctgtacatggcagctcaggagaatcaccttgaggtagttaaatttcttctggacaatggcgcttctcagagcctagcgaccgaggacggttttactcccttggccgtggctctgcagcagggccatgatcaggttgtgtccctgctgcttgaaaatgatactaaaggcaaggtcagattgcctgctctgcacattgctgccagaaaagatgatacaaaagcagccgccctcctgcttcagaatgataataacgccgacgtggaaagcaaatcaggcttcactccactccacattgccgcacattatggcaatatcaatgtggccaccctgttgctgaatcgggccgctgcagtggacttcactgccagaaatgacatcactccccttcatgtcgctagtaaaagaggcaacgctaacatggtgaaactgcttctagaccggggtgcgaaaatcgatgctaagacgagggacgggttgactcccctccattgcggggcccgttccggccatgagcaggtggtggaaatgctgctggaccgggccgccccaatactgtcaaaaactaagaacgggctctctcctctgcacatggccacgcagggggaccatttgaactgcgtacagctcttactgcagcacaacgtgccagtggatgatgtcacgaatgattatctcacagccctgcacgtggcagcccactgcggacactacaaagtagccaaggtgctgctcgataagaaagcgaaccccaacgccaaggcactgaacggcttcacacccttgcacatcgcttgtaaaaagaacaggataaaagtaatggagctgctgctaaagcatggagcctcgattcaggccgtgactgagtcggggttaacccctatccacgtggctgctttcatggggcacgtcaacattgtcagccagctaatgcatcatggggcctcccctaatacgactaacgtccgcggggaaaccgccttgcatatggcggctcgttcaggccaagctgaagtggtccggtacctcgtgcaagacggcgcccaagttgaagctaaggctaaagatgaccagacgccgctgcacatcagcgctcggcttggaaaggctgatatcgttcagcaacttctgcagcagggcgctagtccaaacgccgcgaccacatccggctacactcctctccacctcagtgcacgcgaggggcatgaagatgtggcggcattcctgctggaccacggggctagcctgagtattactacaaagaaagggtttactccgctgcatgttgccgccaagtacggcaaactggaggtcgccaacctcctcctacagaagagcgccagcccagatgccgcaggtaaaagcgggctgacgcctctgcacgtcgctgcccactacgacaaccaaaaagttgccttactgcttcttgaccaaggcgcaagccctcatgcggccgcaaagaacggatatacgcccctccacatagccgcaaagaagaatcaaatggacattgcaacaacactgttggaatatggcgcagatgccaacgccgtgacgcgccaagggatcgcatctgtgcatctcgcagcccaggaaggccacgtcgatatggtttccctgctccttgggcggaacgccaacgtgaatttgtcaaataaatccggattgacccctcttcacctcgctgcacaggaggatcgagtcaatgtggccgaggtgctcgtgaatcaaggcgcccacgtggatgcccaaacaaagatggggtataccccactgcacgtggggtgtcactatggaaacatcaaaattgttaattttctgttacagcattctgcgaaagtgaatgcgaaaactaagaacggctacacaccacttcaccaggcagcccagcaaggacatactcatatcattaatgttctgctgcaaaataacgcctcgcccaacgagttaacagttaatggaaataccgctctgggaattgctagaaggctggggtacatctctgtcgtagacactttgaaaatagttactgaagagacaatgaccaccaccacggtaaccgaaaagcataaaatgaatgtccctgaaacaatgaatgaagtcctggacatgtctgatgacgaggtgcggaaggcgaatgcccctgaaatgctgagtgacggtgaatatatctctgatgtggaggaagggaatcggtgtacttggtacaagattcctaaggtccaagaattcactgtgaagtcagaggacgctatgaccggcgatacagataaatatctgggacctcaggacctgaaggagctgggggatgactcgctccccgccgagggttacatgggtttcagtctcggtgctcgtagcgcttcgctcagatccttctcttcagacaggtcatatactctcaaccggtcatcatacgctagggactctatgatgatcgaggaactcctcgttccctctaaagaacaacatttaaccttcacacgcgagttcgactctgactcactgagacactactcgtgggcagccgataccttagacaacgtgaatctggttagttctcctatccatagcggtttccttgtttcattcatggtagacgcgcggggcggaagtatgagaggatcaaggcaccatggaatgaggataattattccgccacgcaagtgtaccgccccaacgaggataacctgccggttagtgaaaaggcataaactcgcgaacccaccacctatggtggaaggggaaggccttgcgagtcggttggtcgaaatgggcccagccggggctcagtttctgggcccagtcatcgtggagattcctcatttcggatccatgcgaggtaaggagcgggagcttattgtgttacggagcgagaacggagagacctggaaagaacaccagttcgacagcaagaacgaggacctgacagagttactgaatggaatggacgaagagctggattctcctgaggagctgggcaaaaagcgcatttgcagaatcatcaccaaagactttccacaatacttcgcagtagtgtcacgcatcaagcaagaatcaaaccagataggccccgagggcggtattcttagtagcacgactgtgcctctggtacaagcgagtttccccgaaggagctctgacgaaaaggatcagagtaggtttgcaagcacaacccgttcccgatgaaattgtcaagaaaattctgggcaataaggcgaccttcagtcctattgtgaccgtggaaccaagaaggaggaaatttcacaagccaataaccatgacgatcccggtccctcctccgagcggggaaggtgtctctaacggatacaagggtgatacgaccccaaacctccggctgctttgttccattaccggaggcacctctcctgctcaatgggaggacattacgggaacaactcccctgactttcatcaaagactgtgtcagcttcacaaccaatgtgtccgcccgattctggttggctgactgccaccaggtccttgaaactgtaggcttggcgacacagttgtaccgggaattgatctgcgtaccgtacatggctaagtttgtggttttcgccaagatgaatgaccctgtggagtcgtcactacggtgtttctgcatgactgatgacaaggtggacaaaacgctcgaacagcaggagaactttgaagaagtcgccagaagcaaagatatcgaggtactcgaaggcaaacccatctacgtagactgctacggaaacctggctccactcactaaaggagggcagcaattagtgttcaatttctacagttttaaggagaataggttgcccttcagcataaagatacgggatacttctcaggaaccctgtggaagattgtctttcttgaaagaacccaagactaccaaagggcttcctcagaccgcagtgtgcaacctgaatatcactctgcctgcccataagaagatagaaaaaaccgatagaagacaaagtttcgccagtttagctctcaggaaacgctattcctacctgacggaacctggaatgtcacctcagtccccatgtgaacgtactgacatcagaatggccattgtggccgaccatttgggattatcatggaccgaactcgcaagagaacttaactttagcgtggacgaaataaaccaaatacgagtcgagaacccaaactctctcatatcccagtcatttatgttactgaaaaaatgggtgacccgagacggtaagaacgccacaactgatgccctgactagcgttctgaccaagatcaaccgtatagatatagtaaccctgctggagggaccaatcttcgattacggaaatattagtggaacaagatcatttgccgacgagaataacgtctttcatgatccggtcgatgggtacccttctctgcaggtagagctggaaactccaaccggtctgcattatactccacctaccccatttcagcaggacgactacttttcagacattagctcaattgagagccccctacggacgcccagccgattgtctgacggactggttccaagtcagggcaacattgaacacagtgcagacggtccgccagttgttactgccgaggatgctagtctggaggactccaagctggaagattctgttccactgacagagatgcccgaagccgtagacgttgacgaaagccagcttgagaatgtgtgtctttcttggcagaatgagacctcatccggaaacctggagtcgtgtgcacaggctcgacgggtcacggggggtctcttagatcggctggacgattctccagaccagtgtagggacagcattacctcctatctcaagggcgaggcaggcaagttcgaagctaacggaagccacaccgaaataacgccagaggcaaagaccaagtcttacttcccagagagccagaatgatgtgggcaagcagtccaccaaagaaaccttgaaaccgaaaatccatggcagtggacacgtggaggagcccgcttctccactcgcagcatatcagaagtctctggaggagacttcaaagttgataattgaggagacgaagccctgcgtgccagtgtcaatgaagaagatgagcaggacgtctcccgccgacggtaaacctagactttctctgcatgaggaggagggctcctccggatcagaacaaaagcagggagaaggcttcaaagttaagacaaaaaaggaaatcaggcatgtagagaagaagtcccacagttag

SEQ ID NO: 179019 - DNA, 13134 bp, synthetic construct
  misc_feature 1..13134: note = Description of Artificial Sequence: Synthetic coding sequence
  source 1..13134: mol_type = other DNA
atggcccacgccgccagccagctgaagaagaaccgggacctggagattaatgccgaagaagagccagaaaagaaaagaaagcacagaaagaggtcaagggaccgcaaaaaaaaatccgatgctaacgcctcctacctacgggccgcccgagccgggcatttggaaaaggcccttgattatataaaaaatggggttgacatcaacatttgcaatcaaaatggcctcaacgctctacatctggcttctaaggagggacacgtggaagtagtatctgagctgctacagagggaggccaatgtcgacgccgccacaaaaaaagggaacacagctctgcatattgccagccttgctggtcaggcggaggtagtgaaagtcctggtcaccaatggtgctaatgtgaatgcccaatctcagaacggcttcacacctttgtatatggccgctcaggagaaccacctcgaggtggtgaaatttttattagataatggggcctcccagtccctcgcgactgaggacggctttacacctctggccgtggctttacaacagggacacgatcaggtagtgagtcttctgttggagaacgacactaaaggaaaagtgagactccctgctctccatatcgctgcccgcaaggatgatacaaaggctgctgccttactcctgcagaacgataacaacgccgacgtcgaaagcaaatccgggtttactcctctgcacatcgcagcgcactacggcaacattaacgtcgccacacttctgcttaatagggctgctgctgtcgatttcacggcccgtaatgatatcactccactgcatgttgcctccaaacgcggtaacgccaacatggtcaagcttctgcttgacagaggcgccaaaatcgatgccaagacacgcgatgggttgacacctctgcattgcggcgcgcggtccggtcacgaacaggtagtcgagatgctgctggaccgagctgccccaatcctctcgaagaccaagaacggactgtcacccctccatatggccactcagggcgaccaccttaactgcgtgcagcttctgctccagcataatgtgccagtggacgacgtgactaacgactatctgactgctttgcatgtggccgcccactgcggacattacaaggtcgcaaaggttcttctcgacaagaaggcgaatcctaatgctaaggctttgaacggattcacccctctccatattgcctgtaaaaagaacagaattaaagtgatggaattgttgctgaagcatggggcatcaattcaagctgtaaccgaaagcgggctgactcccatccacgtggccgcatttatgggccatgtgaatattgtctctcagctgatgcatcacggggcaagcccaaacaccacaaatgtgaggggcgagacagccttgcatatggcggctcgatctggccaggccgaggtcgttcggtatctggtgcaggatggggcccaagtggaggcgaaagccaaagacgaccaaaccccactgcacatctccgctcgccttggtaaggctgatatcgtacagcagctcctgcagcaaggagcatcacctaatgccgcgactacttctggatatacacctctgcacctctcagccagggagggacatgaagacgtggctgcattcctactggatcacggagcctcgctatcaatcaccaccaagaagggatttactccactccacgtggcagccaaatatggcaagctcgaggtcgcaaatctgctcctccagaagagtgcaagtcccgatgccgccggcaagtccggcttaactccattgcatgtcgctgcgcactacgacaaccagaaggtcgctctgctgctcctagaccaaggggcgagtccacatgccgccgctaagaacggatatacaccactacacatcgccgctaagaagaaccagatggacatcgccaccacccttctggagtacggagccgatgctaatgcagtaaccagacagggaattgcatccgtccatcttgcagcgcaggaaggacacgtggatatggtttccctgctcctcggaagaaacgctaacgttaacctgtcgaacaaatccggcctcactcccctccatctggctgcacaggaagacagagtaaatgtggcagaggtgctcgttaaccaaggagctcacgtggacgcccagaccaagatgggctataccccattgcatgtgggctgtcactacggcaacatcaagatcgtcaacttcttattgcaacattctgctaaggtgaatgcaaagacaaaaaacggatataccccactacaccaggctgcacagcaggggcacactcatatcataaacgtgctcctgcagaataacgcaagtccaaacgagttgactgttaatggcaacaccgcacttggaatcgcccggaggttgggatatattagcgtagtcgatacgctgaagattgtgaccgaggagaccatgacaactaccacagtcactgaaaaacacaagatgaacgtgcctgaaactatgaatgaggtgcttgatatgtcggatgatgaagttcgcaaggcgaacgctccagaaatgctcagtgacggcgagtatatttcggacgtcgaagaaggtgaggacgctatgacgggggacactgacaagtatctgggcccacaggatctcaaagaactgggtgatgactcgttaccggctgaagggtacatggggttttcccttggtgcgcgatcggccagccttaggtcattctcttcggacaggagctataccctcaaccgttcatcctacgcccgtgactccatgatgattgaagaattgctcgtgccgagtaaggaacagcacttgacctttactagagaatttgactccgactcactgagacactattcctgggccgctgatactctggacaacgttaacctcgtgagctcacctatccactccggatttctcgtgtcctttatggtagatgctagaggcggcagcatgagaggaagccggcaccacggcatgaggattatcatcccgccccggaaatgcacggctccaacccggattacttgtagactggtgaagaggcacaagctagccaacccacctccaatggtggaaggagaaggtttggccagccggctggtggagatgggtccagcaggggctcaattcttaggcccagtgatcgttgaaataccgcactttggatcaatgaggggcaaagagcgggagctcatcgtgctacgctctgaaaatggagagacctggaaggagcatcagttcgactcaaagaatgaggacctcacggagcttcttaatggcatggatgaggaactagacagtcctgaggagttagggaaaaagcggatttgcagaatcattaccaaagattttcctcaatacttcgcagtggtgtcccggatcaagcaggagtcaaatcagatcggaccggaggggggtattctcagctctacaacagtgcctttagtacaggcatcattccctgagggagcgctgaccaaacgcattcgggtgggcctccaagcacagcccgtccctgatgaaatagtaaagaagatcctaggtaacaaggctaccttcagtcccatcgtaacagttgaacctcggcgacgtaagtttcataaaccaattaccatgaccatccccgtgcctccaccctctggggagggtgtttccaacggttataagggagacactactcctaaccttagattgctctgcagcatcacaggagggacaagccccgcacagtgggaggatataactggcaccactcccctgacattcataaaggactgcgtttcctttaccaccaatgtgtctgcacggttctggcttgctgattgccatcaagtcctcgagacagtgggattggcaactcagctgtatagggaactcatctgcgtgccttacatggccaaatttgtggtgttcgccaaaatgaacgaccccgtggaatcatccttacgatgcttttgcatgactgacgacaaagtcgacaagaccttagagcagcaggagaattttgaggaggttgctagatccaaggacattgaagttctggagggtaagcccatatacgtggattgctatgggaacctcgctcctctcaccaaaggtggtcaacaactcgtattcaatttctacagttttaaagaaaatcggctcccattctcgattaaaataagggacacaagtcaggagccttgtggcaggctctccttcctgaaagagcccaaaactacaaaggggctaccacagacagccgtgtgcaatttgaacattaccctgcctgcccacaaaaaagagacggagagcgaccaggacgacgaaattgagaaaacagatcgcagacagtccttcgccagcctggccctaaggaagcgctacagttatctgacggagcccggcatgattgagcggtccacaggcgctacacggtccttacccacgacctattcatataagccattcttcagcacaaggccctaccagagctggaccaccgcccccattacagtccccgggcccgctaaatccgggttcaccagcctgtcatcaagctcaagcaatacaccatccgccagtcctttgaaatcaatctggagtgtctctacacccagcccgattaagtcaacccttggagcctcgacaacgagctccgtaaaatcaatttcagacgtagcgagtcccatcagatcatttagaaccatgtctagccctataaagacagtggtgtcacaatctccatacaatatccaggtatcctctggcaccctggcacgtgctcctgctgtaacagaggccacacccctcaaggggctggcgagcaacagtacattttccagtagaacatcacctgtgaccacagccgggagtctgttggagcggtccagcatcaccatgacgccccccgcttcacccaagagcaacatcaatatgtactcctctagtcttcctttcaagagcatcattacgtccgccgctcccctgatatccagcccgttaaaaagtgtcgtatcacccgtcaaatctgcagttgacgtgatctcgtccgcaaaaattaccatggcatcttcactcagcagcccggtaaagcagatgccaggccacgccgaggtggccctggtaaacggatccatctcccctctgaaatacccaagcagcagtaccctgatcaatggctgtaaagccactgctacccttcaagaaaagatctcaagtgctactaactctgtgtcgtcagtcgtctcagcagccaccgatacagtggagaaggtattttctactacgaccgccatgcctttcagtcccttgagatcttatgtgagcgccgcacctagcgcttttcagagtctccgcacacctagtgccagcgccctttacacttccttggggtcctccatcagtgcaaccaccagctcagtgacctcatcaattataacagtgccagtctactcagtcgtaaacgttctgcccgagccagccctcaaaaagcttcccgacagcaatagctttacaaagtcggccgctgcacttttgagccccataaagacccttacgaccgaaactcaccctcaaccacatttctctaggacatctagccctgtcaagtcttcactgtttcttgcgccgtccgcattaaaactgtccactccttcctcactgagctccagccaggaaattttgaaagatgtggccgaaatgaaagaggacctgatgaggatgacagctattttgcagacggacgtgcctgaagaaaagccatttcagcccgagttaccaaaagaaggacgaatcgatgacgaggagccttttaagatcgtcgagaaagtcaaagaggatttggtgaaggtttccgaaattctgaaaaaggacgtgtgcgttgacaataagggcagccccaagtcgcctaaatctgataaagggcatagcccagaggatgactggattgagttttcatctgaagaaatccgcgaagcacgacagcaggccgccgcgagccagtccccctcattaccagagcgggttcaggtaaaagcaaaagccgccagcgagaaggactacaacctcacaaaggtgattgactatctgactaacgatatcggaagtagtagcttgacaaatctgaaatacaaattcgaagatgcaaaaaaagacggtgaagagcgccagaagagggtgctcaagcctgcgatcgccctccaggaacacaagttgaaaatgccacccgcaagtatgaggacgagtacaagcgaaaaagaactttgcaaaatggctgatagtttctttggcaccgacaccatcctcgagtccccagacgacttctcccagcatgaccaggataaatctcccttgagtgacagcggcttcgagaccagaagcgagaagactcccagtgccccccaaagcgctgaaagcaccggtccgaagccgctttttcatgaagtgcctatccctcctgtgattaccgaaaccagaactgaggtcgtgcatgttatacgatcctacgatccttccgccggcgacgtcccacagactcagcccgaagaaccggtgagcccaaagccctcaccgaccttcatggaactggagccgaagccgaccaccagtagcatcaaggaaaaagtgaaggcattccaaatgaaggcaagttcggaggaagacgatcacaacagagtactctccaaggggatgcgcgtgaaagaggagacccatattactacaactacacggatggtctaccattcacctcccggtggcgaaggcgcctcggaacgaatcgaggaaaccatgtcagtgcatgacattatgaaggcctttcagtcaggccgggatccttcaaaggagctggcggggctgtttgaacataagtctgcagtctctccagatgtgcacaagtcagccgcagaaaccagcgcgcagcacgcagaaaaggataatcagatgaaaccgaagctggagcgcatcatcgaggtccatatcgagaaaggcaatcaggccgagccgaccgaagtcataattcgagagactaagaaacatcctgaaaaagaaatgtatgtgtaccagaaagatctgagccggggggacattaacctgaaagacttcctgccggaaaagcacgatgccttcccgtgctccgaggaacaagggcagcaggaggaagaggaactgaccgccgaagagagtctccccagttacctggagagctcgagagtcaacactcctgtctcacaggaagaggattcgagaccctcatctgcccagctgatctccgacgacagctacaaaacgttgaagctgctttcacaacactcaatcgaatatcacgacgacgaactatccgagttacgtggcgagtcctatagatttgccgagaaaatgctgctcagcgagaaactcgacgtgtcacactccgacacggaagagagtgtgactgatcatgccgggccaccatcctctgaactccagggttcagataagagatcccgcgagaaaatcgctaccgcaccaaaaaaggagattctatccaagatctacaaagatgtgagtgaaaatggggtaggcaaggtgagtaaagacgagcattttgacaaagttactgtcctccattattctgggaacgtgagctcccccaagcacgctatgtggatgcggtttacagaagatcggctggaccggggaagagagaaattgatctatgaggatagagttgacagaaccgtcaaagaggccgaagagaagctgactgaggtgtcccagttttttagggacaaaactgagaaactgaacgacgagctgcaaagccccgagaagaaggctcggccaaagaacggcaaagaatactcttctcagtcacccacatccagtagtccagagaaggtcctccttacagaactactggcatcaaacgatgagtgggtcaaagccagacaacacggtcctgatggccagggtttccctaaggccgaggagaaagcaccttccctgccctcatcgcccgagaagatggtgctgagtcagcagaccgaggattccaagtccaccgtggaggcaaagggctctatctcacagtctaaggccccggacggcccccagtctggttttcagctgaagcagtcaaaactcagctctatcaggcttaagttcgagcagggtacccatgctaaatctaaggacatgtcccaggaagatagaaaaagtgatggtcagtcaaggattcccgtgaagaagatccaggagtccaaactgccggtttaccaggtatttgcaagggagaagcaacagaaggcaatagacctgcccgacgaatcagtgtccgtgcagaaagactttatggtccttaagacaaaggacgaacacgcacagagcaatgaaattgtggtgaatgattccggctctgacaatgtgaaaaaacagcgaaccgaaatgtcttcgaaagcaatgccggatagtttctctgaacaacaagccaaggacctggcatgtcatattacaagcgacctggctacgcgcggcccatgggacaaaaaggtgtttcgcacctgggaaagtagcggtgctacaaataacaaatcgcagaaggagaagttgagtcacgtgctggtgcacgatgttcgggagaatcatataggccaccctgagagtaagagcgtagaccagaagaatgagtttatgtctgtgactgagcgcgaacgcaagctgctaaccaacggaagcctgtcggaaatcaaggaaatgacagtgaagtccccatcaaagaaggttttgtatagagaatacgtggtcaaagaaggagaccacccgggcggattgctcgatcaaccttccaggagatccgagagcagcgcggtgtcccacattcccgtgagggtggccgatgagcgccggatgctgagcagtaacatccccgatgggttttgtgaacagagtgcgtttccaaaacatgaactatctcagaaactgagccagagctctatgtcaaaggagaccgtcgaaactcagcactttaacagcatagaagacgaaaaagtcacctactccgaaatctcaaaggtgtcaaaacaccagtcttatgtcggtctgtgtccacccctggaggagaccgagacaagtcccaccaaatcaccagactcactggaattctcccctggcaaggagtctccctcgtcagatgtcttcgaccattctccaatcgacggcttggagaaacttgctccgttggcacagacagagggcgggaaagagattaagacactgccagtgtacgtctcgtttgtgcaggtgggcaagcagtatgaaaaagaaatccagcagggaggagtaaagaagattatttcccaggagtgtaagacagtgcaggaaactcggggcactttctatacaaccaggcagcagaagcagccacctagcccacagggctctcctgaagacgataccttagaacaggtaagtttcctcgattcttcgggaaaaagccccctgacaccagagacacccagcagtgaggaggtgagctacgagttcacctcgaagacgccagacagcctgattgcttacattccaggcaagccttcaccgatccccgaagtctccgaggagtccgaagaagaggaacaggcaaagagtacgtcactgaagcagactacggtcgaagaaacggccgtggaacgcgagatgcccaatgacgttagcaaagattctaaccaaaggcccaaaaataatcgcgtggcatacatagaattccccccacccccacctctggacgctgaccaaatcgagagcgacaagaaacaccattacctccccgaaaaagaggtggacatgatcgaagtcaacctacaggatgagcacgataaatatcaattggccgagcctgttatccgggtgcaaccaccctccccagtgcccccaggggccgatgtgagtgattcctcggatgatgaatctatctaccagccagtacccgtgaaaaaatatacgtttaaactgaaagaggtcgatgacgaacaaaaggagaaaccgaaagcctctgcagagaaagcctctaatcagaaagaacttgagtcaaatggaagtggcaaggacaatgaattcgggctgggattggactcccctcagaatgaaatcgctcagaacggcaataacgaccagtcaatcaccgagtgttccatcgctaccaccgcagaattctcacatgacacagacgctaccgaaatagatagcttagatggatacgacttacaggatgaagacgatggtctgaccgagagcgattctaagctgccaattcaggcaatggagatcaagaaggacatctggaacacggaaggaattcttaaacctgccgaccgctcatttagtcagagcaagctagaggtgattgaggaagaggggaaagttggtccggacgaggataaacccccctctaaaagctcgtctagcgaaaagactcccgacaagaccgaccagaaatctggtgctcagttctttactctcgagggtcgccatccagacaggtctgtattccccgatacttatttcagctacaaagttgacgaggaattcgctaccccgttcaagaccgtagccaccaaaggactcgactttgatccctggtctaacaacaggggggacgatgaggtgttcgattctaagtcgcgcgaggatgaaacgaagcccttcggactggcggtggaggacagatcacctgctacgacacctgacaccactcctgcgaggaccccgaccgatgagtccacaccaacgtccgaacctaacccctttcccttccatgagggaaaaatgtttgaaatgacacgaagcggcgccatcgatatgagcaagcgcgacttcgtcgaagagcggcttcagttcttccaaattggcgaacatacttctgagggaaaatctggcgatcaaggggagggcgacaaatcgatggtcacagccactccacagccccaatcaggtgatacgaccgtcgagaccaacttggaacggaatgtggagacacctacagtggagccaaatccttcgattcccacttctggcgagtgccaagaaggcacttccagttctggaagcctcgaaaaaagcgcagccgctacgaacacctccaaggtcgatcccaagctcagaacaccaatcaaaatggggataagtgcatcaaccatgactatgaagaaagagggaccaggagaaattacggacaagatcgaggctgtgatgacctcatgccaggggttagagaatgagacgatcactatgatctccaacactgccaatagtcagatgggtgtaaggcctcacgagaaacatgatttccagaaggacaacttcaataacaataacaatttagattctagtactatccagacagataacataatgtcgaatattgtacttacagagcacagcgcaccaacctgtaccacggagaaggacaacccggtgaaagtgtcttccggaaaaaagaccggcgttttgcaaggtcattgtgtccgcgataagcagaaggtgcttggcgagcagcagaagactaaggaactgattggaattcggcagaaatccaagctgcctattaaagccacaagccctaaggacacctttcctcctaatcatatgagtaatacaaaggcgtccaagatgaaacaggtgagtcagtcggagaaaaccaaggccttaacaacctcttcttgcgttgatgttaagtcccggataccagtcaaaaatactcaccgggacaatatcattgccgttcggaaggcctgcgcaacacagaagcaagggcagcctgaaaaggggaaggcgaagcagctgccctctaagctgccagtaaaggtgaggtccacctgcgtgactactaccactaccacagctaccaccacgacgaccaccactacaacaacaaccacaagctgtaccgtaaaagttagaaagtcccaacttaaagaagtgtgcaaacattccattgaatattttaaagggatttcaggagaaacattaaaactagtagatcgcctatctgaggaagaaaaaaaaatgcaatcagagctgtcagatgaggaggaaagtacctcccgcaacaccagcctgtcggagacaagccgggggggccaaccatcagtgactaccaaatctgcccgagataaaaaaacagaagctgccccgctgaagtcaaagagcgagaaggctgggtccgagaagaggagctcaaggaggactggcccgcagtctccatgcgaaagaacggacatccggatggcaatcgtggcagatcatttgggtctgagttggactgaactggctcgagaacttaacttctcagtcgacgagataaaccaaatcagagtggagaacccaaattcccttatttcccaaagctttatgctgcttaaaaagtgggtaacaagggacggcaagaacgcaacaacagacgcactcacgtcagtgctgactaagatcaataggattgacattgtgaccctgctggagggcccaatcttcgattacggtaacatatccggcacccgttctttcgcagatgaaaacaatgtttttcacgacccggttgatggctggcagaatgaaacctctagtggaaatcttgaatcgtgtgcgcaggcccgcagagtgaccggtggtctgctcgacaggttagacgattcgcctgatcaatgccgagacagtattacatcgtatctaaagggagaagcagggaagttcgaggcgaacggctctcacactgagatcaccccagaagcgaagactaaatcttactttcccgagtctcaaaacgacgttgggaaacaatctaccaaagagacgcttaaacctaaaattcacggatcaggacacgtggaagagccagcctcccctttagccgcctaccagaaaagcctggaagaaactagtaagttaatcatcgaggagacaaagccctgcgtaccagtttccatgaaaaagatgtctcgcacctctccagccgacgggaaacccagactctcccttcacgaggaggagggtagttcgggctccgagcagaagcaaggcgagggcttcaaggtgaagacgaagaaggagattagacacgttgagaaaaaaagccatagttag

SEQ ID NO: 179020 - DNA, 3006 bp, synthetic construct
  misc_feature 1..3006: note = Description of Artificial Sequence: Synthetic coding sequence
  source 1..3006: mol_type = other DNA
atggccctgccccagagcgaggacgccatgaccggcgacaccgacaagtaccttggtccacaggatctgaaagagcttggagacgactctctcccggctgaaggttacatgggattttctcttggggccaggtcagctagtctgagatccttcagttctgacagatcatatacactgaatcggagtagctacgcccgagactcaatgatgatagaagaattactggtcccttcaaaggagcagcatctgacctttactagagagtttgattcagattcactaaggcactactcatgggccgccgacaccctggataatgtgaacttagtgtcttcccccattcactctggctttctcgtctcatttatggtggacgcaagagggggttctatgcgaggtagccggcatcatggaatgcgcatcataatacctccccgcaagtgtacagcacctaccagaatcacgtgccggctcgtgaaaagacataaacttgctaacccaccacccatggtcgagggtgagggcctggcttccagactggtggagatgggcccggccggtgcgcagttcctgggtcctgtgatcgtcgagatccctcattttgggagcatgagaggtaaggagagggagctcatcgttttacggagtgagaatggagagacatggaaagaacatcagttcgatagcaagaacgaggacctcacagagctcctcaatggaatggatgaagagctggatagccctgaagaactaggcaagaagaggatatgccggattatcactaaggatttcccacagtacttcgccgtggtctcacgcataaagcaggaatccaatcagatcggcccagagggtggaatcctatccagcaccactgtgcctttggtccaggcaagcttcccagagggcgcgctaactaagcggatccgcgtcggactgcaggctcaaccagtaccggacgaaattgtcaaaaagatattgggcaataaggccactttctcccctattgttactgttgaaccacggcgcaggaaattccacaaaccaatcacaatgaccattcccgttcccccaccatctggcgagggagtcagtaatggatataagggtgatacaaccccgaacctcagattgctgtgttccatcacaggtggcacatctcctgcccagtgggaggatatcactggcactacaccactgacattcatcaaggattgcgtcagtttcaccaccaatgtttctgcacgcttctggctcgcagactgtcatcaggtgctcgagaccgttggcctcgcaacgcagctgtatcgggaattgatctgcgtgccctatatggcaaaattcgttgtgttcgccaaaatgaatgacccagtggagtcatcactgcgatgtttttgcatgaccgacgacaaggtggacaagaccctggaacagcaggagaatttcgaagaagtggcccggagcaaggatatcgaggttctggaaggcaaacctatttatgttgattgttacggtaatctggctcccctgactaaaggtggccagcagctggtattcaacttttactcatttaaggagaaccgcttacccttctcaatcaagattcgagacacttcacaggagccatgcgggagattaagcttcctgaaagaacccaaaactaccaagggactccctcagactgccgtgtgtaatcttaacattaccttgcctgctcacaagaagatcgagaagactgacagaaggcaaagctttgcaagcttagctctaaggaaaagatactcgtacctgactgaaccaggcatgagtcctcagagtccttgtgagagaaccgacataagaatggcgatcgtggcggaccacctaggactgtcctggaccgagttggcccgcgaactgaacttttcagtcgacgaaattaaccagatacgggtggagaatcccaactcgctcatctcccagagctttatgctgctcaagaaatgggtgaccagagatggtaagaatgctactacagatgcactcacatctgtcctgaccaaaattaacaggattgacatcgtcactttgctcgagggaccgatttttgactacggcaacatctccggcaccaggtcttttgccgacgagaacaacgtctttcatgatccagtagacggctacccatcccttcaggtagagctggagactcctactggtttgcactacacacccccaacccccttccagcaggacgattacttttcagatatttcctccattgaatcgcctcttcggactcctagtagactgagcgacgggcttgttccctcccagggtaacattgagcactccgcagacggtccacccgtcgtgaccgctgaagacgcgtcactggaggatagtaagctagaggactccgtgccccttaccgaaatgccagaagctgtagatgtggatgagagccagctggagaatgtctgcctgtcctggcagaacgagacaagcagcggcaacctggaatcttgtgcacaggccaggcgtgtgactggcggcctcctcgaccggcttgacgacagtcccgaccagtgtcgcgattctatcacatcttatctgaagggcgaggcaggaaaattcgaagccaacggatctcacaccgagataaccccagaggccaagacaaaatcttatttccccgaatcacaaaacgacgtgggtaagcagtctacaaaagaaaccttgaagccaaagatacacggatctggccacgtagaggagcccgcttctcccctcgctgcctatcagaagtctctcgaggagacctctaagctcattattgaagagacgaaaccttgcgtgcctgtttccatgaaaaaaatgtcacggacttcccccgcggatggcaaaccgcgtctgtccctgcatgaagaggaagggtcaagtgggtctgagcagaaacagggagagggcttcaaagtaaagactaagaaggaaatccgtcacgttgaaaaaaaatctcacagttag

SEQ ID NO: 179021 - DNA, 3306 bp, synthetic construct
  misc_feature 1..3306: note = Description of Artificial Sequence: Synthetic coding sequence
  source 1..3306: mol_type = other DNA
atgagcgaggagcccaaggagaagaacgccaagcccgcccaccggaagaggaagggtaagaagagcgatgctaatgcttcttacttgagagctgcccgggctggtcacctggagaaagccttggactatatatccgtggttgatacactgaagatcgtgaccgaggagactatgacaactactaccgtcacggagaagcataagatgaacgtgccagaaacaatgaacgaagtcttggatatgtctgatgacgaagtcagaaaggccaacgcccccgagatgctttcagacggggagtatattagcgatgtagaagagggcgaagatgcaatgaccggagacactgacaagtacttgggcccacaggatctaaaagaactcggtgacgactctctgcccgctgaaggatacatggggttctcactcggagctagatctgcaagtctgcgctccttttcctcagatcgctcctatacactcaaccggagctcctatgccagggattccatgatgatcgaggagctcttggtaccttctaaagagcagcatctcacttttacccgggagttcgacagtgactctctgcgacattattcctgggcagctgatacacttgataacgtaaatctggtctccagtccgattcacagcggcttcctcgtctcttttatggtggatgcccggggcggctctatgagagggagccgacaccacgggatgaggattatcattcccccccgcaagtgcacggctccgactcgaattacctgtcggttggttaaacggcataagctggcgaacccacccccaatggtggagggggagggcctggctagcagactggtggaaatgggcccggccggagctcagttcctcgggcctgtgattgttgaaatcccccactttgggtccatgcgtggaaaggagcgagaactaattgtgctgagatcggagaatggcgagacctggaaggagcaccagtttgatagcaagaacgaggacctaaccgagctgttaaacggcatggatgaagaactggattccccagaggagttgggcaagaagcgtatctgtagaattatcacaaaagatttcccccaatactttgcagtggtgtcacgcatcaaacaagagtccaaccagatcggaccagaagggggcattttgtccagcaccaccgtgcccttagtgcaggcatctttccctgagggagccctgacaaagcgaattcgcgtgggcctgcaggcccagcccgttcctgacgaaatcgtgaagaagattctggggaataaggctactttttctccaatcgtaaccgtggagccacgtcgaagaaagttccacaaacccattacgatgaccatcccggtcccccctcccagcggagagggagtgagcaatggctacaaaggagatactactcccaacctgcggttgctgtgttcaatcaccggcggaactagtccagctcagtgggaagacattacagggaccacccctttgaccttcatcaaagattgcgtgtcgttcacaacaaacgtgtctgcccggttctggctggctgattgccatcaggtgctggagaccgtcggcctagcgacccagttgtacagagaattgatttgtgttccttatatggcaaagtttgtagtgttcgcgaagatgaatgaccccgttgagtcatctctacgttgcttctgtatgacagacgataaggttgacaagaccctcgagcagcaggagaactttgaggaggtggcaagatcaaaagatattgaggtcctggaagggaagcctatctatgtcgactgctacggcaatctggcccctcttacaaaaggcggccagcagcttgtgtttaacttctacagtttcaaggaaaaccggctccccttctcgatcaagatcagggataccagtcaggagccctgtgggagactgtctttcctaaaggaaccgaaaactacaaaaggtttgccacaaaccgcggtttgcaatctgaacatcacactccccgctcataagaagatcgagaagactgatcgacggcagtcttttgccagccttgctttgcggaagagatatagctatctcaccgaaccggggatgagtccccagtctccatgcgagagaactgatattcgcatggcgatcgtggctgatcatttaggcctgagctggacagagcttgctcgggagctgaacttttcagttgacgagatcaaccagattagagtggaaaatcctaattctctgatttctcagtcattcatgttgctgaagaagtgggtaactagagacggcaagaacgctactaccgatgcactgacctccgtgttgaccaagatcaataggatcgatatagtgactctcctagagggaccaatcttcgattatggtaacattagcggaactcggtcgtttgccgacgaaaacaacgtctttcacgaccctgtggacgggtacccctcactgcaggtggaattagaaactcctacgggactacactacaccccccccacaccgtttcagcaggatgattatttctctgacatttcctcaatcgaatcgccgctgcgcacaccgtctaggctcagcgatgggttggtccccagtcaaggaaatattgaacacagcgctgacggtcctccggtcgtaaccgccgaggacgcctccctggaggacagcaaattagaggacagcgtgccactcaccgaaatgcctgaggccgtcgatgtggatgaatctcagttagaaaacgtgtgtctgtcctggcagaatgaaacatcaagcgggaacctggagagttgcgctcaagccaggagggttaccggtgggctgctggaccggttggatgatagtcccgatcagtgtagagacagcataacatcttacctgaaaggggaagctggcaaatttgaagccaacgggtcccatacagagattacaccagaagccaaaaccaagagttacttccctgaatcccagaatgatgtaggaaaacagtctaccaaggagactctgaagccaaagatccacggatctggacatgtggaagagccagcctctccgctggccgcatatcagaagtctctcgaagaaacttccaaactgatcatcgaagaaaccaagccttgcgtgcctgtctcaatgaaaaaaatgtctcgtaccagcccagcggatgggaagcctaggctatcgctccacgaggaggaaggcagctctgggtccgaacagaagggggaaggattcaaggttaaaaccaagaaggaaataagacacgtggaaaaaaaatcacactcatag

SEQ ID NO: 179022 - DNA, 3387 bp, synthetic construct
  misc_feature 1..3387: note = Description of Artificial Sequence: Synthetic coding sequence
  source 1..3387: mol_type = other DNA
atggccacccagggcgaccacctgaactgcgtgcagctgctgctgcagcataacgtcccagtggatgatgttacgaacgactatctgaccgccttgcacgtggccgcccattgcggccactataaggtcgcaaaggtcttgttggataagaaggccaaccccaacgcaaaggccctgaacggctttacaccacttcatattgcgtgcaagaaaaaccgaatcaaggtaatggagctacttctgaagcacggggcgagtatacaggccgttactgaatccggactcacgcctatacatgtcgccgcctttatggggcacgtcaatattgtgagtcaactcatgcatcacggggccagccccaacacaacgaatgtacggggggagaccgctctacatatggccgcccgctctggccaggctgaggtcgtgagatacctggtgcaagatggagctcaggtggaggctaaagccaaggacgatcagacccccctgcatattagtgcccgcctgggaaaggcagatatcgtgcagcagctcctgcagcagggcgctagccccaacgctgcgactacatcaggctatacccctctgcatctaagtgcccgcgaaggacatgaggatgtggccgcgttcctgctcgaccatggcgcttccctgtccattaccacaaaaaagggatttacacccctccacgtggcagccaagtacggcaagctcgaggtagccaatcttctgttgcaaaagtccgcttcacccgatgctgccggcaaaagcggcctcactcctctgcatgtggctgcccattacgacaatcagaaagtcgcacttttactgctcgatcagggtgcctcccctcacgcagccgcaaagaacggctatactccgctgcatattgcagccaaaaagaatcagatggatatcgctacgaccctgctggaatatggcgcagacgcaaatgccgttactcgccaggggatcgcctcagtgcatctcgccgcgcaggaagggcatgtcgacatggtgtccctcctacttgggcgcaacgcgaatgtaaatctgtccaacaaaagcgggctaacaccccttcacttagccgcccaggaagaccgagtgaacgttgcagaagtattagttaatcagggtgcccacgttgacgcacagactaagatgggctacactcccctgcatgttggctgccattatgggaatattaagatcgtgaatttcttattgcagcactctgcaaaagtcaacgctaaaacaaagaatggatatactcctttgcaccaggccgcccagcagggacatacacatattatcaatgtgttgcttcagaataacgcttcccctaatgaacttacagtcaacgggaataccgcactggggatcgcacggcgcctcggctacatctcagtcgtggatactctcaagatagttacagaagagacaatgacaactacgacagtgactgagaaacacaaaatgaatgtgccagagacaatgaacgaggttctggatatgagcgacgatgagggtgaggatgccatgactggtgatactgacaagtacctgggcccccaggatctcaaggaattgggggacgactctcttccagcggaggggtacatgggctttagcttaggcgctcgctctgccagtagtgatcgctcatatactttgaatcgatcctcatatgccagggattctatgatgattgaagagctgctagtgccaagtaaggagcagcatctgacatttaccagagagttcgacagtgattctttgcgacactacagttgggccgccgacacactggacaacgtcaatctggtgtcctccccaatacactctggatttcttgtgtcatttatggtggatgcccgaggaggctccatgcgtgggagtcgtcaccatggcatgcggatcataattcccccaaggaagtgtacagcaccaacgcgaattacctgtagattagtcaagagacacaagctcgccaacccaccaccaatggtggaaggggaggggctcgcaagcagactcgtggagatgggaccggccggcgctcagttcctcggaccggtgatcgttgaaatcccacatttcggaagcatgagggggaaggaaagagagctcattgtgttgcgcagtgagaatggggagacatggaaggagcatcaatttgattctaaaaatgaagacctgacagaacttctgaacggcatggatgaggagcttgacagccccgaagagctgggtaaaaagaggatttgtaggatcattacaaaggattttcctcaatattttgccgtggtgtcccgcattaagcaggagtccaaccagattggacctgaaggcggaatcctgagttccactacagtgccccttgtgcaggcttccttccccgagggggccctgaccaagaggattagagttgggctgcaggcgcagcctgtgcccgatgaaattgtaaaaaaaatcctgggcaacaaggccacattttctcctatcgttactgtggagccccgcagacgcaaattccacaaaccaataacaatgaccatccccgtgccaccaccctccggggaaggggtcagtaacggttacaagggtgatactaccccaaatttgcgacttctgtgctctatcaccggcggaacctccccagcccagtgggaagatatcaccggcacgactccacttacgtttatcaaggattgcgtgtcctttacgaccaacgtgtcagccaggttttggttggccgactgccaccaggtactcgagactgtgggcctagctactcagctgtaccgggagctgatctgtgtgccctatatggctaaatttgtggtattcgccaagatgaatgaccccgtggaatcctctctccggtgcttttgcatgacagacgataaggtcgacaagacactcgaacagcaggaaaatttcgaggaggtggcccggagcaaagatatcgaagtgcttgagggcaagccaatctacgtcgattgttacggaaatctggctccactgacgaaagggggtcaacaactagtgttcaacttttacagctttaaggagaaccggctacccttctccatcaaaattcgcgataccagccaggagccctgcggacggttaagcttcttgaaagagccgaagaccactaagggtctaccccaaaccgcagtctgcaatcttaatatcacactgccagctcacaaaaaaatcgagaaaaccgatagacgccagtcatttgctagtctcgccctcagaaagagatactcctacctcacagagcccggaatgtccgagtttcctaataccttcacgaatacatggatttttattcggagagatatttttagtatacaaaccaagttttag

SEQ ID NO: 179023 - DNA, 5544 bp, synthetic construct
  misc_feature 1..5544: note = Description of Artificial Sequence: Synthetic coding sequence
  source 1..5544: mol_type = other DNA
agcgacgccaacgccagctacctgcgggccgcccgggccggccacctggagaaggcgcttgactacattaaaaatggagtcgatatcaacatttgtaatcagaatggattaaatgccctacacctggcatcaaaggaggggcatgtcgaggttgtttctgagctgctgcagcgcgaggccaacgtggatgccgcaactaaaaagggtaacaccgctcttcatatagcctctctggcagggcaggccgaggtcgtcaaggtgctggtcaccaacggtgctaacgtgaacgcccagagtcagaacggattcacaccactgtatatggccgctcaggaaaaccatctcgaagtggttaagttcctcttggacaatggcgcttcacagtcactggccaccgaagacggctttacccccttagccgtggcactccagcaaggccatgatcaggtggtgagccttctgcttgaaaacgatacgaaaggcaaagtgcgactgcccgccctgcacatcgcagcacgcaaagatgataccaaggccgcggcgcttctgctccagaatgataataatgcggatgtggagtctaaatcaggattcactccactgcacatagcagcccactatgggaatattaacgtcgccacgcttctccttaacagggcagctgcagtggacttcacggcccgcaatgatattacaccgctgcatgttgcctccaagcgaggcaatgcaaatatggtgaagctacttctcgaccgcggagctaagatcgatgctaaaactcgggatggccttacaccattacactgtggtgccagatccggccatgagcaggttgtagagatgctcctcgaccgcgcggcccccattttgagcaagacgaagaacggactgtcccctctgcatatggcaacacaaggagatcatttgaattgtgtgcaactgctgctgcaacataatgttccagtcgatgatgtgactaacgattatcttacagcactccatgtcgccgcccactgtggtcactataaagttgcgaaggtgctcctcgacaagaaagccaaccctaatgctaaggccctgaatgggttcacgcccctgcacatcgcgtgcaaaaagaataggattaaagttatggaattactgctgaaacacggcgcatccatccaggccgttaccgaaagcgggctgaccccaatccatgtggctgcgttcatgggacacgtgaacatagtgtcacagttaatgcatcacggggccagtcccaacactaccaatgtgaggggggaaaccgccttgcacatggctgcaaggtcaggacaggccgaggtggtgcgctacttagttcaggatggagcccaggtggaggcgaaggctaaagatgaccaaacgccgctgcacattagtgcccgcctcggcaaggccgacattgttcagcaactccttcagcagggggcttcccctaatgcagcaaccactagtggatacactccactccacttgagtgcgcgagagggccacgaagatgtggctgctttcttactcgaccacggagctagcttgtctataaccactaaaaaagggttcaccccccttcacgtagccgccaaatacggaaagctagaggtggccaaccttctgctgcagaaaagcgcctcacctgacgccgctgggaagagcggtctaacacctctgcatgtcgccgcccactacgacaatcagaaggtggctctgttgctcctcgaccagggggccagtccacacgccgccgccaaaaatggctacacgcctcttcatatcgctgccaagaagaatcagatggacatcgccaccacattactcgaatatggagctgacgctaatgcagtcacgcgccagggcatcgcctccgtgcaccttgctgcgcaggaaggtcacgtggacatggtgagcctcctgctcggccgcaatgcaaatgttaatctcagtaacaaatctggcctgacaccgctgcacctagcggctcaggaagatagggtgaacgttgctgaagtccttgtcaatcagggtgcccatgtcgatgctcaaacgaagatggggtacaccccactgcacgtggggtgtcactatggtaatattaaaattgtgaatttcctcctgcagcatagcgccaaggtgaacgcaaagacaaaaaatggctacacccccttgcatcaggctgctcaacagggccacacccatattattaacgtgctgctgcagaataacgcctctccaaacgagctgaccgtcaacggcaataccgcgttggggatagcccgtcggcttgggtatatctctgtcgtcgatacattaaagattgtaactgaagagaccatgacaacaactaccgtgactgagaaacacaagatgaatgtgccagagactatgaatgaagtgttggacatgtccgatgacgaagtgcggaaggcgaacgcgcccgaaatgctgtcagatggagaatatatttctgatgttgaggagggaaatagatgtacctggtataagatccccaaggtgcaagaattcacggtaaaaagcgaggatgcaatgacaggagacacagacaagtacctggggcctcaggacttgaaagaactcggcgacgatagcctgccagccgagggatacatgggctttagcttaggtgcccggtcagctagtctgaggagcttctccagcgaccggtcatataccctgaaccgatcctcttacgcccgtgactcaatgatgatcgaggagctgttggttccctccaaagaacagcatcttacatttacccgggagttcgactctgactctcttaggcactattcctgggctgcggacacattggataacgtgaatttggtatccagtccaatccatagtggcttcctggtctcgtttatggtggacgcacgaggtgggtcgatgcgggggtcacgccaccatgggatgcgaattattatcccgcctagaaagtgcacagcacctacaaggattacgtgtaggctggttaagaggcataaactggcgaacccccctccaatggtggagggtgaaggtttggcctctcgcctggtggaaatggggcctgctggagcccagtttctgggacccgttatcgttgagatccctcacttcgggagtatgagaggcaaggagagagaacttatcgtgttaaggagtgagaatggcgagacctggaaagagcaccaattcgattcaaaaaacgaagacttgactgaattactgaacggcatggacgaggagttggacagtccagaggagctggggaaaaagcgtatatgccgcattatcaccaaagacttcccacaatactttgcagtggtttcccgcatcaaacaggaaagcaatcaaattgggcctgaagggggtatcttgtcttcgaccaccgtgcccctggtgcaggcatcattccctgaaggcgccctgacgaaaagaatcagggttggtctgcaagcgcagcccgttccagacgaaattgttaagaagattcttggcaataaagctacgttctctccaatcgtgacagtggagccgcgcagacgcaaattccataaaccaattacgatgacaattcctgtacccccgccaagcggggaaggcgtgagcaacggatacaagggggacaccaccccgaacctccgcctgctctgtagtatcactggggggacgtccccagcccaatgggaagatatcaccggcaccacgccactgacatttatcaaggattgcgtatcctttaccactaacgtgtccgctagattctggctcgccgattgtcaccaggtgcttgaaactgtgggtcttgccacccagttgtatagggaactgatatgtgtgccctacatggctaaatttgtggttttcgccaaaatgaatgacccggtggaaagctcacttcgctgtttttgtatgactgacgataaagtggacaagaccttagaacagcaggaaaattttgaagaggtggcccgatctaaggacattgaggtcctggaggggaaacccatatatgtggattgttatgggaacctggctcctctgaccaagggtggccagcagcttgtgttcaacttttactcattcaaggagaacagactgcccttttccattaaaattagagacactagccaggaaccctgcggaaggctgagtttcttaaaggagccaaagactacaaagggcctcccacaaacggcagtgtgtaacctgaacatcacactgcctgcacacaagaaaattgaaaagacagatcgaaggcaatccttcgcgtcgctggccttaaggaaacggtactcatacttgaccgaacctgggatgtcaccacaatccccgtgtgagcgaacagatatccggatggcaatcgttgcggatcatctgggactctcgtggaccgaacttgcaagagagctaaacttctcagtcgatgagatcaatcagatccgtgtggaaaatcccaactcgctcataagccaaagcttcatgctactcaagaagtgggtcacacgcgacggcaagaacgcaaccaccgacgccctgacctctgtgttaactaaaattaaccgaattgatatcgtgactttgctagagggccctatcttcgactacggcaacatcagtgggaccaggtctttcgccgacgagaacaatgttttccatgatccagtggacgggtacccttctttacaggtagaactggaaactccaaccggtctgcactataccccacctacacctttccaacaagacgactacttctctgacattagctctatcgaatccccattacggactcctagcagactcagcgatgggctggtcccatcccagggcaacattgaacattccgcggatgggccacccgttgtgacagccgaagacgcctccctggaagacagcaagctcgaagattccgtgcctttgaccgaaatgcctgaggcagttgacgtggacgagagccagttggagaatgtatgtcttagctggcagaatgagacttccagcggaaacctggagagttgcgcccaggcgaggagagtgactggcggactgctggatcgcctcgacgactccccggaccagtgcagggactctataacctcctatttgaagggggaggccgggaagttcgaagcaaacggctcccacactgagatcacccctgaggccaagactaaatcatactttcctgaatcacagaatgacgtagggaagcaaagcacaaaagaaaccctgaagcctaaaatccacggcagcgggcatgtggaggagccagcttctcccttagctgcctatcagaagtcactggaggagacctcgaagttgattatcgaggaaaccaagccctgcgtgcctgtgtcaatgaaaaagatgtcccgcacttctcctgctgatggcaagcctaggctttcattgcatgaggaggagggaagcagcggttccgaacagaagcagggagaaggatttaaagtgaagaccaaaaaggaaataagacacgtcgaaaaaaagtcccattcctag

SEQ ID NO: 179024 - DNA, 3354 bp, synthetic construct
  misc_feature 1..3354: note = Description of Artificial Sequence: Synthetic coding sequence
  source 1..3354: mol_type = other DNA
atggccacccagggcgaccacctgaactgcgtgcagctgctgctgcagcataacgtgcccgtagatgatgtaaccaacgactacttaaccgcacttcacgtggctgcccactgtggacattacaaggttgcaaaggtcctacttgacaaaaaagcaaatcctaacgccaaggctcttaatggctttactcccctccatatcgcttgcaagaagaaccgcattaaggtgatggagctgctgctgaaacacggggcctccattcaagcggtgaccgagagcgggctgacacccatccatgtggccgcatttatgggccacgtgaatattgtttctcagctgatgcatcatggtgcttctccgaacacaacaaacgtgcgtggagagactgcactccatatggctgcgagaagcgggcaggcagaggtggtgagatatctggtgcaagacggagcccaggtggaggccaaggctaaggatgaccagacccctctgcacatatctgctcgcctggggaaggccgatatcgtgcagcaactgctgcaacagggcgcctcgccaaacgcagctactacttctggatacactccattacacctctccgctagggaaggacacgaagacgttgcggcctttctgctggaccacggtgcgtccctttccattactactaagaaaggattcacgcctctccatgttgcggcaaagtatggcaaactggaagtggcaaacttgttgctgcagaagagtgcctctcctgatgcggctggcaagtcgggactgacccccctgcacgtcgcggcccattacgataaccaaaaagtcgccctgctacttctggaccagggtgcttccccacatgccgccgctaagaatggctacacccctctgcacatagctgctaaaaaaaatcaaatggacatcgctacaactctccttgagtacggtgccgacgccaacgccgtcacacgacaaggcatcgccagcgtgcatctcgcagcccaggaaggtcatgtagatatggtgtctctgctgttggggagaaacgcaaacgatagcgggctcactcccctccatcttgctgcgcaagaagatagggtaaacgttgcagaggtgctggtcaatcaaggcgcccatgtggacgcacagacgaagatgggatacacccctttacatgtaggatgccattatggcaacattaagatcgttaattttcttcttcagcattctgccaaagtcaacgctaaaactaaaaacggctatacccccctgcaccaagcggcacagcagggccacacccatataattaacgtactgctgcaaaataacgcgagtccgaatgagctaaccgtgaatggtaacacagcacttggcatcgctagacgattaggctacatctccgtcgtagataccttgaagatcgttaccgaagagacgatgacaactacaactgtaacagagaagcacaagatgaatgtgcctgagactatgaacgaagttttggatatgagcgacgatgaaggagaggacgctatgacaggcgacactgataagtatctcggacctcaggacctgaaggaattgggcgacgatagcctgccagccgaaggttatatggggttttctttaggagcccgatctgccagtttacgctcctttagcagcgacagatcctacacactgaataggagctcatacgcccgggactctatgatgattgaggaactgctggtgccaagtaaagaacagcacttgaccttcacacgggaatttgatagtgattccctgcgacactatagttgggctgccgacactctggataatgttaacctggttagcagtcctattcactccggctttcttgtgtcattcatggttgacgcacgcggtgggagcatgagagggtctaggcaccatggaatgcgaattatcattccaccccgaaaatgtacggcccctactcgtattacctgtcgcttggtcaagaggcacaagctggctaaccctccccctatggtcgaaggagagggcttagcctcaaggctggttgagatggggcctgccggggctcagttcctgggtcccgtcatcgtcgagatcccccacttcggcagcatgaggggtaaagagcgagagctcatagtcctgaggagcgagaatggtgagacctggaaagaacatcagttcgactccaaaaatgaggacttaaccgagcttctgaatggaatggacgaggagctggattctcctgaagaactcggaaagaaacgcatctgcagaatcattacgaaggatttccctcagtacttcgcagttgtgtcaaggattaagcaggagtctaaccagattggccccgagggtggtatcctgagtagcacgactgttccgcttgttcaagcatcctttcccgaaggtgcacttactaaacgtatccgggtaggattgcaggctcagccagtccccgatgagatcgttaaaaagatattgggtaataaggcgacgttcagtccaatagtgaccgtggaacctagaagacgcaagtttcataaacctataactatgaccattcccgttccccctccatctggagaaggtgtaagtaatggctacaagggggatactacacctaacctgcgcctgctgtgctcaatcacgggcgggacctccccggcccagtgggaagacattacaggaacgacccctttaacctttattaaggactgtgtttcctttaccaccaatgtgtctgcccgattctggttggctgactgccaccaagtcctggagactgtgggactcgccacgcagctgtaccgagagttgatttgcgtgccttacatggccaaattcgtggtattcgctaagatgaatgatccggttgagtcttctctgaggtgcttctgtatgaccgatgataaggttgataaaacactcgagcaacaggagaatttcgaggaggtagccagaagcaaagacatcgaagtcctcgagggcaagcccatctacgtcgattgttacgggaacttggcccctctcactaagggggggcagcagttagtatttaacttctactcgtttaaggagaataggctgcctttttctatcaaaatccgtgacactagtcaggagccctgtggcagactgagttttctaaaagaacccaagacaaccaaagggctccctcagaccgccgtatgcaacctgaacataacattacccgcacacaagaaaatcgaaaagactgatcgcagacagagcttcgccagcttagctttgcgcaaaaggtatagttacctgaccgaacccggtatgtcagaatttccgaacacatttactaaccttcgtgggttctcatag

SEQ ID NO: 179025 - DNA, 2436 bp, synthetic construct
  misc_feature 1..2436: note = Description of Artificial Sequence: Synthetic coding sequence
  source 1..2436: mol_type = other DNA
atggccctgccccagagcgaggacgccatgaccggcgacaccgacaagtatcttggccctcaagacctgaaggaactaggtgatgactcacttccagccgaaggatacatgggcttctcactcggcgcccggtccgcatccttgcggtcctttagttctgacagaagctatacacttaatcgcagctcatacgcacgcgactccatgatgattgaggagctgttggttccgagtaaagagcagcacctgacatttacacgggagtttgattctgacagtctgaggcactattcttgggcagccgataccctggataacgtgaatctggtctccagtcctatccacagcgggtttctggtgagcttcatggtggacgccagaggagggagtatgaggggttccaggcatcacgggatgcgcattattattcctccgagaaagtgtacagctcctacaaggatcacttgccggctcgtcaagaggcacaaactcgccaacccccctcccatggttgagggagaaggcctggcatctcggctggtggagatgggccccgccggcgcccagtttctggggcccgtgattgtcgaaattccacacttcggatcaatgcgcggtaaagaacgtgaactcattgttttacgtagtgagaacggcgagacatggaaggagcaccaattcgactcgaaaaacgaggatctgacagagctgctcaatggcatggacgaggaactcgatagccctgaggaacttggtaaaaaacggatctgtcggattataactaaggacttcccacagtattttgcggtcgttagtcgaattaagcaggaaagtaatcagatcggccctgaaggcggaattctcagctcaacgactgtgcccctggtgcaggcatccttccccgaaggtgcccttacaaagcgtattcgggttggcttgcaagcacagccagtgccagatgaaattgtgaagaagattttaggaaataaggccacattttcccccattgtcaccgttgagcctcgccgccgcaagtttcataaacctatcaccatgactatcccagtgccaccaccatccggagaaggtgtctcaaacggatacaaaggcgacactacccccaatcttagactgctgtgttccatcactggaggaacaagtcctgcccagtgggaagacatcaccgggaccacacccctcacgttcattaaggattgtgtaagttttaccaccaacgtgtccgccaggttttggctagccgattgccatcaggtgctagagacggtcggcttggcaacacaactctatagggaactgatctgcgtgccatacatggccaagttcgtggtcttcgcgaagatgaatgaccccgtggagtcttcgctgcgatgcttctgcatgacagacgacaaggtggataaaaccctggaacagcaagaaaactttgaagaggtggccaggagcaaggatatcgaggtgcttgagggcaagccgatctacgtggactgttatggtaacctggcgccacttacaaagggagggcagcagttggtctttaatttctactcttttaaggaaaacagactgcccttctccatcaagatcagagatacatctcaggagccgtgtggcagactgagttttttgaaagaacccaagactaccaagggactcccacagaccgccgtgtgcaacttaaatatcactctccccgcccataagaagatcgagaagactgatagacgacagagtttcgcatcattagctctgaggaagaggtacagctatctcacagagcctggcatgagtcctcaatctccgtgtgaacgaaccgacatccgcatggctattgtggccgatcatttgggcctgtcttggacagagctggccagagagttaaatttttccgtggacgagatcaaccaaattcgagttgagaaccctaattcccttatctcccaatctttcatgctcctaaagaagtgggttaccagggatgggaagaatgctacaacggacgctctgactagtgtgcttacaaaaatcaataggatcgacatcgtcactctgctcgaggggcccatctttgactacggcaatattagcgggactaggtctttcgccgatgaaaacaacgtgtttcatgatcccgttgatggctacccatccctccaggtcgagcttgagacccccaccggtctccactatactccccccacacctttccagcaagacgactatttttcagacatcagcagcatcgagtcacctctgaggacaccctcaaggttaagtgatgggttggtcccgtcgcagggtaatatagaacatagtgcggacggccctcccgtcgtgactgctgaagatgcctccctggaggatagtaagcttgaggacagtgtaccactgaccgagatgcccgaagcggtgatgtag

SEQ ID NO: 179026 - DNA, 2796 bp, synthetic construct
  misc_feature 1..2796: note = Description of Artificial Sequence: Synthetic coding sequence
  source 1..2796: mol_type = other DNA
ttcaccctggcccacgtgccccagcggggcgagaccgccctgcacatggccgcaagaagcgggcaggccgaggtagtcagatatttagtccaggatggggcgcaggttgaggccaaggccaaagatgaccaaacacctcttcatatcagtgcaagactgggaaaagctgatattgtacagcagctgctgcagcaaggtgcgtcacctaatgccgccacaacgtccgggtacactccactgcatttgagtgcaagagagggccacgaagatgtcgcagcctttttactggaccacggtgcaagcctgagtattaccaccaagaaagggttcactccacttcacgtggctgccaaatacggaaagctggaggtggccaacctgctgttgcaaaagtctgcaagcccagatgccgccggaaagtccggcctgactcccctacatgtggccgctcattacgacaaccagaaggtggcccttttactcctggatcagggtgcatcccctcacgctgccgccaagaatgggtacacgcccctacacatagctgccaagaagaaccagatggacattgccacgacacttctggagtacggggcggacgcgaatgcagtgaccaggcaaggcatcgcatccgtccaccttgcagcccaggagggacatgtcgacatggtatctctgctgcttgggaggaatgccaacgtgaacctcagcaataagtccggcctcaccccattacatctggccgctcaagaggatcgcgtcaatgtcgctgaagtcctggtgaatcaaggtgcccacgtggacgcccagactaagatgggctataccccactgcatgtggggtgccactacggcaatataaagatagtgaactttctattacagcattcagcaaaagtaaacgccaaaacaaaaaacggttatacgcccttgcatcaagccgcccagcagggacatacacacataatcaacgtgctgctgcagaataacgcatctccgaatgaactgaccgtgaacggaaatactgccttgggaatcgcccggaggctaggctacatttcagtcgtcgacactcttaaaattgttaccgaagagacaatgaccaccaccaccgtgaccgagaagcacaaaatgaatgtgcccgaaaccatgaacgaggtgctcgacatgagcgatgatgaaggcgaggacgccatgacgggcgacactgacaaatatctcgggccacaagatcttaaagagcttggagacgactcactacctgctgagggttatatgggatttagcttgggcgcgcgttcagccagccgctccttttcctcagatcgctcctacacattgaacagatcatcttacgcgcgagatagtatgatgatcgaggagttgctggtgccatcaaaagaacaacacctgacctttacaagggagttcgattctgacagcctgcggcactactcttgggcagcagataccctagataacgtgaacctggttagttctcccatccattctggttatagcagcccactgccacagtatgattcaaggtttcttgtaagtttcatggttgatgcaagaggaggatctatgcgggggtcgcgtcatcatgggatgcgcatcataatcccaccgagaaagtgtaccgctcccaccaggatcacttgccgcctggtaaagaggcataagctggcaaacccccctcccatggtggagggcgaagggttggcttcccggctggtggaaatgggccctgcgggggcacaattcttaggtcctgtgatagttgaaatcccgcacttcggatccatgaggggaaaggagagggaattgattgtgctgcggagcgagaacggtgagacctggaaagagcatcaatttgactcaaagaatgaagatctcaccgagctgttgaacgggatggatgaagaactggatagtcctgaggagctgggcaagaagcggatttgccgcattatcacgaaagactttccacaatacttcgctgtggtctcaagaattaagcaggaatctaaccagatagggcctgaggggggcattctgagttccaccaccgtacccctggtccaggctagttttccggaaggcgccctaacaaagaggatcagagtcgggttgcaggcacaaccagttcctgacgagatagtcaaaaagatactgggaaacaaggccacgttcagccctatcgtgaccgtcgaaccccgccggaggaaatttcacaaacccatcacgatgaccatccctgtcccaccccctagtggagagggggtgagcaacggttacaagggtgacactacccctaaccttagactattgtgttctattaccggtggcacctcacccgcacagtgggaggatatcacaggaacgacacccttaacttttatcaaagactgcgtcagctttactaccaatgtatccgcacgcttctggctcgccgactgccatcaggtgctggaaaccgttggactagctactcagctttatcgcgaactcatttgcgtcccatatatggctaagttcgtggtttttgccaagatgaatgatcctgtcgaaagcagccttcgttgcttctgtatgaccgatgataaggttgacaaaacgctagaacagcaggagaatttcgaggaggttgcccgttccaaagacatagaggtaccatgcagtcagaaacaggtgcacttcattacatatagtagatacgaggttttattctgtggtctcaacagcacacactacaagattccctctgccctgcttatattgctgctattgtag

SEQ ID NO: 179027 - DNA, 1647 bp, synthetic construct
  misc_feature 1..1647: note = Description of Artificial Sequence: Synthetic coding sequence
  source 1..1647: mol_type = other DNA
agcctgcccgagagcgaggacgccatgaccggcgacaccgacaagtatttgggccctcaggatttgaaggagctgggggacgatagtctccctgctgagggctacatggggtttagcctgggggctaggtctgccagccttagatccttctcttcagatagaagctacacattgaacaggagctcttacgcacgagatagcatgatgatcgaggagttgctcgtcccctccaaagagcagcacctgacctttacccgggagtttgattctgatagtcttcgccattacagttgggctgcggacaccctggacaatgtcaatctggtgagctctcctattcacagcggttttctggtctcttttatggtggacgctagaggagggtccatgcgcggatcacgccaccatgggatgcgcattatcatccctccgagaaaatgcacagcacccacccgcatcacctgtcgactggttaaaagacacaagctggccaaccctccgccaatggtggaaggagaaggactggcatctcgcttagtggagatgggccccgccggagctcagtttcttggccctgtgattgtggagattcctcatttcgggagcatgagggggaaggagagagagcttatagtccttcggagcgagaacggcgaaacttggaaggagcaccagttcgacagtaagaatgaggacctgaccgagttgcttaatggcatggacgaggagctcgattcccccgaggagctcgggaaaaagagaatctgtcggatcatcacgaaagatttcccacagtacttcgctgtggtatctcgcatcaaacaggagtcaaaccagatcggtccagagggcggaattctgtccagcacgaccgtccccctggtgcaggcgtccttccctgaaggagccctgactaagcgtatcagggtcgggcttcaagcgcagcccgttcccgacgaaatcgttaaaaagatccttggtaacaaagctaccttcagccccatcgtaacggttgagcccaggagacggaaattccataaacccataacaatgacaattcctgtaccgcctccaagcggtgagggagtgtctaatggatataaaggggacacaacacccaatctgagactgctgtgttccattacgggaggtacttctcccgctcagtgggaagatataacagggaccactcccctaactttcattaaggactgtgtgtcctttacaaccaatgtgtccgcacgattttggctggcggactgtcaccaagtcctcgaaactgtcggcctggcaacccagctctacagagaactgatctgtgttccttatatggcaaagttcgtcgtatttgcaaaaatgaacgacccagtggagagctctttgcgatgtttttgtatgaccgatgataaagtggataagactctcgaacaacaagagaactttgaggaggttgcacgctctaaagatatagaggttctcgaggggaagcctatttatgtcgattgctacgggaatttagcccccctgactaaagggggccagcagttggtcttcaatttctatagtttcaaggagaacagacttcctttcagcattaagatccgtgacaccagtcagaatatcgtccaactgagctgcttactttag

SEQ ID NO: 179028 - DNA, 1443 bp, synthetic construct
  misc_feature 1..1443: note = Description of Artificial Sequence: Synthetic coding sequence
  source 1..1443: mol_type = other DNA
atggccgtggcccgggccgccctgggccccctggtgaccggcctgtacgacgtacaggcctttaagtttggagattttgtgctgaagtccggcttgtcttctcccatctacattgatctgcggggcatcgtctctaggcctcggttgctctcccaggtggctgatatactgtttcagactgcccaaaacgcaggcatcagttttgacacagtgtgcggcgtaccttacacggcactcccacttgcaactgtcatatgtagcacaaaccagatccccatgctcatccgcaggaaagaaactaaagactacggcaccaagagattggtggagggaacaattaacccaggggagacttgtctcattatcgaagacgttgtcacctctggtagttccgtgctcgaaacagtagaagtactacagaaggagggcttgaaggtgactgatgccattgttctgctagatcgcgaacagggaggaaaggataaactccaggctcacgggatcagactacattcagtgtgcaccctcagcaagatgcttgagatactggagcagcagaaaaaggtggatgctgagacagttggacgagtcaagcggttcattcaagagaacgtctttgtcgccgcgaatcataatgggagccccctgagcatcaaagaggcccctaaagagctttcatttggagccagagctgagcttcccaggatccatcctgtggcaagtaagctgttgcggttaatgcagaagaaggaaactaacctctgcctgtccgccgacgtgagccttgcgcgcgaactcttacagcttgccgatgccctgggcccctcaatctgcatgctcaagacacacgtggatattctcaatgattttacactggatgtcatgaaggaactcatcacacttgctaagtgccatgaatttctaatcttcgaggatcgaaagttcgccgatatagggaatacagtcaagaagcagtacgagggagggatatttaagattgcctcctgggctgatctcgtgaacgctcacgtggtgccaggctctggggtggtcaaaggactgcaagaggtaggtctcccgctgcaccggggttgtctgctaatcgcagagatgtcgtccacaggctccctggccacgggagactatacccgagccgcagtacgaatggcagaggagcactccgaatttgtggtaggctttatcagtggaagccgcgtttctatgaaacctgagttcctccacctgacccccggggtccaactggaagctggtggtgacaacctggggcaacagtataacagtccacaggaggttattggtaagagaggaagcgacattatcattgtggggcgggggataatatctgctgctgatcgtctggaagcagcggagatgtaccgtaaagccgcttgggaggcctacctctcaagactcggcgtttag

SEQ ID NO: 179029 - DNA, 1218 bp, synthetic construct
  misc_feature 1..1218: note = Description of Artificial Sequence: Synthetic coding sequence
  source 1..1218: mol_type = other DNA
atggacaccagcgacctgttcgccagctgccggaagggcgacgtgggcagggttaggtacctcctcgagcaggtcctgtaccttctagctaatggtgcgcggtgtgaagcaaacacgtttgatggcgaacggtgtttgtacggggctcttagcgacccaatacggagagccctgcgcgattacaagcaccctttattatgggacctgctgtcagatcttgaggccaagtgcgagaaagtgtctgagtttgttgcttctaagcccggcacctgtgtgaaggttcttactatcgagccacctccagctgacccacgcctgcgggaagatatggccctgctagccgactgcgctctcccccccgagctacgcgcttttttctgcggtagaagtgactactttcgcgcactgcttgacgatcacttccgtgaatccgaggaaccagcaaccagtggaggcccccccgccgtaactctgcatggtatatcaccagatgtattcacccacgtcctatattacatgtactctgatcatacggagcttagccctgaagcagcatatgatgtactatctgttgcagacatgtacttactacccgggttaaagcgcttgtgcggccgatctctggctcagatgcttgacgaggacacagtggttggcgtatggagggtcgcaaagctctttcgactggcgagattggaggatcagtgtaccgagtatatggcaaaggtgatcgagaaattggtggaaagggaggattttgtggaggcggtcaaagaggaagctgcggctgtcgccgctcggcaggagacggattcaatcccactggtcgacgacattcgctttcacgtggcaagtacagtgcaaacatactccgcaatagaagaggcacaacagcggctgcgagccctcgaggatacatcaatgtgtatgaggctttgcgccgcgctcctcccagccccctgcaccctgcgggcaagctggggcgttcggggggctcagtggggattcagtagccttcacgaacccggcgacccccgaggtggatccatttgggacgagccacccccaccgaatgcgcaggcgagcccacaggatcctggcggaggacaccacagcggtaagccaggtgtgggtgtgggatttggtttgagtacattcctgctgcagattccacccactcacccatctcccaaatcttcaccactcgcactcgcttag

SEQ ID NO: 179030 - DNA, 1011 bp, synthetic construct
  misc_feature 1..1011: note = Description of Artificial Sequence: Synthetic coding sequence
  source 1..1011: mol_type = other DNA
atgctggacaccaagtggaagggcaagagcgtggtggtgctgcggcacccacttataaatccagttgcgttcggcgctctgctccagtatttgtacacggggaggttagacatcggggtcgagcacgtaagcgattgcgaacggcttgcgaaacaatgtcagctgtgggacttgctgtctgaccttgaggccaagtgcgagaaggtatctgagttcgtcgcctcgaagccaggcacttgcgtgaaggtcctgacaattgagccaccccccgccgatcccaggctcagagaagacatggctcttctcgcagactgtgccctgccccccgagctgagaggggacttgtgggagttgcccttcccttgccctgatggcttcaactcttgcccagacatttgcttccgagtggcgggctgctcttttctgtgccacaaggccttcttttgtggaaggtccgattattttcgcgcactccttgatgatcattttagggaaagtgaggaaccagccaccagtggagggccccctgcggtaactctgcacgggatcagccctgatgtgttcacccatgtactgtattacatgtatagcgatcatactgagctgagccctgaggcggcttacgacgtgttaagcgtggcggacatgtacctgctgcctgggttaaaaagactctgtggtagatcccttgcgcagatgctcgatgaagatacagtagtaggcgtttggcgtgtggctaagttgttcaggttagccaggttagaagatcaatgtactgagtatatggcgaaggttatcgaaaagctggtggaaagggaagacttcgtcgaggccgtcaaggaggaggcggccgcggttgcagcccgccaggaaactgactccatcccactggtcgacgacatccggtttcacgtagccagtactgtacagacatattctgcaatcgaggaggcccaacaacgtctgcgcgccctggaggaccttttggtttccatcgggctggactgctag

SEQ ID NO: 179031 - DNA, 1011 bp, synthetic construct
  misc_feature 1..1011: note = Description of Artificial Sequence: Synthetic coding sequence
  source 1..1011: mol_type = other DNA
atgctggacaccaagtggaagggcaagagcgtggtggtgctgcggcaccccctaattaaccctgttgccttcggcgctttgctccagtatctctacactggacgcctcgatattggagttgaacatgtcagcgactgtgaacgcctcgcaaagcaatgtcaactgtgggatctactatcagacttggaggctaaatgtgagaaggtgagtgaattcgtggcctccaaaccaggaacttgtgtcaaggtgctgaccatcgagccgcctcccgccgatccacgccttagagaggatatggctcttctggccgattgcgctctccctcccgaactgagaggggacctgtgggagctgccgtttccgtgccctgatggattcaatagttgtccggatatttgcttccgtgttgccggctgctcttttctgtgccataaggcttttttttgcggcagaagcgactacttccgggctttgctggatgaccacttcagggaatcagaggaacctgcaacttccggcggccctcccgccgtgactttgcatggcatctccccggacgtgttcacacatgtcctgtattacatgtattctgaccacactgaactctcccccgaagccgcttacgacgtgcttagcgtggccgatatgtaccttctaccaggtctcaagcggctgtgcggcaggtccctggcccagatgctagacgaggacaccgttgtcggagtctggcgcgttgcaaagctgttcaggctggcgcgtcttgaagaccaatgcaccgagtatatggctaaagttattgaaaaactagttgaaagagaagatttcgtggaggcggtgaaagaggaggctgccgctgtggccgcaagacaggagaccgactccattccattggtcgacgacattcggtttcatgtggcatctacagtgcagacctactctgcaatcgaagaggcacaacagcgccttcgggccctggaggatctgctggtcagtatcgggctcgattgttag

SEQ ID NO: 179032 - DNA, 1011 bp, synthetic construct
  misc_feature 1..1011: note = Description of Artificial Sequence: Synthetic coding sequence
  source 1..1011: mol_type = other DNA
atgctggacaccaagtggaagggcaagagcgtggtggtgctgcggcacccgcttattaacccagtcgcctttggggcgctgctgcagtacctgtacactggccgactcgacatcggtgtcgagcatgtgagtgattgcgagagattggccaagcagtgccagctctgggatctgctgtccgacctggaagcaaaatgcgagaaggtgagcgaatttgttgcttccaaacctgggacatgcgtgaaagtattgaccatagagccaccacctgctgatccaagattacgtgaggacatggctctgctggccgactgtgccttgcctcccgaacttagaggcgatttatgggaactcccctttccctgccctgacgggttcaatagttgcccagacatttgctttcgcgtggccggctgttctttcctgtgtcataaagccttcttttgcggcaggtctgattatttcagggccctgctcgatgatcattttagggaaagcgaagaaccagccaccagtggaggcccgccggccgtaaccctgcacggaatcagcccagacgtcttcacccacgttctctactatatgtacagcgatcatacggaattatcccctgaggctgcgtatgatgtactgtcagtggcagacatgtatttattgccgggcctaaagcggttgtgtggacggtccttggcgcagatgttagatgaggatacagtagtaggcgtttggagagtggctaagctattcaggctcgcaaggttagaagatcagtgtactgaatatatggcaaaagtaatcgaaaagctcgttgagagggaggactttgttgaggctgtgaaggaagaggccgctgcagtggctgcccgccaagagaccgattcgattccccttgttgacgatattaggtttcacgtggcgtctactgtccagacatatagtgcaatcgaagaggcccagcagaggctccgcgcacttgaggatctcctggtgtccatcgggcttgattgttag

SEQ ID NO: 179033 - DNA, 2061 bp, synthetic construct
  misc_feature 1..2061: note = Description of Artificial Sequence: Synthetic coding sequence
  source 1..2061: mol_type = other DNA
atggaggccagccaggagggccacctggagctggtgaagtacctgcttgccagcggagcaaacgtccacgccaccacggcaacaggcgacactgccctgacctacgcttgcgagaacggccacacggacgtggcagatgtcctgctacaggcgggcgctgacttggataagcaggaagatatgaaaacaattttagaaggcatcgaccctgcaaagcaccaggaacatgaatcggagggcgggcggacgcctttaatgaaagctgccagggctggacacctttgcactgtgcagttcctgatctctaaaggagccaatgtgaaccgagctaccgccaataacgaccacactgttgtttctttggcttgtgccggaggacaccttgcggtggtggagctgctgctcgcccatggcgccgaccccacccaccgactcaaagacggctcaaccatgttaatcgaggctgcaaaaggaggtcacacgaacgtcgtgagctatttactggactatcctaataatgtcctgtccgtcccaactacggatgtgtcacagcttcctcccccttctcaagatcagtctcaggaaccagatcgcacctctcaggagaacagccctgcactcttgggtgtgcaaaaggcagtgagcactagagtccccacagggagtaacagttcaagccagacgacggaatgccttaccccagagtcatgttcacagaccacatctaatgtggcaagtcaaagtatgccgcctgtctatccaagcgtcgatatcgacgcccacacggaatcgaatcatgacactgccctgaccctcgcgtgcgctggggggcacgaggagttagtctctgttcttattgcacgcgatgccaagattgagcacagggacaagaaagggtttacgccactgatactggcagcaacggccggacacgttggtgtggtggaaatattactggataaaggcggtgacatcgaagctcaaagtgagcggactaaagacacaccccttagcctggcatgctcggggggcaggcaggaagtagtggatctcctgctagcgcgaggcgccaacaaagagcacagaaacgtgagtgactatacccctttgtccttggcagcctctggcggatatgtgaacattatcaagattctgctgaacgcaggggccgagataaacagccgcacaggtagcaagttgggaatcagtccactcatgctggcggccatgaatggacacgtgccagctgttaaactcttattggacatggggtcagatataaacgcccagattgagacaaataggaacacagccctgaccctagcctgctttcagggcagggccgaggtcgtttcgctcctactggaccggaaggcaaacgttgaacatagggccaaaacgggcctgacgcctttaatggaagccgcttccggcggatatgccgaggtgggtcgtgtcctcttggacaaaggggcggatgtaaacgctccgcctgtaccaagcagtcgcgatacagcactgactattgctgctgacaagggtcactacaagttctgtgaactgcttatccaccgcggagcccacattgatgtgagaaacaagaagggaaacactcccctgtggttagccagtaacggcggacatttcgacgtggtacagctgctcgtccaggctggggcagatgtggatgcagcggataaccgcaagatcactcccttgatgtcagcattccgtaagggacatgtcaaggtggtgcagtatttagtaaaagaagtgaaccaatttccctctgatatagagtgcatgcgttacattgccacaattacagataaggaactcctaaagaagtgtcatcagtgcgttgagaccatcgtgaaggcgaaggatcaacaggccgcggaagccaacaaaaatgctagtatactcctgaaggaacttgacctggaaaagtctagagaggaatctagaaagcaggcattggcagccaagagagaaaagcggaaagagaagcggaagaaaaaaaaggaggagcagaagcggaagcaagaagaggatgaatag

SEQ ID NO: 179034 - DNA, 7623 bp, synthetic construct
  misc_feature 1..7623: note = Description of Artificial Sequence: Synthetic coding sequence
  source 1..7623: mol_type = other DNA
atgctgaccgacagcggcggcggcggcaccagcttcgaggaggacctcgactccgtcgccccaagaagcgccccagcaggagcttccgagcctcctcctcccggaggagtgggcctcggtatacgtacggtgcggcttttcggcgaagctggcccagcaagcggggttgggagctcaggcggcggtggatccggatccggcacgggaggcggggatgccgccctcgactttaaactcgctgccgctgtcctgcggacaggtgggggcggaggggcttctggctcagacgaggacgaggtgagtgaagtggagagttttattctcgatcaagaggacctcgataacccagtacttaagacaacctcagaaatcttcctgtcatccactgctgagggcgcagacctgcggacagtggatccagagacacaggcacggcttgaggcacttctcgaggctgcagggatcgggaaactctcaactgctgatggaaaggccttcgctgatccagaagtgctgcgccgcctgacgagctccgtaagttgcgcattagacgaggcggctgcagccctcacgcgcatgaaagccgaaaacagccataacgcgggccaagtcgacacgagaagtctggccgaagcttgctctgacggcgacgtcaacgccgtccgaaagctgctcgacgaaggacgttctgtcaacgagcacaccgaggaaggagaaagcctgctgtgcctggcctgtagcgcaggatactacgaactcgcacaagttttgctggccatgcacgccaacgtggaagacagaggcaataaaggcgacataacacctctgatggccgcgtcgagcggaggctacctagacatcgtgaagctacttctgttacacgacgccgacgtaaacagccagtctgccaccggcaataccgcactgacttatgcctgcgctggcggatttgtcgacattgtcaaggtgttgctcaacgagggtgctaacattgaggatcacaacgagaacggccacacccccctgatggaagcggcctcggccggtcacgtggaggtggcaagagtcctcttagatcacggcgcaggcattaatacccacagtaacgaattcaaggagtcagctctgaccctggcttgttacaaggggcatctggatatggtgaggttcttgttggaagccggagctgatcaagagcacaagacggatgagatgcacaccgccctgatggaggcttgcatggacggacacgtggaagtcgctaggcttcttctagatagtggagctcaggttaatatgccagccgattcttttgagtcaccattgactctggcggcttgcggcggtcatgtggagctggccgcattgctcattgagcgaggagccaatctcgaggaggtcaacgacgaaggatatacccctctaatggaagccgccagagaagggcatgaggagatggtggcattgctgcttgcccaaggagcgaacataaacgcacagaccgaagagacacaagaaaccgccctgacactggcctgctgcggaggcttcagtgaggttgctgacttcctcatcaaagccggagctgatattgaacttggttgctccacccccctgatggaagcaagccaggaaggccatctagaacttgtgaagtatctactcgcctcgggggccaacgttcacgccactacagcaacaggggacacagccttgacgtacgcgtgcgagaacggccatacggacgtggctgacgtcctgctgcaggctggtgcagacctggaacatgaatcagagggaggtagaacgccactgatgaaggcagcccgggccgggcatctttgtacagtgcagttcttaatttccaagggtgctaacgtgaacagagcaaccgccaataatgaccacacagtggtttccttagcatgtgctgggggccatcttgcagtggtcgaactgctgctggcacacggggccgatcccactcataggctgaaggatggatccaccatgttaattgaagctgcaaaaggtggccacacaaatgtggtgtcgtacctgctagactatccgaataacgtcctctccgtccccaccaccgatgtttcacagctgccgccaccctcccaagaccaaagccaagtccctcgagtgcccacgcatacactcgcaatggtggtgcctccgcaggagccggatagaacgagtcaggagaattctccagcactgctgggcgtgcagaagggtacatcgaaacaaaagagctccagtctgcaggtggcagatcaggatcttctgccatcctttcatccctatcagcctctagaatgtatcgtcgaggaaactgagggcaagcttaatgaattgggccagagaatctccgcaattgaaaaagcccagttgaaatctctggagttgattcaaggggagcctctcaacaaggataagatcgaggagctgaaaaagaaccgggaagaacaggtccagaaaaagaagaaaatccttaaggaactgcagaaagttgagcgccaactgcagatgaagacacagcagcagtttactaaagagtatcttgaaactaaggggcaaaaggatactgtctcattacatcagcaatgctcacaccgcggtgttttcccggaaggcgaaggcgatggttccctgccagaagaccactttagcgagttgccacaggtcgacacaattctgtttaaggacaacgacgtcgacgatgaacaacagtccccacccagtgccgagcagatcgactttgtccccgtccaacccctatcttcccctcaatgcaacttcagcagcgatctgggctctaacggtacaaattcactcgaactgcaaaaggtgtctggcaatcaacaaatcgttgggcagcctcaaattgccatcacaggacatgaccagggcctgctagtgcaagagcctgacggactgatggtggccacaccggcccagaccttgaccgacaccctagatgaccttatcgctgctgtgagcaccagggtccccaccgggagtaattcatcaagccaaaccaccgagtgtcttacccccgagtcctgttcccaaactacctccaacgtggcctcacagagcatgcctccagtatacccctctgtagacatcgacgcacataccgagtcgaaccatgacactgctcttacattggcctgcgctggcggccatgaggagttggtcagcgttctgatagcacgagatgctaaaatcgaacatagggacaagaaaggattcactccactcatcctggccgccacagccggtcatgtcggggtggtggagattttactggacaagggaggcgacatcgaggcccaaagcgagcgtactaaggatactccattgtcactcgcttgtagcggaggtcgccaggaggtggtggacctgcttctggctcgcggggctaataaggagcataggaacgtaagcgattatacacctctgtccctcgctgcttccggcgggtacgtgaatattataaagattcttcttaatgcaggtgccgagatcaacagcagaacgggtagtaagcttggcatctctcccctgatgctcgctgccatgaatggacatgtgcccgccgttaagctcctgctggacatggggtcagatatcaacgcacagatcgagacgaatcggaacaccgcattaacccttgcctgttttcagggccgagcagaggttgtctcccttctcttggaccgcaaggccaacgtggaacaccgtgctaagaccggtcttacccccctcatggaagccgcgagcggaggctatgcagaggtggggcgggtgctactggataaaggggctgacgtaaacgctccacctgtcccttcctcacgcgacacagccctgaccatcgcagctgataaaggtcattacaaattctgcgagctgctcattcaccgcggggcacatattgatgtgagaaataaaaaaggaaacacccccctatggctggcgagtaatggcgggcattttgatgtggtgcagctcctcgtgcaggcaggagcagacgtggacgccgctgataaccggaaaattactccactcatgtctgcattccggaagggtcacgtcaaggtcgtgcaatatttggtaaaagaggtgaaccagtttcccagcgatatcgaatgtatgaggtatatcgccactatcacagataaggagctcttgaaaaagtgccatcagtgtgttgaaactatcgtgaaggccaaggatcagcaggcagctgaagccaataagaatgcaagcatcctgttgaaggagctcgacctggagaagtcaagggaggaatcaaggaagcaggctctggccgccaagagggaaaaacgcaaggaaaagaggaaaaagaagaaagaagagcagaagagaaaacaggaggaagatgaggagaataaacccaaggagaactccgagctgcccgaggatgaagatgaagaggagaatgacgaggacgtggagcaggaggtgcccattgagcctccctcggccaccacgaccactacaatcgggatttcagccacctcagcaactttcacgaacgtctttggcaaaaagcgtgccaatgtggtaacaacacccagtactaaccggaagaataaaaagaacaaaactaaggaaactcctcctaccgcccacttaatcctacctgagcaacatatgtcactggcacagcagaaagcggataaaaacaaaatcaatggcgagcccaggggtggcggcgctggtgggaactccgattcagataacctggacagtacagattgtaatagcgagtcatcatccggggggaagagtcaggagttgaacttcgtaatggacgtaaattcatctaaatatccgagcttactgttgcattcgcaagaagaaaagaccagcaccgctacatcaaaaacgcagacccgcctcgagggtgaagtgactccgaacagtctgagcacaagctacaaaactgtcagcctgcctttgtcatcacccaatattaaactgaacctgacctcccccaagaggggacagaagagagaagagggttggaaagaggtggtccgccgatcaaaaaagctgagtgtaccagctagtgtggtcagcagaattatgggacggggggggtgtaacattacagctattcaggacgttaccggtgcgcacatagacgtcgacaagcaaaaagataagaatggtgaaaggatgattaccatccgtggaggtacggagagtacacgctatgccgtccagctgatcaatgcattaatccaagacccagccaaggagcttgaggatctcatcccaaagaaccacattcgcaccccagcatcaaccaagagcatacacgccaacttcagcagcggagttgggacgactgcagcgagtagcaagaacgcatttcctcttggagcgccaacactggtgacatcacaagcgacaacactttcgaccttccaaccagccaataaactgaacaagaatgttcccactaacgtcagaagtagcttccctgtgtccctgccgctggcgtatccccacccacacttcgcccttctggccgcacaaaccatgcagcagatcagacacccacggctccctatggcccagttcgggggaacgttcagtcctagtccaaacacatgggggccctttcctgtacggcccgtgaaccccgggaacacaaattccagtccaaagcataataataccagccggctcccaaatcagaatggaactgtgttgcccagtgagtctgccggtctggctacggcctcttgtcctatcactgtgtcctcagtcgtagccgcctctcagcagttgtgtgtaaccaacacacggaccccaagctccgtgagaaaacaacttttcgcctgcgtgcctaaaacatccccccctgcgaccgttatttcctctgttacctctacctgctcctccctgccgagcgtgtccagtgcgcccatcactagcggacaggctccaactacgttcctgcccgcttccacctcacaggcccagttgagctcacagaagatggaatcttttagcgctgttccacctaccaaggagaaggtatctactcaagatcagccaatggccaacctgtgtacaccctcttccaccgccaacagttgttcctctagtgcttccaacactcccggtgctccggagacccaccccagcagctctccaacacccacatcaagcaacacccaagaagaagctcagccttcaagcgtgtctgatctgtcgccaatgtctatgccatttgcctcgaacagcgagccggccccacttacacttacctctccacgcatggtggccgcagataatcaagacacgtcaaacctaccccaactcgccgtgcctgcccctagagtgagccacagaatgcagcctagggggagcttttactccatggtcccaaacgcaactatccatcaggaccctcagtccatcttcgtaacaaacccggtgaccctgacaccaccccaaggcccacccgccgctgtgcagcttagtagcgctgtcaatattatgaacgggagtcaaatgcatatcaatcccgctaacaaaagcctcccccccaccttcggacccgcaaccctgtttaatcattttagttcgctcttcgacagcagtcaggtccccgctaaccagggatggggtgacggccctctgagctctcgcgttgcaacagacgccagcttcacagtgcaatcagcgtttctcggcaacagcgtgctcggacatctggaaaacatgcaccccgacaactcaaaggcccccggatttagaccccctagccagagagtgtccacgagccccgtggggctgcctagcatcgacccttctgggtcctcgcctagcagcagctcagcaccactggcctccttttctggaatccctgggacccgggtctttctgcaggggcctgctcccgttggcaccccaagcttcaatcggcagcactttagcccacacccttggactagtgcttccaattcttgtgattcaccaatcccttccgtaagctctgggtcctcctctccactgtctgcaacctcagctcccccaactctgggccagccaaaaggtgtgtcagctagccaagaccgaaaaatccctcccccaatcggaacggagagactcgcaaggatccgccaggggggaagcgtcgcccaggctcccgcagggacaagctttgtggccccagtgggccactctggtatttggtcgtttggggtcaatgccgtctccgagggactgtctggatggtctcagagcgtgatgggaaatcaccctatgcatcagcagcttagcgatccatccacattcagccagcaccaaccaatggaaagggacgacagtggtatggtggcaccatcaaatatcttccaccaaccgatggcgagcggcttcgttgacttctctaagggattacctatttcaatgtatggggggaccattataccatcccacccccaactcgcagacgttcccggcggtcctctgtttaacggactgcataaccccgaccccgcttggaaccctatgattaaagtgattcagaatagtactgaatgcacagatgcgcaacagtag

SEQ ID NO: 179035 - DNA, 7854 bp, synthetic construct
  misc_feature 1..7854: note = Description of Artificial Sequence: Synthetic coding sequence
  source 1..7854: mol_type = other DNA
atgctgaccgacagcggcggcggcggcaccagcttcgaggaggacttggactcagtggccccaagatctgcgccggcaggtgcgtctgagccacccccacccggaggggttggactcggaatcaggaccgtgcggttatttggtgaggccggccctgcttccggcgtggggtcatcaggcgggggcggttccgggagcggaacgggtgggggtgacgccgctctggacttcaaattggcggcagctgtactccggaccggcggcgggggaggtgcatccggatctgacgaggacgaggtcagcgaggtcgaaagttttattctggaccaggaagatctggacaaccccgtgcttaagactacgagtgaaatcttcctgtccagcactgcagagggagctgatctccgcaccgtggatccggagacgcaggctcgactcgaggccttgcttgaggctgccgggatcggtaagctgagcacagctgacgggaaagcattcgcagatcctgaggtgctcaggcggctgacctcaagtgtttcttgcgccctggacgaggccgcagccgccctcacccgaatgaaggccgagaattcccataatgccgggcaggtcgacactcgatctctggccgaggcgtgtagcgacggcgatgtgaatgccgttaggaagctactcgatgaggggcggtcggtgaatgagcacacagaagaaggggagagcttgctctgcctcgcctgctcagccggatattatgagttagctcaggtgttgctcgctatgcacgctaatgtcgaggacaggggaaataaaggagatattacaccgctgatggctgcatcaagcggcggatatttggatatcgtgaaactgctcctgctgcatgacgccgacgtcaatagccagagcgccacaggcaacactgcattgacttacgcttgtgcaggaggatttgtggacatcgttaaagtgcttttgaatgagggggcaaacattgaagaccacaacgagaatggtcataccccactcatggaggctgccagcgctggccatgtcgaggtcgcccgcgtgctcttggatcacggggcgggtatcaacacccactctaacgagttcaaggaaagcgcgctaaccctggcctgctataaaggacacttagatatggtacgcttcctcctggaagccggcgccgatcaggagcacaagaccgacgagatgcatacagccttaatggaggcctgcatggatggtcacgttgaagtggccaggctgttattagattccggggctcaggtgaacatgccggccgactccttcgagtctcccctgacactcgcagcttgcggcggtcacgttgaactggcagctctgctcatcgagcggggggcaaatctggaagaggtgaatgacgagggctacacgcccttgatggaggccgctagggaaggacacgaggaaatggtggctctgctgctcgcacagggagccaacattaatgctcagacagaggagactcaggaaacagcccttacgcttgcttgctgcggaggcttctccgaggtagcggactttctcatcaaagccggagccgatatcgaattaggctgttctacacctctgatggaggcctctcaagaggggcacctggaactggtcaagtacctactggccagtggcgccaacgtccacgctacaaccgccacgggggacaccgctctcacatatgcctgcgaaaatggacacaccgacgtagccgatgtgctcctgcaggctggagcggacctggaacatgagagcgaggggggcagaacacccctcatgaaagccgccagggccggccatctgtgcacggttcaattcctcatatcaaaaggtgccaatgtgaaccgcgcgacagcaaacaacgatcacaccgtggtgtccctcgcttgcgccgggggccacctggctgtggtcgagctgttgcttgcacacggcgctgatcccacccacagacttaaagatggcagcactatgctcatcgaggcagccaaaggaggccatactaacgtggtgagctacttgctggactatccgaacaacgttctgagtgtgcctacaaccgacgtttcacagctgcctccacctagtcaggaccagagccaggtgccccgcgtgccgactcataccttggcaatggttgtgccaccacaggagccagaccggacaagccaggaaaactcccccgccctactgggcgtgcagaaaggcacctctaaacagaagtcctcctctttgcaggttgccgatcaggatctgctaccctcatttcatccctatcagcctctggaatgcatcgtggaggagacggagggcaagctcaacgagctgggacaacgaatctccgccatcgaaaaggcacagctgaagagtctggaactcatccagggagaaccgttaaataaagataaaatagaagagttaaaaaaaaaccgtgaggagcaggtgcaaaagaaaaaaaagattctcaaggagttgcagaaggttgaaagacagctgcagatgaagactcagcaacagttcactaaagagtacttggaaacaaaagggcagaaggatacagtatctctgcaccaacaatgctcccaccggggggtctttcccgaaggggaaggcgacggctccctgcctgaggaccactttagcgagctgccacaggttgacacgatcttatttaaagacaatgacgtggacgatgaacagcagtccccaccctcagccgagcagattgatttcgtcccagttcagccgctttcctccccacagtgcaatttctcatctgatctcggatcaaacggaactaactcactggagctgcagaaagttagcggcaaccagcaaattgtcgggcagccacaaatcgccattactggtcacgaccaggggctcctggtacaggagccggacgggctcatggttgccactccagcacagacacttacagacaccctggacgacttaatcgctgcggtctccactcgcgtacctaccggctcgaatagcagttcgcagaccacagaatgtctcactcctgaaagctgtagccaaacgaccagcaacgtggcttctcagtcgatgcctcctgtgtatccttcagtggacattgacgctcatacggaatcaaatcacgacactgcgctgacacttgcctgcgctggtggccatgaggagctggtgagtgtcctaatcgcaagggatgccaaaattgagcatagggataaaaaagggttcacccccctcatattagctgctacggccggccatgtgggggtcgtggaaatactgcttgataaaggcggggacatcgaggctcagagtgagcgcactaaagatacacctttgagccttgcgtgttcaggtggccggcaagaagtcgtcgatctcctgcttgccaggggggccaacaaagaacaccgcaatgtctcagactatacacctctctccctggcggcttctgggggctacgtaaacatcatcaaaatcctccttaatgccggcgcagagattaactctcgcactggtagtaaattaggcatttcgcctctcatgttggctgccatgaacggacacgtccccgccgtgaaacttttgctggacatgggatcagatataaatgcccagattgaaaccaaccgcaatacagctttgaccctcgcttgcttccagggtagagctgaggtggtctccctgctcctggataggaaagccaacgtggagcacagggccaagactgggctgactcccctgatggaggccgccagcggcggttatgccgaggtaggacgggtgctactggacaagggtgctgatgtaaatgcaccgcctgtgccgagttcacgggataccgccttgacaatcgccgccgataagggccactacaaattttgtgaattactgatccaccggggcgctcacatagatgtcagaaacaaaaagggcaatactcccctttggttagctagcaatgggggccacttcgatgtggtgcagttgctcgtgcaggccggggctgatgtagatgccgccgataatcggaagattacgcctttgatgtctgcgttcaggaagggacacgtgaaggtggtacaatacctagtaaaagaggtgaatcagtttcccagtgatattgagtgcatgagatatatcgcgacgatcactgacaaggagctgctgaagaaatgtcaccagtgcgttgagaccattgttaaggctaaggaccagcaagccgccgaggccaataagaacgcatccatcctgttgaaggaattggaccttgaaaaaagtcgggaagaaagccggaaacaggccctggcggccaaaagagagaagagaaaagagaagagaaagaagaaaaaagaggaacagaagagaaagcaggaggaagacgaggaaaacaagcccaaggagaattctgagctgccggaggatgaagatgaggaagagaacgacgaggacgtggagcaggaggtgccaatcgagcctccctccgccactaccaccaccactatcggtataagtgcaaccagtgccacattcaccaacgtcttcggcaaaaaacgggccaatgttgtgactaccccctctaccaacaggaaaaataagaaaaacaagacaaaagagacaccgcccacagcacatcttatcctgccagagcagcatatgagcctggctcagcagaaggcagataagaataaaattaacggagagccccggggtggtggcgcgggtggcaattcagacagtgacaaccttgactctactgattgcaattccgaatcatcttctggaggaaaatcccaggagctgaatttcgtgatggacgtgaacagcagtaagtatcccagcctgctgctccactcacaggaagagaaaacatccaccgccacctccaagactcagactagattggaaggcgaagtcacccctaacagtctctccacctcctacaaaaccgtgtcactccctctgtcaagtcccaatattaaattgaatcttacatccccaaagaggggccaaaagcgggaagagggatggaaagaggtcgtgaggagaagcaagaagttgtccgtcccagccagcgtggtcagcaggatcatggggcggggtggttgtaacatcacagcgattcaggacgtcactggggcccacattgacgtggacaagcagaaagacaagaacggagaaagaatgatcactattcgaggaggtactgaaagcactcggtacgcggtgcagcttataaacgccttgatccaggacccagcaaaggagctggaagacctgatccccaagaaccacatcaggacccccgcttcgacaaaatctattcacgccaacttttcctccggggttggaaccaccgccgcaagcagtaagaatgcattccctctcggggccccaacactagtcacgagtcaggcaaccaccctgagcacattccagcctgccaacaagctgaacaagaatgtgcctactaacgtccgctcttccttcccagtgtcccttccattggcctatccacacccccacttcgctctcctggctgcacaaaccatgcaacagatcaggcatcctcggctgccgatggcgcagttcggcggaaccttctccccaagccctaatacttgggggcccttccctgtgagaccagtcaatccaggtaatacgaattcgtcccccaagcacaataatacctctcggttgccaaaccagaatggaactgttttaccctccgaaagtgctgggttagcgaccgcctcatgcccaatcacggtctctagcgtagttgctgctagccagcagctgtgtgttaccaatacaaggacaccctccagcgtgcgtaaacaactgttcgcttgcgttcctaagacctccccaccggcaactgtgattagctccgtgacctctacatgttctagcctgccgtcggttagcagcgcccccatcacttcagggcaggcaccaaccacttttctgcccgcctctacttcacaggcgcagctgtcctctcagaagatggagtccttctctgccgttcctcccacaaaagagaaagtctccacacaagaccagcccatggccaacctctgcactccctcttccactgccaactcgtgctcctcaagcgccagcaatacgccgggcgcccctgagacacatcccagcagttcacctacaccaacaagcagcaacactcaggaagaagcccagccaagttcagttagcgatttgtcgcccatgtccatgccgtttgcgtccaattccgagcccgcaccgcttacactcaccagtcctcggatggttgctgctgataatcaagatacgtcaaacctgccacaacttgccgtcccagctcccagagtatctcatcggatgcagccacgcggatccttctactcaatggtcccgaatgctacaatccatcaagacccccagtcaattttcgtgacaaatcccgtgacactgacacctccgcaggggcctcccgcggccgtacagctctcaagtgccgtaaacatcatgaatggtagccaaatgcacattaatcctgccaataaaagtctgccacccaccttcggtccagctactctgttcaatcatttttcaagcctctttgacagctctcaggtcccggctaaccagggctggggagacgggccactctcctctagggtcgctaccgacgccagctttactgtgcagagtgccttcctcggcaactctgtcctaggacacctagagaatatgcatccagacaactctaaggcccccggttttcgcccgccctcgcaaagagtatccacctcgccagtgggattaccgagcatcgaccctagtgggtcatcccctagtagttcttctgcacctcttgcatcattctccgggattcccggtacccgggtattcctgcagggccccgcccccgtcgggactccctccttcaacaggcaacacttcagtcctcatccatggacctctgcaagcaattcctcgacttctgcccctccaactttgggccagcccaaaggtgtgtctgcttcacaggaccgaaagatccctcctcccattggaactgaacgactggccagaatcagacagggcggctcagtcgcccaggcaccggccggcacgtccttcgtagctccggtcggccactcggggatctggagcttcggggtcaacgccgtctccgagggcctgtccggctggagccagtccgtgatgggcaaccaccccatgcaccagcagctatcagatccaagcaccttttctcagcaccagcccatggaacgcgatgacagcggtatggttgcaccatctaatatcttccatcagcctatggcctctggattcgtagacttcagcaaaggtttgcccatttctatgtatggcggaactattattccatcacacccccaactggcagacgtgccggggggaccactgttcaatggtctgcataaccctgatcccgcctggaatcccatgataaaggtgatacaaaactccacagaatgtacggatgcccagcaagcatccctcctcccctcagtccctgctctgaagggagagatcccctcgccccaactgacgaggcccaaaaagaggattggccggcccatggttgcgtcaccaaaccagagacaccaagaccatttgcgccccaaggtgcctgctggagtgcaggagctgacccattgccctgacacgcccctgctgcccccaagcgattcccggggacataatagcagcaacagcccttcattacaggccggcggggccgagggggcgggcgatcgtgggcgcgatacgcgctag

SEQ ID NO: 179036 - DNA, 3024 bp, synthetic construct
  misc_feature 1..3024: note = Description of Artificial Sequence: Synthetic coding sequence
  source 1..3024: mol_type = other DNA
atggtggccctgctgctggcccagggcgccaacatcaacgcccagactgaagagacccaggaaaccgccctcacattagcatgttgcgggggcttcagcgaggtcgccgacttcctgatcaaggctggagcagatatagaactcggatgcagcacaccactgatggaggcctctcaggaaggccacctagaactggtcaagtatctgctggcctcaggagccaacgtgcacgcgaccaccgcaactggcgataccgcgctcacttatgcctgtgagaatggccataccgatgtggctgacgttctgttacaggccggcgcggatctggacaagcaggaagatatgaaaacgatacttgagggaatcgatcctgccaaacaccaggagcacgaatccgaagggggccggacacctctgatgaaagccgctcgcgcaggccatctctgcaccgtgcagttcttgatatctaaaggagcaaatgttaaccgtgccaccgccaataatgaccacaccgttgtgagcctcgcgtgtgctggcggacacctggccgtggtggagctcctgctagcccacggggccgatcctactcacaggctcaaggatgggagcacgatgcttatcgaggcagccaaaggtggccacaccaatgtggtctcgtatctactcgactacccgaataacgtactgtccgtaccaactactgatgtctcgcaattgcctcccccgtcgcaggaccagagccaagttccccgcgttcctacccacacacttgctatggttgtgccgccccaggagccggatcggacatcacaggagaactcacctgcgttgcttggtgtgcagaagggaacaagcaaacagaagagctcctccctgcaggtggccgaccaagatctcctcccctcatttcatccttatcagcccttggagtgtattgtggaggagaccgaggggaaactaaatgagcttggtcagaggatcagcgctatcgagaaggcccagctgaagtcattggaactcattcagggcgagccacttaacaaggacaaaattgaggagctgaagaagaatagagaggaacaggtgcagaagaagaaaaagatcctcaaggagctccagaaagtcgagcgccagctccagatgaagacccaacaacaatttactaaggaatacttggaaaccaaaggtcaaaaggatacggtgagcttacaccagcagtgctctcatcggggagtttttccagagggcgaaggcgacggctcgttacccgaagatcatttcagcgaattaccgcaggtggacactattttgttcaaggacaatgatgtggacgatgaacagcagagcccaccaagcgctgaacagatcgatttcgtcccagtgcagcccctgtctagtccacagtgtaatttctcaagtgacctcggtagtaatggaaccaactcactcgagcttcagaaggtatcgggcaaccagcagattgttggccagcctcagattgcgatcacaggacatgaccagggcctactcgtccaggaacccgacggcctaatggtcgccacccccgctcagacactcacagacaccctggatgacctcatcgctgcagtgtcaactagggtacccaccggtagcaattcgtcaagtcaaacaaccgagtgtcttaccccggagtcatgttcacagacgacaagcaatgtcgcttctcagagcatgccgcctgtctatcccagcgtcgacattgacgcccacaccgagtcaaatcacgatactgccctgacattggcctgcgctggtggacacgaagaactcgttagtgtgctgatcgctcgggatgccaagattgaacaccgcgacaaaaaagggttcaccccgcttattctggctgccaccgccggtcatgtcggtgtcgttgagatcctgttggataagggaggcgacatcgaagcacagtctgaaagaacgaaggacacaccactgagcctcgcgtgctccggagggagacaagaagttgtcgacctcctcctggcaagaggggcaaataaggagcatcggaacgtgtccgactacacgccactttctctggcggctagtggcggttatgtgaacatcataaagatattactgaatgctggcgctgagatcaacagcagaaccggctccaaactcggaatttcccctctcatgctcgctgcaatgaacggtcacgtgccagcagttaaactccttttagacatggggtcagacatcaacgcccagatcgagactaaccgcaacacggcactgacccttgcctgtttccaggggagggctgaggtggtgtcgctattgcttgatagaaaggcgaatgtagaacatagggctaagacggggctcactccattgatggaagccgcctccggaggttatgctgaagtcggcagggtgcttcttgacaaaggtgctgatgtgaacgccccccctgtgccttcgagtagggatactgctctaacaatcgcagctgacaaaggccactacaagttctgtgaactcttaatccaccggggcgctcacatagacgtgcggaacaagaaaggcaacactccgctgtggctcgcttcaaatggcggccatttcgacgtcgtgcagctgctcgtccaagccggggcagacgtggatgccgccgacaaccgcaagatcactccactgatgagtgctttcagaaaagggcacgtcaaggtagtgcaatatctggtcaaggaggttaaccaatttcccagtgacattgaatgtatgaggtacatcgccaccataaccgacaaggagttattgaagaagtgccaccaatgcgtggagaccatcgtgaaagcaaaggaccagcaggccgcagaagcaaataagaatgcaagcattttactcaaagagctagaccttgagaagtccagagaagagtccaggaagcaggccttggccgctaagagagaaaaacgaaaggagaagagaaaggagaaacgcggtactgagaaggaaactgggcgccgatag

SEQ ID NO: 179037 - DNA, 7629 bp, synthetic construct
  misc_feature 1..7629: note = Description of Artificial Sequence: Synthetic coding sequence
  source 1..7629: mol_type = other DNA
atgctgaccgacagcggcggcggcggcaccagcttcgaggaggaccttgactccgtggcccctaggtccgcccctgccggcgcgtccgagcccccacccccgggtggcgtcgggcttggcataaggaccgtgaggctctttggcgaggccggacctgcttctggtgtgggcagctccggcgggggaggttcaggatcgggaaccggcgggggagacgcagcactggacttcaaactcgccgccgccgtcctacgtaccggaggaggtggcggggccagcgggtccgacgaggatgaggtgtccgaggttgaatcattcattctggatcaagaggacctggataatcctgtgctcaaaactaccagcgagatatttctgtcctccacagcggagggtgccgatctgcgcacagtcgaccccgagactcaggcccgcctcgaagctctccttgaagccgccgggataggaaaactttctactgcagatggtaaagctttcgcagacccagaggtgctgcgccgtctgactagcagtgtgtcttgtgccctggatgaggccgccgctgccctgacaagaatgaaggccgagaactcccataatgctgggcaggtggatacacgaagcctagccgaggcttgttctgacggtgatgtcaatgccgttaggaaacttcttgacgaagggcgctctgtcaatgaacatacagaggagggcgaatctctcttgtgtctcgcctgctccgccggatactacgaacttgctcaggtgctgctagctatgcatgccaacgtggaggaccgcggaaacaagggcgacatcacccccctcatggccgcctctagcggcggatatttagatatcgtgaagctgctcctgctacacgacgccgatgtcaatagtcagtcagcaacaggtaacacagcattgacctacgcttgcgctggcggtttcgtggacatcgtaaaggtcctcctcaacgagggcgctaatatcgaggaccataatgagaatggccatacacccctgatggaagctgcaagtgcgggacatgttgaggtggcccgggtgcttcttgaccacggggccggcatcaatacacacagcaatgaattcaaagagtctgctctcacgctcgcgtgctataagggccacctggacatggtgcgatttctgcttgaggccggagcagatcaggagcataagacagatgaaatgcacacagccctgatggaggcctgtatggacgggcatgttgaggtcgcaagactgttgttggatagcggggctcaggtaaacatgcccgctgactcttttgagtcccccttgaccctagccgcttgtggtggtcacgttgaactcgctgccttgctcatcgagcggggcgctaacctggaagaagtgaatgacgaagggtacacacctctgatggaggcggctagggagggccacgaagaaatggtggctttgctgctggcgcaaggcgccaatataaacgcccagacggaagaaacgcaggagacagcattaacactggcatgttgtgggggtttttcagaggtggccgattttttgatcaaggccggcgctgatatcgagctcggatgttccacgcctctcatggaagcctctcaagagggacatctcgaactggtgaagtacctactggcctcaggagccaatgtacatgccactactgccacaggggatactgctctgacttacgcttgtgaaaacggacacaccgacgtcgcagatgtgctcctccaggccggggcagatctcgagcatgagtccgaggggggccgcacaccactcatgaaagctgcaagagccggacatctctgtaccgtccagtttcttatatctaaaggagcgaacgtcaaccgagccactgccaataatgatcacaccgtggtatccctcgcctgtgcaggtggccacctcgcagtggtcgagttgttattagcacatggcgctgaccctacgcatcggttaaaagatggcagcaccatgttgattgaagccgctaagggcggtcacacaaatgttgtctcctacttgctggattatccaaataacgtgctgtctgtgccaaccacagacgtgtcccagctgccaccccctagtcaggatcagtcccaagttcctcgggttcctacccatactctggccatggtggtgcctcctcaggaacctgaccgcacgagtcaagaaaactctcccgctctgctgggcgtccaaaaagggacgtccaagcagaagagctcttcccttcaagtggcggaccaggatctgctgccatcctttcacccatatcagcccttagaatgcatcgttgaggagaccgaaggcaaactgaacgagctgggtcagaggatatctgcaatcgagaaagcccagttaaaatccttggagctgattcagggcgaacctctgaacaaggataaaatcgaagaactgaaaaaaaacagggaagagcaggtgcagaagaagaaaaaaatcctcaaagagctccagaaagtggagcgtcagttgcagatgaaaactcaacagcaattcacaaaggagtacctggagacaaaaggccagaaagacaccgttagtctccatcagcagtgctcacataggggcgtgttcccagagggcgaaggcgacgggtctttgcctgaagaccacttttccgaactgcctcaggtcgatacaatactcttcaaggacaatgacgtggatgatgagcagcagtctccgccctctgctgagcagattgactttgtgcccgtccagccgctgtccagcccccagtgcaatttctcgtccgacctggggtccaacggaaccaatagtctcgaattgcagaaagtgagcggaaatcagcaaatcgtgggccagccacagatcgccatcacgggccacgatcaaggcctgctcgtgcaggagcctgacggcctcatggtggctacaccagcccagaccctcaccgatacactcgacgatctgattgccgcggttagcaccagagtgccgaccggctctaatagtagctctcagactacggagtgcctgacacctgagagctgctctcaaactacgtcaaatgtcgcctcccagtcaatgcctcccgtgtacccatcagtagacattgacgctcacacagagtcaaatcacgataccgccctcacactcgcttgtgccggaggacacgaagagctcgtttccgtcctgatagctcgagacgccaagatcgaacatcgcgacaagaaaggattcaccccgcttatcctggccgccacagcaggccacgtgggagtcgtggaaatccttttggataaggggggggatatcgaggcccagagtgaaaggactaaggacacccccctgagcttggcatgctcaggcgggcgtcaagaggttgtggacctgcttctggcccgcggggccaacaaggagcatcgcaatgtgtctgattatacgccactctcactagctgcaagtggcggctacgtgaatatcataaagattcttctgaacgccggagccgagatcaatagtcggacagggtctaagttagggatcagccccctcatgcttgcagccatgaacggacacgtaccagcggtcaaacttttgctcgacatggggtctgatattaacgcccagatcgaaaccaatcgcaacaccgcactgactctggcctgcttccagggacgcgctgaggtcgtatccctcctgttagataggaaggcaaacgtggaacacagagccaagactggactgacaccattgatggaggctgcgagtggcggatacgcagaggtggggcgggtcctgcttgacaagggagcggacgtgaacgcaccaccagttccgtccagccgcgacacggccctgacaatcgcagctgacaagggccactacaaattttgcgagctgcttattcatcgtggcgctcacatcgacgtgcgcaacaaaaagggaaacacaccattgtggttggctagcaatggagggcactttgacgtagttcagctgctggttcaagccggggcagatgtggatgcagctgataaccgcaaaatcacaccactgatgtcagcttttcgaaagggacacgtgaaggtggtccagtacctagtcaaggaggttaaccaattcccctccgacatcgagtgtatgagatacatcgccaccataactgataaagaactcctgaaaaaatgtcatcagtgcgtggagaccatcgttaaggccaaagatcagcaagctgctgaggccaacaagaacgcaagtattctgctcaaagagctggacctggagaagtctcgtgaggagagtcggaagcaggccttggccgctaagagagagaaacgcaaagaaaagcggaagaaaaaaaaggaagaacaaaaacgcaagcaggaagaggatgaagagaataagcctaaagagaacagcgaattgcctgaggatgaggatgaagaggaaaacgacgaggatgtggagcaagaggttccgatagaaccacccagcgccactactacaaccactatagggattagcgcaacaagcgccacttttactaatgtgtttggcaagaaaagggccaatgtggtcaccacgcctagtactaataggaaaaacaaaaagaataaaaccaaagaaactccccctaccgctcaccttattctgccggaacagcacatgagtctagcacagcagaaggcagacaagaataaaattaatggagagcccagaggagggggcgctggggggaatagtgacagcgataacctcgatagtaccgattgcaacagcgaatctagcagtggaggcaagtcacaagagctgaacttcgtaatggacgtcaactcctccaaatacccatccctgctgctgcattcccaggaggaaaagactagtacggcaactagtaaaacccagaccagactggagggggaggtgacccctaacagtttgtcaacctcctacaaaacagtcagccttcccctctctagtcccaacatcaaactgaacttgacgtccccaaaacgcgggcagaagagggaagagggctggaaggaagtcgtgcgtcggtccaagaaactttccgtgccagcctcagtcgttagccggattatgggacgggggggatgcaatattactgctattcaggatgttaccggcgcacacatcgacgtggacaagcagaaggataagaatggggagagaatgatcacaatccgtgggggcaccgaaagcacccggtacgccgtccagttgatcaatgccctgattcaggaccctgcaaaggagctggaagatctgattccaaaaaaccacatccgcacccccgcatcgactaagagtatacacgcaaacttctcttcaggcgtcggaacaacggctgccagttccaaaaacgccttcccccttggcgccccaactctggtgacatcccaggcaacaacccttagtaccttccagcctgccaataaactaaacaaaaatgttcccactaacgtccgatcctccttccctgtgtcactcccgctggcatacccccacccccacttcgcacttctggcagcgcaaactatgcagcagataaggcaccctaggctgcctatggcgcagttcggaggtacgttcagtccatctccaaatacctgggggccattccctgtgcgaccagtcaatcctggcaacaccaattctagccctaagcataataataccagcagattgcctaaccaaaacgggactgtcctgccctcagagtcggcaggcctcgccacagcatcgtgtccgattaccgtctcttctgtggttgccgcctcccagcagctctgcgttaccaatacaagaactccttcttccgtgaggaaacagctattcgcatgcgttcccaagacatcaccacctgccacggtcatcagctccgtgacctccacttgcagttccctgccatctgtctcatcggcgcccattacatctggccaggcaccaaccacctttcttcctgcgagcacttcacaggcccagctaagttctcagaaaatggaatcattcagcgctgtgcctcctacaaaggagaaggtgtccactcaggaccaacctatggctaacctttgtactccatcttccacagcaaattcttgctctagttcagcctcgaataccccaggagcacccgaaactcatccaagttcatcccctacacctacatccagcaacactcaggaagaggctcagccttccagtgtgagcgatctttctccgatgagcatgcccttcgcttccaatagcgagccagccccactcacccttacctcaccgcggatggtggccgccgataatcaagacacctctaacctgccccagctggccgttcccgctccaagagtgtcccaccgtatgcagccgcgcggcagtttctacagcatggtacctaatgccactatccaccaggacccacagagtattttcgtcactaatcctgtgaccctgactcctccgcaaggaccacctgcagccgtccagctatcctccgccgtgaacataatgaacgggagtcagatgcatatcaatcccgcaaacaagagtttgccgcctacattcggtcccgccactcttttcaatcacttttcaagcctattcgactctagtcaagtccctgctaatcagggctggggggacggccccctgtcatcccgggtagccacagacgccagtttcaccgttcagagcgcctttctaggaaacagcgtccttgggcacctcgaaaatatgcaccccgacaatagtaaggcgccagggttcaggcccccgtcccagagggtgtctacgagccctgtcggcctgccgagcatcgacccatcaggttctagtccttcaagtagctcagccccgctcgcctcatttagcggaattccaggtacaagagtgttcctgcaggggcctgcccccgtcgggacaccaagcttcaataggcagcatttttctccacatccgtggacttcagcctctaattccagcaccagcgctccaccaaccctgggccagcccaaaggcgtgagcgctagccaggacagaaaaatccccccacctattggaaccgagcgattggcacggatccgacagggaggatctgtcgcccaggcacctgccgggaccagtttcgtggctccggtgggacattctggaatttggtccttcggggtgaacgcagtgagtgagggattatccgggtggtctcagtctgtcatggggaaccatcctatgcatcagcagctgtcagaccctagcacattctctcagcatcagcccatggaacgagacgacagtggaatggtggcgccctctaacatattccatcaaccgatggctagcggttttgtcgatttttctaagggacttccaatcagtatgtatggggggacaattatcccatcccaccctcagctggccgacgtgcccggcggccccctgttcaacggactacacaatcccgaccccgcttggaacccaatgatcaaggttatccagaactctactgagtgtaccgatgcgcagcaaatctggcccgggacgtgggccccacacattggtaatatgcacctcaagtatgtcaattag

SEQ ID NO: 179038 - DNA, 1851 bp, synthetic construct
  misc_feature 1..1851: note = Description of Artificial Sequence: Synthetic coding sequence
  source 1..1851: mol_type = other DNA
atgctgaccgacagcggcggcggcggcaccagcttcgaggaggacctcgattccgtcgccccccgatccgccccggccggtgcttcagagcccccacctcccggaggagttggcctgggcataaggaccgttaggctgtttggtgaggctggccctgccagcggagttggcagtagcgggggtggaggtagcggctccgggaccgggggtggggatgcagccctggacttcaagctcgctgcggcagtgctgcggacaggtggaggagggggcgcttcagggtctgacgaggacgaggtgtctgaggttgaaagtttcatcctcgaccaggaagatctcgacaatcccgtgctgaagaccacatccgaaatctttttgtctagtacggccgagggggccgacctgaggacagtggaccccgagactcaggctcgtctagaggcgcttttagaggcagcagcattcgccgaccctgaggtccttagacgcctgacttcctccgtctcgtgtgcactcgatgaggctgctgctgccctaacccgcatgaaggctgaaaattcacacaatgcaggccaggtcgatacccgctccttggccgaagcctgctcagatggagacgttaacgccgtgcgaaagctcctcgatgaagggcggagcgtaaacgaacataccgaagagggagagtccctgctgtgcctggcctgtagcgcagggtattacgaactggcacaggtgttgctcgctatgcatgcaaatgtggaagacagggggaataaaggcgacattactcccttgatggctgcttcctccggaggctatctggatatcgtcaagctgttactgctacacgatgccgatgtgaattctcagtccgccaccgggaatacggcgttgacatatgcatgtgccggagggttcgtggatatagtgaaggtgttgctcaacgaaggcgcaaatattgaagaccacaatgaaaatggacatactcccctgatggaggcagctagcgcagggcatgtggaagtcgcgcgcgtattactagaccacggggcagggatcaacacacattccaatgaattcaaggaaagcgctctgacgctggcctgttacaaggggcacctcgatatggttcgatttcttttggaggccggggcggaccaggagcataagaccgacgaaatgcacaccgccttaatggaagcttgtatggatgggcatgtcgaagtcgcacgtctcctgttagattcaggtgcccaagtgaacatgcctgccgattccttcgagtcccctctcacactggccgcttgcggaggacacgtcgagttggcagcactattaatcgagagaggggcaaatcttgaggaggtgaacgacgagggctacacccccttgatggaggccgccagagagggacacgaggaaatggtcgcccttctgctcgctcaaggtgccaatataaacgcccagacggaggagacccaggaaactgccttaaccctagcctgttgtggcggtttctctgaggttgcagattttctaatcaaagctggtgccgacatcgagctagggtgtagtacgcctttaatggaagcctcccaagaggggcacctcgagctggtcaaatacctgttggcctctggagcaaatgtccacgctactacagccactggggataccgctcttacatacgcctgcgagaacggccataccgatgtggccgacgtgctactccaggccggtgcggacctcgacaaacaagaagacatgaaaactatcttggagggaatcgatcccgctaagcaccaagttagggttgctttcgatgcttgtaagctgttgcgaaaagagtag

SEQ ID NO: 179039 - DNA, 1884 bp, synthetic construct
  misc_feature 1..1884: note = Description of Artificial Sequence: Synthetic coding sequence
  source 1..1884: mol_type = other DNA
atgctgaccgacagcggcggcggcggcaccagcttcgaggaggacctggattcagtcgctcctagatctgcaccagcaggtgctagtgagcccccaccaccgggaggcgtgggcctgggtatcaggaccgtgcgtctgttcggtgaggctggtcccgcctccggcgtcggttcctctggggggggaggttctggaagtggcaccggaggaggcgatgctgccctggatttcaagttggcagccgcggtacttcgaaccggtggggggggaggagcctccggatctgacgaagatgaggtgagcgaagtggaatcgttcatactggaccaggaggacctggacaatcctgttctgaaaaccacatcagagatcttcctgtctagcaccgccgagggcgccgacctcaggactgtggaccccgagacccaggcgagactcgaggcccttctggaagcagcaggaattggaaaactgagcacagccgatggaaaggcttttgccgacccggaggtcctgagacggctgaccagctccgtgtcctgcgcgctggacgaggccgctgcagccctgacaaggatgaaggccgaaaattctcacaacgctggacaggtggacaccagatctctggccgaagcatgcagtgatggcgacgtaaatgctgtgcggaagctcctggacgaggggaggagtgtcaacgagcacacagaagagggcgagtccctcctgtgccttgcctgttccgccgggtattatgaattagcgcaggtgctgttggcaatgcacgcaaacgtggaagaccggggtaacaagggcgatatcacaccccttatggcggcttcgtccgggggttacctcgacatcgtcaaactgcttctgctgcacgatgcggacgtaaacagccaatcagctactgggaacacagcgctcacgtatgcttgtgcgggcggctttgttgatattgtcaaggtcctgctcaacgagggagcgaatatcgaggaccataacgaaaacgggcacactccactcatggaggcagcgtccgctggtcatgttgaagtggcaagggtgctactagaccatggggcgggtatcaatacgcatagcaatgagtttaaagagtcagcgctgacgctggcgtgctacaaaggtcatctggatatggtccggttcctgcttgaagcaggggcagaccaggagcataagacagacgagatgcacactgccctgatggaggcatgcatggacggacacgtggaggtggctcgactcctgttggacagcggcgcccaagttaatatgccggctgattctttcgaatcccccctgactctggccgcctgtgggggacacgtggaactggctgctctgttgattgagcggggcgctaatttagaagaagtgaatgacgaaggctatacccccctgatggaggccgcccgggaaggccacgaagaaatggtggccctcctgttggctcagggagcaaatataaatgcccagacggaggaaacacaagaaactgcactaaccctggcctgttgtggcggctttagtgaagtcgcagactttctgattaaagctggggctgatatcgaactggggtgcagcacccctttgatggaagcctcgcaagaggggcacttggagctggttaagtatttgctcgcctctggcgcaaacgtccacgctaccacggccacaggcgatacagccttaacgtacgcatgcgagaatggccacacagacgtggcagacgttcttctgcaggccggggcagacctggacaaacaggaggacatgaaaacgatcctggagggaattgatccagccaaacatcaggttagagtggcattcgacgcctgtaagctgcttaggaaagaatag

SEQ ID NO: 179040 - DNA, 4461 bp, synthetic construct
  misc_feature 1..4461: note = Description of Artificial Sequence: Synthetic coding sequence
  source 1..4461: mol_type = other DNA
ccccgggtgggccggcaccggctgcggctgcgggtgcggaccatgttgacagacagcggagggggcggcaccagcttcgaagaggatttggactcagttgctccccgatccgccccagctggggccagtgagccccctccccccggtggggtaggcttaggcatcagaaccgtgcgcttgtttggcgaggctggtcccgcctccggtgtcggcagctccggaggtggaggaagcggctcggggaccgggggaggagatgcagctctcgactttaagctcgctgctgctgttctccgcactgggggcggggggggggcctccggtagtgacgaagacgaggtctcagaagttgaatcatttatcttggatcaggaagacctcgacaatccagtcctgaaaactacttccgagatcttcctaagctctaccgccgagggcgcagatttacggaccgttgaccccgaaacacaggcacgattagaggcacttctcgaggccgctgggatcggcaagctttccacagccgatgggaaagccttcgccgaccccgaggttctcagacggctgacctccagtgtgagttgcgctctggatgaagccgctgccgcactgactcggatgaaggccgaaaatagtcacaacgccggccaagtcgatactcggtcactggcagaggcctgcagtgacggcgacgtgaatgctgtcagaaagctgctcgacgaggggaggagcgtgaacgagcacactgaggaaggggaatcactgttgtgcctggcttgcagcgcaggatattacgagctggcacaagtcctgctggctatgcatgcaaacgtcgaagaccgtggaaataaaggagacatcacgcctttgatggccgctagcagtggtggctaccttgacatagtgaagttgttacttctccatgatgctgatgtgaactctcaaagtgctacgggaaatacggcgctcacatatgcttgtgctggaggatttgtcgacattgtgaaagtcctcctcaacgagggcgctaatattgaagaccacaacgagaacgggcacacgcctctcatggaggctgcctccgcaggccatgtggaagtggctcgcgtgttattggaccacggtgccgggatcaacacccattctaacgagtttaaggagagcgctctcacgctggcatgttataaggggcacttagatatggtacgattcctgttggaagccggggcagatcaggaacacaagaccgatgagatgcacaccgcactgatggaggcatgtatggatggacacgtcgaggttgctagattgctcctggactcgggggcacaagtaaacatgcccgcagattcatttgaatcgccgcttactctggctgcttgcggcggacatgtcgaactggccgccctccttatcgaaagaggggctaatttggaggaagtgaatgacgaagggtatacccctctgatggaggctgctagagagggtcatgaggaaatggtggctctgctgctcgcgcaaggggcgaacataaatgctcagactgaagagacccaagagactgctttgaccctggcttgttgtggcggcttcagcgaagtggcagatttccttatcaaggccggagccgatatcgagcttggctgctccaccccactgatggaggcatcccaagagggccacctggaactggttaaatacctgctagccagcggcgctaatgtgcacgcaactactgccactggcgatacagccctgacctacgcatgcgagaacggccacacggacgtagcagatgtgcttctgcaggcaggagccgatctggacaagcaggaagatatgaagaccattctggagggaatagatccagcgaagcaccaggagcacgagtctgagggcgggcgtaccccccttatgaaggccgctcgtgcagggcatttatgcacagttcagttccttatctccaagggcgcaaatgtgaaccgggctacagccaataatgaccacacagtggtctcactagcttgcgccggcggccacctggcagtggttgagctcttattggcacatggcgcagatcctactcacaggctgaaggatggcagtaccatgctgattgaagccgccaagggaggccataccaacgtggttagctacctgctcgattacccaaacaacgttctcagtgtgcccacaactgacgtgtcccagctgccccccccttcgcaggaccagagccaggtgccccgggtgcccacacacacgctggccatggtggtgccgccacaggagcccgacagaacaagtcaggagaactcgccagccctgctgggggtgcagaaaggtacgagtaagcagaaaagctcctcattacaggttgccgatcaagatctccttccaagcttccatccttatcaaccactggagtgcatcgtggaggaaactgagggcaagctgaacgaactgggtcagaggatttcggccatcgagaaggcacaacttaagagcctggagctcatacagggcgaacctttgaataaggacaaaatcgaggaactaaagaaaaacagggaggagcaggtccagaagaaaaaaaaaattctgaaggagttgcaaaaggtcgagagacagcttcagatgaagacccagcagcaatttacaaaagaatacctggaaaccaaggggcaaaaagacaccgtgtctcttcaccagcaatgctcccaccgcggagtctttccagagggggagggggacggcagcctgcctgaggatcactttagcgaactccctcaggtcgacacaatcttgtttaaggacaatgatgttgatgacgaacaacaatcccccccgtccgctgagcaaattgatttcgttcctgtgcagcccctctcctctccacagtgcaacttctcatcggacttgggaagcaatggcaccaatagtcttgagctgcagaaagtcagtggaaaccagcagattgtcggacagccccagattgccatcaccgggcatgaccagggtctgttagtacaggagcctgatggtctgatggtcgccacccctgcccagaccctgaccgatactctggacgatctcattgccgcggtcagtacacgagtccctactggaagcaacagctctagccaaaccacggagtgtcttacacccgagtcatgcagccagacgacaagcaatgtggcatcccagtcgatgccacctgtctacccaagtgtggatatcgacgctcacactgagagcaaccatgatactgccttgacgctggcatgtgctggaggacacgaagaactggtgtcagtgcttatagcaagagatgccaaaatcgaacatcgggataaaaagggcttcaccccccttatcctcgcggcgacggccggccatgtgggggttgttgagatcttgctcgataaaggcggcgatattgaggcccagagcgaacgtacgaaggatactcctctcagccttgcttgtagtggcggtcggcaggaagtggtggacttattgctcgctagaggagccaacaaagagcataggaatgtctcggactatacacccctctctctggcagcctccgggggttacgttaacattataaagatactcctcaatgccggcgcagagatcaattcacgaacaggtagcaaattagggatatcaccgctgatgttagccgccatgaatgggcacgtgcctgcggtgaagctgctgctagacatgggtagtgatataaacgcccagatagagaccaataggaacacagcactgactctggcctgctttcaaggccgcgcagaggtggtgagcctgctactggacagaaaagcaaatgtggagcaccgggccaaaaccggactgacccctctcatggaggctgcttctgggggatacgcagaggtagggcgcgttctgctggataagggcgcagatgtgaatgccccccccgtgccaagctctagggacacggcgctaacaatcgcggcggataaggggcactacaagttctgtgagcttctgatccatcggggggcgcatatcgacgtaagaaataaaaagggcaacacccctctttggctggcaagcaatggaggccacttcgacgttgtacaactgctggtgcaagcaggcgcggatgtcgatgcggccgacaatcggaagatcactcctctaatgagcgcgtttaggaaggggcatgtcaaagtagtccaatacctcgtgaaggaagtgaatcagttcccatccgacatagaatgcatgaggtatatcgcgacgattactgacaaagagttactcaaaaaatgtcaccagtgtgtcgagaccatcgtcaaagctaaggaccagcaagcagcagaggccaataagaatgccagcattctgctgaaagagctggacttggaaaaaagcagagaggagtcccgaaaacaggccctggcggccaaacgctag

SEQ ID NO: 179041 - DNA, 1863 bp, synthetic construct
  misc_feature 1..1863: note = Description of Artificial Sequence: Synthetic coding sequence
  source 1..1863: mol_type = other DNA
atgagcctggcccagcagaaggccgacaagaacaagatcaacggcgagccccgtggcgggggggctggtggcaattctgactctgacaatttagattctacggactgcaactcagaatcaagctcgggcgggaaatcccaggagctgaacttcgtgatggatgtcaacagtagtaaatatccatcactgctgttgcactcacaggaggagaagacaagtactgctacttctaagactcaaactagacttgaaggcgaggtgacgcctaacagtttgagcaccagttataaaaccgtgtctctgccactgagttcacccaatatcaaactgaacctgacctcgcctaagcgcggccagaagagagaagaaggatggaaggaagtggtccggcgctcaaaaaagctgagtgtcccagcctccgtcgtgagtcggatcatgggaaggggagggtgcaacatcacggccatccaggatgttaccggagcgcacattgacgttgataaacagaaggataaaaatggcgaacgcatgatcaccattagaggcggaactgagagtacaaggtacgctgtgcaactgatcaatgctttgatacaggatccggcaaaagaactggaagacctgattccaaagaatcatatccgtacacctgcatccacgaaatccatccatgccaatttttcctcaggcgtgggtaccacagccgcctcttccaagaatgccttccctctgggggcacccaccttagtgacttcacaggctacgactctcagtaccttccagcctgccaacaaacttaacaagaacgtccccaccaatgtacgatccagtttccctgtctccttgccactcgcctaccctcaccctcatttcgccctcctggccgcccagacgatgcagcagatccgccacccccgtttgccaatggcccagttcggtggaacgtttagtccttcacctaacacatggggtcctttccctgttcggcccgttaacccaggaaacacaaacagttctcctaaacataacaacacttcccgacttccaaatcagaacggtacggtgttgccttcagagagtgctggactggctaccgctagttgccccattacagtgtccagtgtagtagcggcgagccagcagctgtgtgttacaaacaccaggaccccctcgagcgtcagaaaacagctgtttgcctgcgttcccaaaacttcacctcccgcgactgtgatcagcagtgtgacaagcacatgttcctctctgccaagcgttagctccgctccaattaccagcggacaggcacccaccacttttctccctgctagcactagtcaggctcagctcagttcccagaagatggaaagcttttccgcagttccccccacaaaagagaaagtctccacccaagaccagccaatggccaacttgtgtaccccttcctcaactgccaatagttgctcctcgtccgccagcaacacaccaggagcccccgaaacccatcccagctcctcccccaccccaacctcaagtaacacccaggaggaagcacagccatcatccgtatctgacttatctcctatgagcatgccatttgccagcaattccgagcccgcaccgcttactctcacctcccctcgaatggtggcagccgataaccaggacacttcgaatctaccccaattagccgtacccgcccctagggttagtcataggatgcagcctcggggaagcttttatagcatggtgccgaatgccaccatacatcaagacccgcagtcaatcttcgtcactaaccccgttacactttgggaagccgaagcctcaggactgcacgaggtgaggagccttcggcaggcatggtag

SEQ ID NO: 179042 - DNA, 2601 bp, synthetic construct
  misc_feature 1..2601: note = Description of Artificial Sequence: Synthetic coding sequence
  source 1..2601: mol_type = other DNA
atggacgtgaacagcagcaagtaccccagcctgctgctgcacagccaggaggaaaagacctccaccgctaccagtaagacccagacacggctggaaggcgaggtgactcccaacagtctgagcacaagttacaagacagtcagtctgcccctatcatcaccaaacatcaagctaaacctgacttcaccaaaaagggggcagaagagagaggagggatggaaggaggttgtccgccgtagcaagaagctgagcgtcccagcgagcgtggtgtcgcgtattatgggtagaggagggtgcaatattactgctatccaagatgtgacaggggctcatatcgacgtggacaagcaaaaagacaagaatggcgaacggatgattacaattaggggagggaccgagtccacgaggtatgccgtgcaactgatcaatgctttgatccaagatccagctaaggaattagaggacttaatccctaagaaccacatccgcacccctgcctctactaaatctatccatgctaatttctcttctggcgtcggaaccactgccgcgtcctccaaaaatgccttccctctcggcgcacctacccttgtgacatcgcaggctacaaccctgagcaccttccagccggccaataagcttaacaagaacgtgccaacaaacgtccgctcctcttttcctgtcagcctgcccctggcctacccccaccctcacttcgcacttctggctgcccaaactatgcagcagattcggcacccacgtctgcccatggctcagtttgggggaactttcagccctagccccaacacgtggggcccgttccccgtgagaccagtcaaccccgggaacacaaactcatccccaaagcacaacaacactagcagactgcctaatcagaacgggactgtgcttccctctgaaagcgcaggcttagcaaccgccagttgccccatcaccgtcagctctgtggtcgcagccagccagcaactctgcgttactaatacccgtaccccatcaagcgtgcgaaagcaattatttgcgtgcgttcccaaaaccagcccccccgccacagtgatttcgtctgtaacctctacatgtagttctcttccatctgtctcttctgcacccatcacatccgggcaggccccaaccaccttcttgcctgcctcaaccagtcaggctcagctgtcttctcagaagatggagagcttctcagccgtgccacctactaaggaaaaagtcagcacacaagaccaaccgatggccaatctatgtactccttcctccaccgcgaactcttgttcatctagtgcctcgaacacccccggggcacccgagactcaccccagcagttccccaacccccaccagctctaacacacaggaggaggctcagccctccagtgtgagtgacctttcaccaatgtccatgccatttgcgtccaattccgagcctgcccctctcacactgacatcgccacggatggtggcagctgacaaccaggatacctctaatctgccacagttggctgtgcccgccccccgcgtgagccatcggatgcaacctcgtggcagcttctacagtatggtgccaaatgccacaattcatcaggacccacaatccatttttgttactaatcccgtgaccctcacccctcctcagggacccccggctgccgttcaactgtcctccgccgtcaacataatgaacggaagtcagatgcacattaatcccgctaacaagtccctcccacctactttcgggccagctacattgttcaatcatttcagcagcttgtttgatagttctcaggtccccgctaatcaaggatggggcgacgggccactgagctccagagtcgccacggatgcatccttcaccgtgcagagtgccttcctgggcaactctgtcctggggcaccttgagaacatgcaccctgacaactcgaaggcacccgggtttcggcctccaagtcagcgtgtttctacatcacctgtagcgaccagcgccccccccacactgggccaaccaaagggcgtgagcgccagccaagaccgtaagattccacctcctatagggaccgaaaggctggctagaattagacaaggaggctccgtagcccaggcccccgcagggacctcatttgttgcccccgtgggtcactccggaatctggagttttggagtaaatgccgtgtcagagggactgagcggatggtcccagagtgtaatgggcaatcatcctatgcaccaacagttgtctgatccttctaccttctcccagcaccaacccatggagcgcgacgactcaggaatggtggctccctctaacatttttcaccagcctatggcatcgggatttgttgattttagcaaaggcctccctatctctatgtatggcggaactatcattcccagccatccccagcttgctgatgtgcctggcggcccgctgtttaatggcctgcacaacccggaccctgcttggaaccccatgatcaaggtgatccagaactctacggaatgcacagatgcccagcagatatggcctggcacctgggcacctcacattggaaacatgcatctgaagtatgttaactag

SEQ ID NO: 179043 - DNA, 2298 bp, synthetic construct
  misc_feature 1..2298: note = Description of Artificial Sequence: Synthetic coding sequence
  source 1..2298: mol_type = other DNA
atggccgccgaccccaccgagctgcggctgggcagcctgcccgtgttcacgcgcgacgactttgagggcgattggcggctggtggcatccggcggattctctcaagtttttcaggcacggcatcgccggtggcggaccgagtacgctataaagtgcgcgccctgcctgccgccggatgccgcttccagcgacgtgaattacctcattgaagaagcagcgaaaatgaaaaaaatcaagttccagcatatcgtgagcatctatggagtatgcaaacagcccctgggcatagtgatggaatttatggcgaacggctccctggagaaagtgctcagcacccattctctgtgctggaaactccgctttcgaattattcatgagacaagcctcgcgatgaactttcttcacagcatcaagcctcctttgctccacctggacctaaagccgggcaatatcctcctggatagcaacatgcacgtgaaaatttctgactttggcctgtccaagtggatggagcaaagtaccagaatgcaatacattgaaaggtcagcattgagaggaatgctcagttacattcccccagagatgttcctggaatctaacaaagcacccggcccaaagtatgacgtctatagttttgcaatcgtcatctgggaactgttgacgcagaagaaaccttactctgggtttaatatgatgatgattattattcgggtggctgctgggatgcgaccgtcccttcaacccgtgagtgatcaatggccctccgaggcccagcaaatggtggatctcatgaaacgctgttgggatcaagatcctaaaaaaaggccttgcttcctcgacatcaccattgagacagacattctgctgtctctcctgcagtccagagtggctgtgcccgagagtaaggccctcgcgcgtaaagtaagttgcaagcttagcctacggcaaccgggtgaagtgaacgaggacattagtcaggaattgatggacagcgattcggggaattacctcaagcgcgccctgcaattgtctgataggaagaatctagttccccgcgatgaggagctgtgcatttatgaaaacaaagtgactcctcttcacttcctggttgcacagggatccgtagaacaggtgcggttattactagcccatgaggtggatgtcgactgtcagaccgcatcagggtacactcctctgctcattgctgcccaggaccagcagcctgacctttgcgctctactgctggcccatggtgccgatgccaaccgggtggatgaggacggctgggcaccactccatttcgccgctcaaaatggagacgatggcactgcgcgactgctcctagaccatggcgcatgcgtagatgcgcaggagcgtgaaggttggaccccgttacatctggcagctcagaacaattttgaaaatgtcgcacgcctcttagtgtcgagacaggccgaccccaacttgcacgaggctgaggggaaaacacccctgcacgtggcagcctacttcggacacgtgagtctagtgaagttgttgacatcgcaaggcgcagaactcgatgcccaacaaagaaaccttcgtacccccctccacttggctgttgagcggggcaaagtgcgcgctatccaacatttattaaagagcggcgctgtgcctgatgcattagaccagtcaggatacgggcctttgcatactgccgctgccaggggaaaatatctgatttgcaagatgctgcttcggtatggcgcatctctagagctgcccacccaccaaggctggaccccactccacctggcggcttataaaggacacctggaaattatacaccttctcgccgagagtcacgccaacatgggggcgttgggtgccgtgaactggaccccacttcaccttgcagcgagacacggagaggaggccgtagtatctgcactcctccagtgtggagctgaccccaacgctgcggaacagtcaggctggacgccactgcatttagcagtccagcgctccaccttcttatccgttatcaatcttctagagcaccatgccaatgtccacgcccggaataaggtgggctggacaccagcccatctcgctgctcttaagggcaataccgcaatcctgaaagtcctggtcgaggctggtgcacagctagacgtgcaggatggcgtctcttgcacgcctctgcaacttgctttacgctcacggaaacaggggattatgtcctttttggaggggaaggaaccctccgtagccaccctaggcggatcaaaaccaggtgctgagatggaaatctag

SEQ ID NO: 179044 - DNA, 1008 bp, synthetic construct
  misc_feature 1..1008: note = Description of Artificial Sequence: Synthetic coding sequence
  source 1..1008: mol_type = other DNA
atggccgagggcggcagccccgacggccgggccggccccggcagcgccgggagaaatctgaaagaatggctgcgcgagcaattttgtgaccacccgctggaacactgcgaagacacccgtttacacgatgccgcctatgttggagatctccagaccctgcggtctttgctgcaggaagagtcgtacaggtcccggattaacgagaaaagtgtgtggtgctgcggatggttaccatgcacccccttgaggatagccgccacagccggccacggctcttgcgttgactttttgatccgcaaaggcgccgaagttgatttggtggacgtgaagggtcaaacagctctttacgtggccgttgtgaacgggcaccttgaatctacccaaatccttctggaggcaggtgctgacccaaatgggtcacggcaccaccgctctacacccgtatatcacgcttctagagtggggcgagcagacatacttaaagcactgatccggtacggggccgacgttgacgtcaatcatcatctaaccccggatgtgcaaccgagatttagtcgccggcttacatcactggtcgtctgtccgctatatatttctgcggcctaccataacctgcagtgtttcagattgctgcttctggccggagcaaacccagatttcaactgcaatggcccagtgaatacgcagggcttttatcgtggctctcccggttgcgtaatggacgcggttctccggcacgggtgtgaggccgcgtttgtgtcattgctggtagagttcggggcaaaccttaatctagtcaaatgggaatccctgggacctgaatcgcggggcaggcgtaaggtggaccccgaggcgttgcaagtgtttaaggaggcgcggagcgtgccccggacccttctgtgtctgtgccgcgtggccgtgaggcgcgctctgggcaagcacagattgcatttgattccgagtctccctctgccagatcctatcaagaagtttctgctccatgagtag

SEQ ID NO: 179045 - DNA, 909 bp, synthetic construct
  misc_feature 1..909: note = Description of Artificial Sequence: Synthetic coding sequence
  source 1..909: mol_type = other DNA
atgctgcagctgaccggcgagaacgagaagaactgcgaggtgagcgaacgcatcaggcggtcaggcccctggaaagagataagcttcggagattatatttgccacaccttccagggagattgttgggcggatcggagcccactccacgaggctgctgcccagggtcggctattggcgctcaaaactctaattgcccagggggttaatgtgaacctcgtgacaatcaatagagtgtcatctctgcacgaagcatgtttggggggacatgtggcatgcgcgaaagctctcctggagaatggagctcacgtgaacggagtaactgtgcatggcgctacgcccttatttaacgcgtgctgctccggtagcgcggcctgcgtcaacgtcctgttggagttcggagccaaggcgcaactggaggttcacctggcgtcaccgatccatgaggctgtcaagaggggccaccgagagtgtatggagattctgctggccaacaatgtcaacatagaccacgaagttccccagttgggcacccccctgtatgtggcatgcacctaccaacgggtggattgcgtaaagaagttattggaactgggtgcatccgtagaccatggacagtggctagatactccccttcatgccgctgctaggcaaagtaacgtcgaagttatccacctgctgaccgactacggggccaatttaaagagaaggaatgcgcagggaaaaagcgcactagatctagcagcacctaagtcctccgtggagcaggctttacttttacgagagggtccccccgccttatcccagctgtgcagactctgcgtccggaaatgccttggtcgagcctgccatcaggctattcacaaactgcacttgcccgagcctctagagcggttcctcctgtatcagtag

SEQ ID NO: 179046 - DNA, 972 bp, synthetic construct
  misc_feature 1..972: note = Description of Artificial Sequence: Synthetic coding sequence
  source 1..972: mol_type = other DNA
atggaggacggccccgtgttctacggcttcaagaacatcttcatcacaatgtttgccaccttttttttctttaaactgctcattaaggtgtttctggctctactgacccatttttatattgtgaagggaaataggaaggaggccgcacgcatcgcagaagagatatatgggggcatctccgattgctgggctgaccgttcacccctccatgaggcggccgctcagggcagactgctggccttgaagaccttgatcgcccaaggagttaacgtgaatcttgtcactatcaacagagtctctagcttgcatgaagcttgtttaggcggtcatgtggcatgcgcaaaggcccttctcgagaacggagcccacgtgaacggcgtgactgtgcacggtgctacaccgctgttcaatgcttgttgttctggctctgctgcttgcgtgaatgtgctcttagagtttggggctaaggctcagctcgaggtacatctggcttctcctatccacgaagctgtgaagagggggcatagagagtgcatggaaatcctgttggctaataacgtaaacatcgatcacgaagtgccacagctgggcacgcctctatacgttgcctgtacgtaccagagggtcgattgtgttaagaaattattggaattgggagcatcagtggaccacggacagtggctggacacccccctacatgccgcagctagacaatccaacgtggaagtgatacacttgctgactgattatggagcaaacctgaaaaggcgaaatgcgcagggcaagtccgctctggatctggctgcgccaaagtcttcagtggaacaggcgctgctgctacgcgagggtccaccggccctgtctcaactgtgtaggttatgtgtgagaaaatgccttggaagggcctgccatcaggcgattcacaaattacacctccctgaaccgctggaacgctttcttttatatcagtag

SEQ ID NO: 179047 - DNA, 909 bp, synthetic construct
  misc_feature 1..909: note = Description of Artificial Sequence: Synthetic coding sequence
  source 1..909: mol_type = other DNA
atgctgcagctgaccggcgagaacgagaagaactgcgaggtgagcgagaggatccggcggtcgggcccttggaaagagatttccttcggggattacatttgtcacacctttcagggcgactgctgggccgatcgctctccactgcacgaagccgccgcacagggccgcttgctggccctcaagacattgatagcccagggcgtaaatgtgaacttagtcaccattaatcgcgtttcttccttgcacgaggcctgcctgggtggacatgtggcctgtgccaaggccctgctagaaaatggggcacacgtgaacggggtgaccgtccatggtgctacaccgctgtttaatgcttgttgtagtggaagcgcagcctgtgtcaacgtactcctggagttcggggctaaagcccagcttgaagttcacctggcttcccctattcacgaggctgtgaagaggggccacagggagtgcatggagattctgttggcaaataacgtgaacatagaccacgaagtgccccagctggggaccccgctgtacgtggcttgtacatatcagagggtcgattgtgtaaagaaactcctggaactgggcgccagcgtggaccacgggcagtggctcgacacccccttacacgcagctgcccgccagagcaatgttgaggtgattcacctccttaccgattacggggcaaatttaaaaaggagaaatgctcaggggaagtccgcgctggacttggccgcacctaagagcagcgtcgagcaggctctactcctgcgcgaaggaccacccgccttgtcacaactctgtcggctttgtgtgcgcaaatgccttggtcgtgcatgccaccaggcgattcacaagctgcaccttcccgaaccgttggagcgcttcctgttgtatcagtag

SEQ ID NO: 179048 - DNA, 921 bp, synthetic construct
  misc_feature 1..921: note = Description of Artificial Sequence: Synthetic coding sequence
  source 1..921: mol_type = other DNA
atggaggacggccccgtgttctacggcttcaagaacatcttcatcaccatgtttgcgacattctttttctttaagttgctgattaaggtctttctggctctgctgacccacttctatatcgtaaaaggcaaccgcaaggaagccgctcgcatagctgaagagatttacggcggtatatctgattgttgggctgaccgatcccctttgcacgaggccgccgcccagggcagattactcgccctaaaaacactcattgcccaagcctgtctgggggggcacgttgcttgtgcaaaggccctcctggaaaatggcgcccacgtcaatggggtgacagtgcacggtgcaactcctctatttaacgcttgttgcagcggctccgcagcgtgcgttaatgtgctcctcgagtttggcgccaaggcccagctggaggtgcatctggcctcccccatccacgaggcggttaagagaggccacagagaatgcatggagattctgctggccaataacgttaatattgatcatgaggtgccacagctcggcaccccactgtatgtagcctgcacatatcagagagtcgattgtgtcaagaagctgctcgaattgggggcaagcgtggaccatggccaatggctggacacaccactacatgcggcggcacgccagtcgaatgtggaagtcatccacctgctgacagattatggcgccaacctgaaaaggcgcaacgcccagggcaagtccgcgctagacctagcagccccaaagagctctgtggagcaggctctcctgttgagagagggacctccagcgctgtcacagctgtgtagactgtgcgtgcgcaagtgtttaggtcgtgcttgccaccaggctatacataaattacacttacccgagcctctcgagcgcttcctcctgtaccaatag

SEQ ID NO: 179049 - DNA, 1764 bp, synthetic construct
  misc_feature 1..1764: note = Description of Artificial Sequence: Synthetic coding sequence
  source 1..1764: mol_type = other DNA
atgacccggttcagctacgccgagtacttcagcctgttccacagctgcagcgcaccttcacggagcacggcccctccagagagctcacctgccagggcccctatgggcctctttcagggggtcatgcagaagtattcatcttcactgtttaagacatcccaacttgcccccgccgatccgttgattaaggccatcaaagatggagatgaagaggccctgaaaacaatgatcaaggagggaaagaatctcgccgaaccgaataaagaggggtggctgccactgcatgaggcagcctattacggccaggtggggtgcctgaaggttctgcagcgcgcctaccccggaacgattgatcaacgcacgcttcaggaagaaacagcggtatacttggcgacatgccgaggacacttggattgtttgttgtctttgttacaggctggagccgagcctgatattagcaacaagagccgggagacacctctgtacaaagcctgcgaacgaaagaacgctgaggccgtgaagatccttgtacaacacaacgccgacacaaaccatcgctgtaacaggggatggaccgctctccacgagtccgtgtcacggaatgacctcgaagtgatgcagatcctagtgtcgggcggggcaaaggttgagagcaaaaatgcctatgggataactccactctttgtcgccgcccaaagtgggcagcttgaggccctccgctttctggcaaagtacggggctgatataaacacgcaggcctccgataacgctagcgccctctatgaagcctgtaaaaacgagcatgaggaggtggtagaatttctattatctcagggtgcagatgctaataagaccaataaggacggactgctgccactccacattgcaagcaaaaagggcaactacagaatcgtgcagatgctgttgccagtgacaagccggactcggattaggaggtccggcgtctccccattgcacctggctgcagagcgtaaccacgacgaggttttagaggctctcctgtcggctcgcttcgatgttaacacgcctctggcaccagagagggcacgactctacgaagataggcgcagtagcgcgctgtactttgctgtggttaataataacgtgtacgccactgaattgctgctgcagcacggggcagacccaaacagggatgtgataagccccctcctggttgcaatccgacacgggtgcctcagaactatgcaattactgctggaccacggggccaatatcgacgcatatatcgctacacacccgactgccttccccgcaaccatcatgttcgctatgaagtgcctctcactcctgaagtttcttatggatctgggctgtgacggagaaccctgcttcagctgcctgtacggcaacggaccgcacccacccgcccctcagcctagctctcgcttcaatgatgcccctgccgcggacaaagagccctctgtggtgcagttttgcgaattcgtctcagcacctgaggtttccagatgggcaggacctatcattgacgttttattagattacgtgggcaatgtacagttgtgttctaggttaaaggaacacatcgattcttttgaagactgggccgtaatcaaggagaaggcagaaccaccacgcccccttgctcacctctgccgccttcgagtgagaaaagctattggtaaatataggatcaagctgctcgataccctccctctgccaggcaggcttataagatacctcaagtacgaaaatacccagtag

SEQ ID NO: 179050 - DNA, 1812 bp, synthetic construct
  misc_feature 1..1812: note = Description of Artificial Sequence: Synthetic coding sequence
  source 1..1812: mol_type = other DNA
atggccatcgagcagagcctggccgacaagacccggggccccaccaccgccgaggcaactgcaagtgcctgcaccaaccgccagcctgcgcacttttacccgtggacccgctcaacggctccaccagagtcctccccagcccgtgctcctatgggactgttccagggagtcatgcagaagtacagcagctctttgttcaaaacctctcagttggcacctgctgaccctctcataaaagccataaaggatggcgacgaggaagctttgaaaaccatgataaaagagggtaagaacctcgcagagccgaataaggagggttggttgccattacacgaggctgcttactatggccaggtcggctgcctcaaggtgttacaacgcgcgtatcctggtaccatagaccagcgcacgttgcaagaagaaactgcggtttacctagcgacgtgtcggggacaccttgattgcctgctgtctctgctccaggctggggctgaacctgacatctcaaacaagtctcgcgagacccccctttataaggcctgtgaaaggaagaacgcagaggctgtgaagatcctggtacagcacaatgccgatactaaccatagatgtaacagaggttggacagccctccacgaatccgtgagtcgcaacgatctggaggtaatgcagattctggtctccggtggtgctaaggttgaatccaaaaacgcatacggaatcactccattgtttgtcgccgcccagtccggacagctggaggcgctgaggtttctggctaaatatggagccgacatcaatactcaggcctccgacaatgcttcagctttgtatgaggcatgcaagaatgaacatgaggaggttgttgagttcctccttagccaaggggccgatgcgaacaaaaccaataaggacggtctgttgcccctgcacatcgcgtccaaaaaggggaactaccggattgtgcagatgcttctgcctgtgacaagtaggactcggattcgcagatctggcgtgtccccccttcacctggccgccgagcgaaaccatgacgaggtgctggaagcactgttgtcagctaggttcgatgtgaacacacctctggccccggagagagcccgtctgtacgaggatcgaaggtcaagtgcactgtacttcgccgtggtcaacaataatgtgtacgctacggaacttctgctacagcacggcgccgacccaaatagggatgtcatcagccctctcctcgttgccatcaggcatggatgcctccggaccatgcaactgcttttggaccacggagccaacattgacgcttatattgccacacatcctacagctttccctgccactattatgtttgcaatgaagtgcctgtccttgctcaagttcctgatggatctgggatgtgatggcgagccatgtttcagctgcctctacggaaatggccctcaccccccagcaccacagccctcatcccgatttaacgacgctcctgctgctgataaggagcccagcgtcgtgcagttctgtgaattcgtgtcggctccagaggtctctcggtgggccggacctatcatcgacgtacttctcgattacgtggggaatgtccagctgtgttctcgcttgaaggagcatatagatagctttgaagattgggcagtaatcaaagaaaaagcagagccacctcggcccctggcccacctatgccgactgcgagtccgtaaagcaatagggaaataccggatcaagcttctcgatactctgcccctgcccggcagacttatcagatacctcaaatacgagaatacccagtag

SEQ ID NO: 179051 - DNA, 1470 bp, synthetic construct
  misc_feature 1..1470: note = Description of Artificial Sequence: Synthetic coding sequence
  source 1..1470: mol_type = other DNA
atgcggcccgccgaccccctgatcaaggccatcaaggacggcgacgaggaggctctcaagaccatgattaaggaggggaagaacctggctgagcccaacaaggaaggctggctgccacttcacgaggccgcctactacgggcaggtgggctgtcttaaagtgctccaacgtgcttaccctgggaccatcgaccaacggactttacaagaggaaaccgcagtttacttggccacgtgtcgtgggcacctggattgtcttctatccctactgcaggctggcgctgaacccgacatatctaataaatcaagggagacccccctatacaaggcttgcgaacgtaaaaatgccgaggctgttaaaatcctggtccagcacaatgccgataccaatcacaggtgtaacagggggtggacagctttacatgaaagtgtgagtcggaacgacctggaggttatgcaaatactcgtctccgggggcgcaaaggtggagtcaaagaacgcgtacggaataaccccgctgtttgtggccgcccagtccggacagcttgaagcgctgcgctttctggctaaatatggcgctgacatcaatactcaggccagtgataacgccagcgcactatacgaggcctgtaagaacgaacacgaagaagtcgtagagtttctactgtcccaaggtgccgacgccaacaaaacaaataaagacgggctgctgcctctgcacattgccagcaagaagggcaactaccgaatagtgcagatgctgctgccagtcacttcccgaacccggattcgaaggtccggagtgtcccccctgcacctggcggcggaaaggaaccatgacgaagtcctcgaagcactcctctctgcacgcttcgacgttaacacaccactcgctccggagagggcaaggctgtacgaagacaggagatcctccgccttgtatttcgcagttgttaataataacgtttatgccactgaactgctgcttcaacatggcgcagatcccaacagggacgtcataagcccactgctggtggctatacggcacggatgcctccgaacaatgcagctgctgctggaccatggtgcgaacatcgacgcctatatcgccacacaccccacggcctttcctgctacaataatgttcgccatgaaatgcctctccctgctgaagttcctaatggatcttggttgtgacggtgagccttgcttctcctgtctatacgggaacgggccccaccctccagccccacagcctagttcacgcttcaacgacgcccccgccgccgacaaagaaccttccgtggtgcagttttgtgagtttgtatccgctcccgaagtgtctcggtgggcaggcccaataatcgacgttctcctcgactacgtgggcaacgtgcagctctgttctcgcttgaaggaacacatcgactcttttgaagactgggtgctcgaaggattcgtcaaatactag

SEQ ID NO: 179052 - DNA, 1908 bp, synthetic construct
  misc_feature 1..1908: note = Description of Artificial Sequence: Synthetic coding sequence
  source 1..1908: mol_type = other DNA
atggccacccagatcagcacccggggcagccagtgcaccatcggccaggaggagtattccttgtattcctcactgagtgaagacgagttggtccagatggccatcgagcagagcctggcagataaaacgagggggcccaccaccgcagaggccaccgcgagcgcatgtacaaatcggcagcccgcccacttctacccttggactagaagtactgcaccgccggagtcctctcccgctcgggctcccatggggctcttccagggggtgatgcaaaagtactcgtctagcctgttcaagacaagccagttagcccctgccgaccctctgatcaaagcaattaaggacggtgacgaagaagctttgaagaccatgattaaagaaggaaaaaatctggcagagcctaacaaggagggttggctgcctttacacgaggccgcatattacggtcaggtagggtgtctgaaagttttacagagggcatatcctggcacaatcgatcagagaaccctgcaggaggaaactgctgtgtaccttgcaacatgccggggccatctggactgcctattgtccttgctccaggcaggggcggaaccggatatttccaataaatccagggagacgccactgtacaaagcttgcgaacggaagaacgccgaagctgtgaaaatcctggtacagcacaatgctgacaccaaccatcgatgcaatcgcggctggacagcgctccacgagtcagtgagccggaatgatttggaggttatgcagattttagtatccgggggggccaaagtggagagcaaaaatgcctacggaattacaccacttttcgttgccgcccagagtggccagctcgaggcactccgcttcctggccaagtacggcgccgatattaacacccaggcttctgataacgcgagtgctctctacgaggcctgtaaaaatgagcacgaagaagtggtggagtttctcttaagtcaaggcgcagatgctaacaagacaaacaaagacggtttgctccctctccacatcgctagcaaaaaaggcaattacagaatcgtgcagatgctgttaccagtaacatcccggacacggatcaggcggtccggcgtctctccccttcacctggctgcagagaggaaccacgatgaggtgttggaagccctgctgtccgctaggtttgatgttaacactcctctggctccagaacgcgcccggttgtacgaagaccgccgttcatcagccctgtattttgcggtcgttaataacaacgtctacgcgactgaactgctgctgcaacatggggccgatcctaatagagacgtgatttccccactattggttgcgattcggcatggctgcctgcgcactatgcagctcttattagatcacggagctaatatcgacgcctacatcgccacacacccaacagcctttcctgccacaataatgttcgccatgaagtgtctgtctctgttaaaattcctgatggatctgggatgcgatggcgaaccctgtttcagctgtttgtatggcaatggccctcaccccccggccccgcagccttcctcaagattcaacgatgcaccagcagccgacaaagagccgtctgtggtgcaattttgcgaattcgtatcagcccccgaggtgtctcgctgggccggacccattatcgatgtgctcctcgattacgtgggcaatgtgcagctctgcagccgtctgaaggaacacatagactcttttgaagactgggcggtcatcaaagagaaagccgagcctccgcgcccattggctcacttgtgcagactccgggtgcggaaggctataggtaagtaccgtatcaaactgctcgatactttaccacttcctggaagactaatccggtatttgaagtacgaaaatacacagtag

SEQ ID NO: 179053 - DNA, 1557 bp, synthetic construct
  misc_feature 1..1557: note = Description of Artificial Sequence: Synthetic coding sequence
  source 1..1557: mol_type = other DNA
atggacttcaccgaggcctacgccgacacctgcagcaccgtgggcttggccgctcgagaagggaacgtgaaggtgctgcggaaactactgaagaaaggtcgtagcgtggatgtggccgacaaccgggggtggatgccaattcacgaggcggcttatcataatagcgtggaatgtctccagatgctgattaacgccgacagctcagaaaactatatcaagatgaaaacattcgaaggcttttgtgctcttcatcttgccgcttcccaggggcactggaagatcgtgcaaatcttgctggaggccggagcagacccgaatgccactactttggaggagacaacccctttgtttttggcagtagagaacggccagatagacgtgttgcgcctgttgctgcagcatggggccaatgttaatggtagtcatagcatgtgtggatggaatagcctgcatcaggcctccttccaggagaatgccgaaatcataaaattactactgcgaaaaggggccaataaagagtgccaggatgatttcggcattactccgctgtttgtagcggcacagtacggaaagctagaaagcttgagcatcctaatctcctcgggggctaacgtcaactgtcaagcattagataaggccactcccttgtttatagccgcacaggaggggcataccaagtgtgtggagctccttctctcctccggggcagaccctgacctttattgtaacgaggatagctggcagttgcctattcacgccgcggctcagatggggcacacaaaaatcctggacctacttatccccctgacgaatagggcttgcgacactggactgaacaaggtgagtcccgtatattctgccgtgtttggcggacatgaagactgcctcgagatcttactccgcaacggatattcaccagatgcgcaggcttgccttgtctttggatttagcagccctgtatgcatggcctttcagaaggactgtgaattcttcggtatagtgaacatacttctgaaatacggcgctcaaatcaacgagttacaccttgcctactgcttgaaatatgagaagtttagcatattcagatatttccttagaaagggctgttcactgggaccttggaaccatatctatgagtttgtgaaccatgctattaaagcccaggccaagtacaaagagtggctcccccacctgcttgtggcaggattcgatcccctcattctcttatgcaacagttggatcgactctgtgtctatcgacactctgattttcactttggaatttacaaactggaaaaccctcgcgcctgccgtggagcggatgcttagcgctagagccagcaacgcctggattctgcagcaacacattgctaccgtgccctctttaacgcacttatgtcggcttgagatccgctcctccttaaaatctgagaggctgcgctccgattcctatatttcccaactcccgctccccaggtccctgcacaactatctgctctatgaggatgtgttaagaatgtatgaagtccccgaactggcagcaattcaagatggttag

SEQ ID NO: 179054 - DNA, 1671 bp, synthetic construct
  misc_feature 1..1671: note = Description of Artificial Sequence: Synthetic coding sequence
  source 1..1671: mol_type = other DNA
atggccatgatgcccctggtgctgcaccaccccgagcggcaggccgagttaggctctggtcttagggatggagggggcgctgccctgcgcccacctgggagattggtgaaacaaatggactttacagaggcttatgccgacacatgttctacggtaggcctggcagcgcgggaggggaatgtgaaggtgctccgcaaacttctgaaaaaaggccgctctgttgacgtggccgacaaccgcggatggatgcctatccacgaagcagcctaccataactcagtggagtgcctgcagatgctcatcaacgcagactcatccgagaactacattaagatgaaaacgttcgagggcttctgcgcattgcatctcgcagcctctcagggtcactggaagattgtgcagatactgctcgaggctggggccgatcccaatgccaccacccttgaggagaccacaccactgttcctagcagttgagaatggtcagatcgatgtgctcaggctcctgctgcagcatggcgctaatgtgaacgggtctcactctatgtgcggctggaactcactccatcaggcctcttttcaggagaatgccgagattattaagctcctactacggaaaggcgccaataaggaatgccaggatgactttggcatcacccccctgttcgtcgcagctcaatatggaaagttggagagtctcagcatcctgatttcatcaggcgcaaatgtgaattgtcaagccctcgacaaagccactccactctttatcgccgctcaggaaggacacactaagtgtgtagagctgctgctctcctctggcgcagatcctgatctgtactgcaacgaggattcatggcaactgcccatccatgccgccgctcagatgggtcacacaaaaatactcgacctcctcattcctctcacaaacagggcctgcgacaccgggcttaataaggtgtccccagtgtactccgcggtgttcggaggacatgaagactgtttagaaatcttgttgcggaacgggtatagcccagacgctcaggcctgcctagtcttcggattctcatcaccagtgtgtatggcttttcagaaagattgtgaatttttcggcattgtaaatattctgctgaagtatggcgcacagatcaacgaactgcacctggcctattgtctcaaatacgagaaattttcaatatttcgttattttctgaggaaaggctgcagcttggggccttggaatcacatctacgagttcgtcaaccatgctattaaggcacaggccaagtataaggagtggttaccacacctgcttgtggccggatttgatccactcatactgttgtgcaactcctggatcgacagtgtgtccattgacaccctcatctttacactggaattcactaactggaagactctggcccccgccgttgagcggatgctcagtgccagagccagcaatgcctggatactgcagcagcatatcgcaactgtgccttcgctgacccatctatgcagacttgagattcgttcaagtctcaaatccgagagacttcgctcggacagttacatctctcagctcccattgccaagatcgttacacaattatctgctctatgaggacgtgcttaggatgtacgaagttccagagctagctgcaatacaagatggatag

SEQ ID NO: 179055 - DNA, 1338 bp, synthetic construct
  misc_feature 1..1338: note = Description of Artificial Sequence: Synthetic coding sequence
  source 1..1338: mol_type = other DNA
atgaagaccttcgagggcttctgcgccctgcacctggccgccagccagggacattggaaaatcgtccagattcttctggaagccggcgcagatcccaacgccaccacccttgaagagaccacgcccctcttcttggcggtcgagaacggccagattgatgtactgaggctgcttctccagcacggggctaatgtgaatggttcacactctatgtgtggttggaatagtcttcaccaggcttcctttcaggaaaatgccgagatcattaagctgttactgcggaaaggggcgaataaggagtgccaagatgattttggaatcactccacttttcgtggctgcacaatatgggaagctggagagtctgtccatactaatctcttccggagccaatgttaactgccaggcgctggataaggctacacctttattcatcgccgcccaggaaggacatactaagtgcgttgagctgctcctgagtagtggggccgaccccgatttgtattgcaacgaggatagctggcagctccccatacatgctgccgcccagatgggccatacaaagatcttggatctgcttattcctctgaccaaccgggcctgtgacaccgggctgaacaaagtgtcacctgtgtacagtgccgtcttcggaggacacgaggactgtttggaaattttgctacgtaatggttatagccccgacgctcaagcctgcctagtatttggattcagttcccccgtctgcatggcctttcagaaagattgcgagtttttcggaatagtcaacatactcctcaaatacggagcacagataaacgagctgcatctcgcctattgtctgaaatacgagaaatttagtatatttagatactttctgcgcaagggctgctcacttgggccgtggaatcatatatatgagttcgttaatcatgctattaaggcacaggccaaatacaaggaatggcttccgcatctgctggttgctggtttcgatccactgatactgctatgcaactcttggattgactccgtgtccatcgacactctgatctttacgcttgagttcactaactggaagactctcgctcccgctgtagagcgcatgttaagcgcaagggcatcaaacgcatggattctgcagcagcacatcgccacagttccgagtttgacccacctatgtcgcctggaaattcggtcctccctgaaatccgagagacttagaagtgactcttatataagtcaactgcctctgccccggagcctgcataactatcttctgtacgaagatgtgctaagaatgtacgaggtgcccgaactggccgctattcaggacggatag

SEQ ID NO: 179056 - DNA, 1662 bp, synthetic construct
  misc_feature 1..1662: note = Description of Artificial Sequence: Synthetic coding sequence
  source 1..1662: mol_type = other DNA
atgcccctggtgctgcaccaccccgagcggcaggccgagctgggctcaggtctgagagatgggggaggagcggccttgagaccaccgggaaggctggtgaaacagatggatttcaccgaagcctacgcggatacatgcagcaccgtgggtctggctgctcgcgaaggcaacgttaaggtccttcgaaagctgctgaaaaaggggcgcagcgtagacgtcgctgacaaccggggctggatgccaatacacgaagctgcgtaccataattccgtggaatgccttcagatgctaattaacgcggactcctcagaaaactatattaagatgaaaaccttcgaaggcttttgcgctctgcatctagctgcttctcagggccattggaagattgtccaaatcctgttggaggccggggcggaccccaatgccacgacattggaggaaaccacaccgctgtttttggccgtggagaacgggcagatagatgtattgcggctgttgcttcaacacggtgccaatgttaatggctctcattccatgtgcggatggaactcacttcaccaagcctctttccaggaaaacgctgagattattaagttgctcctgaggaaaggggcgaataaggaatgtcaggacgactttggcattacacctttgttcgtggctgcccagtacggaaagttggagagtctaagtatacttatctcctcgggagccaatgttaattgtcaagcgttagacaaggcaacacccctgtttatcgcggctcaggagggtcacactaaatgtgtagaactgttactgagctctggtgccgacccagacctgtactgtaacgaggactcatggcagctgcctattcatgccgccgcccagatgggccatactaagatactcgacctgctaatcccgctaacaaatcgcgcttgcgacacgggcctgaacaaggtgtcgcccgtgtactcagccgtgtttggtggacacgaagactgcttagaaattttactgagaaacggctactctccagacgctcaggcctgccttgtgttcggcttctcttcgcccgtctgcatggctttccagaaagactgcgaatttttcggcattgtgaacattctattgaagtatggggcccagatcaacgagctccacttagcctattgtctgaaatatgaaaaatttagcatatttaggtacttcctgaggaaggggtgctctctcggtccttggaatcatatctatgaattcgtgaaccacgcaatcaaagcacaagccaagtacaaagagtggttgccccacctcctggtggcaggattcgacccattgatcttgctgtgcaattcttggattgactccgtgagtattgatactttaatatttacgctggagtttaccaactggaaaaccctcgcgccagccgtggagaggatgctcagcgcaagggcgtctaacgcttggattctgcagcagcacatcgcaacagtgcctagccttacccatctgtgtcggctggaaatcaggagttcacttaaatctgagcggctgagatccgactcttacatcagccagctgccactgcccaggtcattacacaattacctcctgtacgaagacgtgctcagaatgtatgaggtcccggaactagcagcaattcaggacggttag

SEQ ID NO: 179057 - DNA, 1338 bp, synthetic construct
  misc_feature 1..1338: note = Description of Artificial Sequence: Synthetic coding sequence
  source 1..1338: mol_type = other DNA
atgaagaccttcgagggcttctgcgccctgcacctggccgccagccaggggcactggaaaatcgtgcagatactattggaagcaggcgcagatcccaatgccacaactctcgaagagacaacccccttgtttctcgcagtggagaacggacagattgacgtgctaagactcctgctgcagcatggcgccaacgtgaacgggtcacactctatgtgcggttggaactccctgcaccaggccagcttccaggagaatgcagagattattaagctgctgttgcgcaaaggcgcgaataaagagtgccaggacgacttcggaattaccccactgtttgtggcggctcagtacggcaaattggaaagtctttcaatcctcattagctccggcgcgaacgtcaattgtcaggcgcttgacaaggcaacacccctgtttatcgcagcccaggagggacatactaagtgtgtggagctgctgctctcttctggggctgatcccgatctctattgcaatgaggattcatggcagctgccgattcacgctgctgcccagatggggcacacaaagattttggatctgcttattccgctgaccaatagggcctgcgacactggcttaaacaaagtctccccagtgtacagcgcagtttttggaggtcacgaggactgcctggagattctgctacggaatggttatagcccagacgcccaggcttgcctggtttttggattctcttcccccgtgtgtatggctttccagaaggattgtgaattcttcggaattgttaacatcctgcttaaatacggagcccaaatcaatgagttgcacctcgcctactgtctgaaatatgagaaattctcaatcttccggtatttccttaggaaaggctgctctctaggcccctggaatcacatatatgagtttgtgaatcatgctataaaagcccaggctaagtacaaagagtggcttccacaccttcttgtggctggcttcgacccactgattctgctatgtaactcctggattgattccgtttccatcgatacattaatcttcacgctggagtttactaactggaagaccctagcccctgccgtcgaacggatgttgtcagcgagggcttcaaacgcttggatcctccagcagcacattgcaaccgtacccagtctcacccacctctgcaggctcgagatccgcagctccctcaagagcgagcgcctacggtcagattcttacatatcccaattacccttgcccagaagcctgcacaactacctgctctatgaagatgtgctgcggatgtatgaggtgccagaactcgcagccattcaggacggatag

SEQ ID NO: 179058 - DNA, 1314 bp, synthetic construct
  misc_feature 1..1314: note = Description of Artificial Sequence: Synthetic coding sequence
  source 1..1314: mol_type = other DNA
atggacttcaccgaggcctacgccgacacctgcagcaccgtgggcttggcggcccgcgagggtaacgttaaggtcctgcgtaaactgctaaagaaaggtcgttccgtggacgtagccgacaaccggggctggatgcctatccacgaagccgcctatcacaactccgtggagtgcctgcagatgctgattaacgctgactccagcgaaaattacatcaaaatgaagaccttcgaaggcttctgtgcgttgcacttggcagccagccaaggccattggaaaattgtgcagatccttctggaagctggggccgaccctaacgccacgacactggaggagacaacccccctgttcctgggagcaaatgtgaactgtcaggctctggacaaagctactcccctcttcatcgcagcgcaggagggccacacgaaatgtgtcgagctgttactctcttccggcgcagatcctgacctttactgtaatgaagactcttggcagttgcctatccacgcagccgctcaaatgggacatacaaaaattctggacctgctaatccccttgacaaatagagcttgtgacaccggcctcaataaggtgtctcctgtttactctgctgttttcggaggccatgaggattgccttgaaattttattgagaaacggctacagccctgacgcccaggcatgtctcgtgttcggctttagtagccctgtctgcatggcctttcagaaggagtggtcttgcgagttcttcggcatagttaatattctgcttaagtacggcgcacagatcaatgaattacacctggcatactgtctgaaatatgaaaagttttctatttttcgctatttcttgcgcaaaggctgttcactgggcccttggaatcatatttacgagttcgtgaatcatgccatcaaggctcaggccaagtacaaagagtggctccctcatctcttggtggcaggcttcgatccgctcatactcctgtgcaacagctggattgattccgtgtcgattgatacgctaatcttcacacttgagtttaccaattggaaaacattggctcccgccgtcgaaagaatgctgtcagcccgggccagcaatgcatggatcctgcagcagcatatcgccaccgttccttctctaacacacctgtgtcgcctggagatccggtcgagtctgaagtcagaacgtctgcggtcggacagctatatatcccagctgccccttccacgatccctgcacaattaccttctatatgaagatgtcctgcgaatgtatgaggtcccagaactcgctgctattcaggatggctag

SEQ ID NO: 179059 - DNA, 1281 bp, synthetic construct
  misc_feature 1..1281: note = Description of Artificial Sequence: Synthetic coding sequence
  source 1..1281: mol_type = other DNA
atggacggcaccaccgcccccgtgaccaagagcggcgccgccaagcttgtgaagagaaactttttggaagcacttaagtctaatgattttggaaagctgaaggcgatcctgattcaacgtcagatagacgtcgatacagtattcgaggtagaagatgaaaacatggtcctggcatcttacaagcaaggttactggctgccttcttacaagttgaaaagctcttgggccacaggtttgcacctgtccgtgctgtttggccatgtggaatgtctcctcgtgctgttagaccacaacgcgaccatcaactgtaggccaaatggaaaaacccccctgcatgtcgcctgcgagatggcaaatgtcgattgcgtgaagatcctgtgtgacagaggggctaaactgaattgttacagcctctcaggtcacactgccctgcacttctgtaccaccccatctagcatactgtgtgccaaacaattagtctggcggggcgctaacgttaacatgaagacaaataaccaggatgaggagactccattgcacacagcagcacactttggtctctcggaattagtagcgttttatgttgaacatggcgcgattgtcgattcagtcaatgcccatatggagactccactcgctatcgccgcatattgggccctgcggtttaaggagcaagaatacagcacagaacaccatttagtgtgtaggatgttgctggactataaggccgaagttaacgctcgagatgacgacttcaaaagcccactgcacaaagcagcttggaactgcgatcatgtcctgatgcatatgatgctcgaagcaggcgccgaagccaaccttatggacatcaacggatgcgctgcaatccagtacgttctgaaagttacctccgtgaggcctgcggctcagcctgagatctgctaccagttgctccttaaccacggtgctgcccgtatatatccgccacaatttcataaggttattcaagcatgccactcgtgtccgaaagcgattgaggtcgtcgtcaatgcctacgagcacataagatggaacaccaaatggaggagggccattccggatgacgatctggaaaaatactgggacttttaccactccctgttcaccgtgtgttgcaattcgcctaggactctgatgcacctgtccagatgtgcaatccgaagaactctgcacaaccgctgtcatcgagccatccctttactttccctgcccctgtccctgaagaagtatctcctccttgaaccggaaggcattatctattag

SEQ ID NO: 179060 - DNA, 1050 bp, synthetic construct
  misc_feature 1..1050: note = Description of Artificial Sequence: Synthetic coding sequence
  source 1..1050: mol_type = other DNA
atggacggcaccaccgcccccgtgaccaagagcggcgccgccaagctggttaagagaaactttctagaagcactaaaatctaacgatttcgggaagcttaaagctattctgatacagcgtcagattgatgtagatacagtatttgaagttgaggatgagaacatggtgctcgcatcttataaacagggctactggttgccctcttacaaattgaaatcgtcgtgggctaccggtcttcatttaagcgtcctctttggacacgttgagtgcctgctggttcttctggatcacaatgctactatcaactgtagacccaacggcaagactcccttacacgtggcatgtgagatggcaaacgtagactgtgttaagatcttgtgcgacaggggggctaaactgaactgttacagcctgtctgggcacactgctttgcacttctgcactacccctagctccattctgtgcgcaaagcagctggtgtggcgcggggcgaatgtgaacatgaagactaataatcaggacgaagaaactccactgcatactgcggctcactttgggttaagtgaactggttgccttctacgtggagcatggggcaatcgttgacagtgtgaacgctcacatggagacacccctggcaattgcagcttattgggccctccggttcaaagagcaagaatatagcacagaacaccacctggtttgtcgtatgcttcttgattataaagccgaggttaatgctagggacgacgattttaagagtcctttgcataaggccgcttggaattgcgatcatgttcttatgcatatgatgctggaggccggcgcagaggctaacctgatggatattaacggctgtgctgccatacagtatgttctgaaagttacatcagttcgccctgccgcccagccggagatttgttatcagctgctgctaaaccatggggccgcgaggatttatcctccacagtttcacaaggtccgactgtgccccgtggtctccaggttgaggaaaattcagatggctgctctgtctgagatctcaaagtag

SEQ ID NO: 179061 - DNA, 3747 bp, synthetic construct
  misc_feature 1..3747: note = Description of Artificial Sequence: Synthetic coding sequence
  source 1..3747: mol_type = other DNA
atgggcaaggaccaggagctgctggaggccgcccggaccggcaacgtagccttagtagagaagctcctctccggacgcaagggcgggatactgggtggagggtctggacccctgcctctctcaaatctgctgagcatttggagaggtcctaatgtgaattgtaccgatagcagtgggtatactgccctccatcacgcggctctgaacggccacaaagatatcgtcttgaagctgcttcagtacgaggctagcactaatgtggcggataacaagggatacttcccaatacacttggctgcttggaaaggggatgtcgaaatcgtcaagattctgattcaccatggcccaagccactcaagggtgaatgagcagaacaatgagaatgagaccgcattacattgcgcagcccagtacgggcactccgaggttgtggccgtgctgcttgaagagttgaccgaccctaccataaggaattccaaattagagacaccgctggacctggcggctctttatgggcggttgcgcgtcgtgaagatgattatcagcgcccacccaaaccttatgagctgcaacacacgcaaacatacgccactgcatctagctgcccggaatggccacaaggccgtggttcaggtgctccttgaggccggcatggacgtctcttgtcagaccgagaaaggctccgccttgcatgaggccgccttgttcggaaaggtcgacgttgttcgcgtgctcttggaaaccggtatcgatgctaatataaaagacagcctcggacgcaccgtactagatatcttgaaagaacacccctcccagaaatccctccagattgccactctgctgcaggagtatctggaaggggtggggcgttcaaccgttctggaagagcccgttcaggaagatgctacacaggagactcatatctcctcgcccgtggaatcaccaagccagaagaccaaatctgagaccgttactggggaattgtccaagctgctcgacgagataaagttgtgtcaggaaaaagattatagtttcgaagacctctgccataccataagcgatcactatttagacaacctttcaaagatcagcgaggaggagctggggaaaaacggctctcagagcgtgcgaacttccagcactatcaatcttagtcccggcgaagtggaggaagaggatgatgatgagaacacctgcggtcctagtggcctgtgggaggccttaactccttgtaatggatgtcgtaacttgggatttcccatgttggctcaagagagctatccgaagaaacggaattacacgatggagatcgtgcccagtgctagccttgatacgtttccaagtgaaaatgaaaatttcttgtgtgacctgatggatactgccgttaccaaaaaaccttgctcgctagaaattgccagagccccaagtccacggaccgataatgcttctgaagtagccgtgacgacccccggcacaagcaaccaccggaacagttccactggcccgacaccagactgctctccaccctcgcctgacactgccctgaaaaacattgtgaaggtgattcggccacagcctaagcaaaggacatcgatcgtaagcagcttagattttcataggatgaaccacaatcaggagtactttgaaattaatacttcaacagggtgtaccagcttcactgcttcccccccggcttctcctcctacctcttccgtagggactaccgaagtgaaaaacgagggtacaaaccacaccgacgacctgtccagacaggatgataatgacccgcctaaggaatatgaccccggtcagttcgctggcttgctgcacgggtcttctcccgcctgcgaaagtccagaaaacccatttcacctgtatggaaaacgagaacagtgtgaaaaaggtcaggatgaagttagcctggcaaactctccgctgcctttcaaacaaagtcctattgagaataactctgagccactcgttaaaaagatcaagcccaaagtcgtatctagaaccatctttcacaagaagtcaaatcagctcgagaaccacaccatcgtgggtactaggagcacacgctcgggctctaggaatggcgaccagtgggttatgaatgccggtggctttgtggaaagggcttgtaccctcggaagaattaggtccctccccaaagctctgatcgatatgcatttgtccaagagtgtttctaaatcggatagcgacttgattgcctatccttccaatgagaaaactagccgcgtgaattggagcgagtctagtacagccgaacatagctcgaaggggaattctgaacgtacaccaagtttcacctcagaatgggaagagatcgacaagattatgtcttctatagatgtcggcatcaataatgagttgaaggaaatgaacggcgaaactactcgaccccgatgccctgtgcagacagtcggccagtggctggagagtattgggctgccccagtacgaaaaccatctcatggctaatggttttgacaatgttcaattcatggggagcaatgtgatggaggatcaggacctcctcgagattggaattttgaacagtggccatagacagagaatcctgcaggctatccagttattaccaaaaatgcgccccataggccatgacggataccatcccacttcggtcgcagaatggttggatagcatcgaacttggtgactacactaaggcttttctaattaatgggtacacaagtatggatctgctcaaaaagatctgggaagtggaactgattaatgtcctcaaaataaacctgattggacaccggaaaaggattttagcatccctgggcgaccgcttacacgacgacccccctcaaaagcctccaaggtctatcaccctgcgagagcccagtggtaaccacaccccaccacaactgagtccgagtcttagccaatcaacatatacaaccggaggatccttggacgtgcctcatatcattatgcagggagacgcaagacggcgacgcaatgagaattatttcgacgacattccccgatctaagctggaacggcagatggcccagactggggactggggcgagccttccataaccctcagaccccctaacgaagctactgcgagtacacccgtgcagtactggcaacaccatcccgagaagttgattttccagtcatgtgattacaaagcattctatctgggaagcatgcttattaaagaactccgcggtacggagagtacacaagacgcatgtgcgaagatgcgcgtgatgtgcgttaaaagcacagaacagatgaagaaggttccaactatcatcctctcggtgagttacaaaggcgttaaattcatagatgccactaacaagaacatcatcgcagaacacgaaattcgtaacattagctgtgccgcgcaggaccccgaggatctgtccacttttgcctatataaccaaggacctgaagtccaatcaccactattgccatgttttcacagcatttgatgtgaatctggcttatgaaattatactcaccctgggccaggccttcgaggtggcctatcagttggctctccaggctaggaagggtggccactcttccacgctgcccgagagtttcgaaaataagccctcgaaaccaatccctaaaccaagggtgtctatccggaaatctgttgatctgttgcacgcctcccacaccggacaggagccatccgagcgccacaccgaggaggcacttaggaagttctag

SEQ ID NO: 179062 - DNA, 1353 bp, synthetic construct
  misc_feature 1..1353: note = Description of Artificial Sequence: Synthetic coding sequence
  source 1..1353: mol_type = other DNA
atgatgtggcagtgccacctgagcgcccaggactaccggtactaccccgttgacggatactctctcctaaaaagattccccctccaccctctcacaggcccaagatgtcctgtgcagaccgttggccagtggctggagagcatcggattaccccagtacgaaaaccatctgatggccaatggattcgacaacgtgcagttcatgggtagcaacgtaatggaagatcaggacttgcttgagattgggattctgaactccggccatagacaaaggatcctgcaggccatccaactcctcccaaagatgaggccaattggtcatgatggctaccatcctacgtccgtggcagagtggcttgacagcatagaactgggcgactacactaaggccttcctgatcaacgggtacacctcaatggatctccttaaaaagatttgggaagtggagctgatcaatgtcctcaagattaatctgattggacaccgaaaacgtatcttggctagcctgggagatagattacacgacgatcctccacagaaacccccccggtcaataaccctgcggtcatccgtgtgtgaaatctggaccaaccagaatgcgggctttccatttagcgccatccatcaggttcacaatacaggcgactggggggagcccagtattacacttcgcccaccaaatgaggctactgcttccacccccgtccagtattggcagcatcacccagagaaactaatctttcagtcatgcgactacaaggccttctacctcggatccatgctaattaaagaactgaggggcactgaatctacccaggacgcgtgcgccaaaatgagggcaaatatacagaagtctacagagcagatgaagaaggtcccgacaataatcctgtcagtcagctacaaaggcgtaaagtttatcgacgctaccaataagaacataatagccgaacacgaaattagaaatatctcatgcgcggcacaggatcccgaggacctctcaacgtttgcctacatcaccaaagatctgaaaagcaaccatcattattgccacgtcttcaccgcttttgacgtcaatctggcttacgaaattatactcactctcggccaggcatttgaggttgcctaccagctagccctgcaggcacgaaagggagggcactcttctaccctcccggaatcgttcgaaaataaaccctcaaaaccaatcccaaaacctagagtatcaattcgaaagtctgtgcaaattgaccccagtgagcaaaaaaccctagccaacctgccatggatcgtcgagccaggccaggaagcaaaacgaggcatcaataccaaatacgagaccactatcttctag

SEQ ID NO: 179063 - DNA, 765 bp, synthetic construct
  misc_feature 1..765: note = Description of Artificial Sequence: Synthetic coding sequence
  source 1..765: mol_type = other DNA
atgcagggcgacgcccggcggcggcggaacgagaactacttcgacgatattccaaggtccaaactcgagcgccaaatggcccaaaccggcgactggggagaaccttccatcaccctgcggccgcctaacgaggcaacagcctcaacacctgtgcagtactggcagcaccatcctgagaaactcatatttcagagctgtgactataaagccttctacctagggtctatgctcattaaggaactccgggggacagagtcaacccaggatgcttgcgcaaaaatgcgagcaaactgtcagaagtcgacagagcaaatgaagaaggtccctactataattctctctgtgagttacaaaggcgtaaagttcatcgatgcgacgaataagaacataatagccgaacacgagattaggaacatctcttgtgcagcgcaggaccccgaggatttatctactttcgcctatattaccaaagatctgaaatccaatcaccactactgtcacgtttttactgcctttgacgtcaatctggcctatgagatcattcttaccctgggccaagcctttgaagtggcctaccaactcgccctccaggctcgaaaagggggccattctagtaccctccccgaatcttttgagaataagccctccaagcccattcctaagcctagggtctcaatcagaaaaagcgtggatttactgcatgctagtcataccgggcaggaacctagtgagcggcacaccgaagaagcactgcgtaagttttag

SEQ ID NO: 179064 - DNA, 1053 bp, synthetic construct
  misc_feature 1..1053: note = Description of Artificial Sequence: Synthetic coding sequence
  source 1..1053: mol_type = other DNA
gtgctgttccagggcagcaacgtgatggaggaccaggacctgctggaaatcggaatattgaacagtggacatagacagaggattctccaggccattcagttattgcccaaaatgcgcccgattgggcatgacgggtaccatcccacctcagttgccgaatggctagattcgatcgagctgggtgactacactaaagcattcctaataaatgggtatacaagtatggatctgctaaaaaagatttgggaggtggagctgattaatcaatcctcagtttgcgagatctggacgaaccagaacgctggctttccgttttcggccattcatcaagtccataatactggtgactggggggaaccttcaattaccttgaggccacccaatgaggcaacagcatctacacctgtacagtactggcagcatcatccagagaagctgatattccagtcctgcgactacaaagctttctacctggggtccatgcttattaaggaactgcgcggtacagaatctacccaagacgcgtgcgctaaaatgcgcgccaacattcagaagtctacggaacagatgaaaaaggtgccgacaattatactctccgtaagctataagggcgtcaagttcattgatgccacaaacaagaatattatcgcagaacatgagattaggaatatttcctgcgccgctcaggatcccgaggatcttagcactttcgcctacattaccaaggatctgaagtctaaccaccactactgccacgtcttcactgcattcgacgtaaaccttgcatatgagatcatcctaacactcggacaagcgtttgaagtggcgtaccagcttgctctgcaggctcgcaagggggggcattcatccacgctgcctgaaagtttcgagaataagccctccaaacccatccccaaacctcgagtgagtattagaaagagcgtcattgacccctcagagcagaagacgctggccaatctgccttggatcgttgagcccgggcaggaggcgaaacgggggattaacaccaagtacgaaacaacaattttttag

SEQ ID NO: 179065 - DNA, 2292 bp, synthetic construct
  misc_feature 1..2292: note = Description of Artificial Sequence: Synthetic coding sequence
  source 1..2292: mol_type = other DNA
agcttccaggagagctaccccaagaagcggaactacaccatggagatagtgcccagcgccagcctcgacaccttcccgtcagaaaacgaaaatttcctgtgcgacctgatggacaccgcagtgacgaagaagccatgtagccttgagattgcacgtgcgccttctccgcgaactgacaacgcaagtgaagtggcagtcactacacctggtacaagcaatcaccgcaacagttctaccgggccaacacctgactgcagtcctccgagtccagacacagccctgaaaaatatcgtgaaggtcatccgcccacaacctaaacagcggacatctatcgtgagttccttggattttcacagaatgaatcataaccaggagtattttgagatcaacacctctaccggttgcacctccttcaccgcttccccgcccgcttccccccccacgtcgagtgttggcacgacagaggttaaaaatgaggggactaaccatactgatgacctgtctcgacaggatgacaatgaccccccaaaggaatacgatcccggccagttcgctgggcttcttcacggcagcagccctgcttgtgagtcaccagaaaatccattccacctctacggaaagagagagcagtgcgaaaaggggcaggatgaagtgtcacttgctaacagcccgctgcctttcaagcaatcaccgattgagaacaactcggagccgctggtgaaaaaaatcaaaccaaaggtcgtgtcccgcacaatatttcataaaaagtccaatcagctggagaaccacacaatcgtgggcacaaggtctacacgatccggaagcaggaacggagaccagtgggtgatgaacgccgggggattcgtggagcgcgcctgcacactcggtagaatacggagtctgccaaaagccctcattgatatgcatctctctaagtccgtgtctaaatcagacagcgacctgatagcttacccaagtaacgaaaagactagtcgcgtgaactggagtgaaagttctaccgcagagcacagctctaaaggaaactcagaaaggacaccttccttcacttccgaatgggaagagatcgataaaatcatgagtagcattgatgtggggattaacaatgagctgaaggaaatgaacgggccacgttgccccgtacagaccgtaggccagtggctggaaagcataggcctgccccagtacgaaaatcacttaatggctaacggctttgacaatgtccagttcatgggaagtaacgttatggaagatcaggacttgttagaaattgggattctgaatagcggacacagacagcgaatcttacaggctatccagctgctgccgaagatgcgtccaatcggacacgatgggtaccacccgacaagtgtggccgagtggttggacagtattgagttaggcgactacaccaaggcctttctaatcaacgggtataccagtatggacctgcttaaaaaaatttgggaggttgagctgataaatgttttaaagatcaatctaatcggtcacagaaagaggatactggcatcgcttggcgaccgactacacgacgatcctccacagaagccccccaggtcgattaccttgaggacaggggattggggagaaccgtctattactcttcggccgccaaacgaggccaccgcttcaacccccgttcagtactggcaacaccatcccgaaaagctcattttccagtcttgtgattataaggcattctatctcggaagcatgctgataaaagaactgagggggaccgaatcaacccaggacgcctgcgctaagatgagggtgatgtgtgtgaaatctaccgagcagatgaagaaagtgcctaccattattctgtctgtgtcctacaaaggagtcaaattcattgatgccacgaacaagaacatcatagcagagcacgaaattagaaacattagttgtgctgcacaagacccagaggatctcagtaccttcgcttatattacgaaggacctcaaaagtaaccatcactactgccatgtgttcaccgcctttgatgtgaatttagcttatgagattatcctcactcttgggcaggcgttcgaggttgcgtatcagttagcactgcaggcacggaaaggaggccactctagcacgctacctgaatcgttcgagaacaagcccagcaagccaattccaaaaccccgcgttagcatcaggaaatccgtcgacttgctacacgccagccatactggccaagagcctagtgagagacacaccgaggaagctttaagaaagttttag

SEQ ID NO: 179066 - DNA, 1281 bp, synthetic construct
  misc_feature 1..1281: note = Description of Artificial Sequence: Synthetic coding sequence
  source 1..1281: mol_type = other DNA
atgatgtggcagtgccacctgagcgcccaggactaccggtactaccccgtcgatggatactcccttctgaagaggtttccgcttcatccacttactgggccaagatgcccagtgcagaccgtgggacagtggttggagtcaatcggtctgcctcagtacgaaaatcatctgatggctaacgggtttgacaatgtgcagttcatgggtagtaatgtcatggaagatcaggatctgcttgaaatagggatcctgaactccggtcaccgccagcgcattttacaggccatacaactccttcccaagatgcgacccatagggcacgacggataccatccgacaagcgttgctgaatggttggatagcatcgagttgggggattacacgaaagcgtttttaattaatggttacacttcaatggatttgctcaagaagatctgggaggtcgagcttatcaacgtcttaaaaatcaatctgatcggccatagaaagagaatcctagcttcccttggagataggctgcacgacgatccccctcagaagccaccgagatccataacacttcggacgggtgattggggagaaccttctattacacttcgtcctcccaacgaagctacagcctcaactcccgtacagtactggcaacatcaccccgaaaaactaatctttcagtcctgcgactataaagcgttctacctgggatcaatgcttatcaaagagctgagagggaccgagtccacccaggacgcgtgcgcaaaaatgagagctaactgccaaaaatcgacagaacagatgaagaaggtgcctaccataatcctgagtgtgtcatataagggtgtcaagttcattgacgccactaacaaaaatattattgcggagcacgagatccgcaatatttcctgcgcagctcaggatccggaagatctttcaacctttgcttacattaccaaggacctgaaaagcaaccaccactattgccatgtgtttactgcattcgacgtcaatttggcctacgaaattattctgactctgggccaagccttcgaggtagcctaccagctggctctgcaggctagaaagggaggacattcatccacgctcccggaatccttcgagaacaagcctagtaagcccatacctaagcctcgggtgagcattagaaagagtgtccagatcgacccgtcagagcagaaaacattggcgaacctgccgtggatagtggaacccggacaggaggcaaaacgcggcatcaacacgaagtatgagactaccattttttag

SEQ ID NO: 179067 - DNA, 1383 bp, synthetic construct
  misc_feature 1..1383: note = Description of Artificial Sequence: Synthetic coding sequence
  source 1..1383: mol_type = other DNA
atgatgtggcagtgccacctgagcgcccaggactaccggtactaccctgtcgacggttactctctcctcaagaggtttcctttgcatcccttgaccggacctagatgtccagttcaaaccgtggggcagtggctggaatccattggattaccacagtacgagaatcatctcatggctaacggctttgataacgtgcagtttatgggctcaaacgtcatggaggaccaagacctgctggaaatcggcattcttaattccggccacagacagaggattcttcaggctatccagctgctgccaaaaatgaggcccattggacacgatggctatcatcctacttctgtagccgaatggcttgattctatcgaactgggggactacacaaaagcttttctgataaatggctacacgtctatggatctgctgaaaaaaatatgggaagtggagcttatcaacgtcctgaagataaatctgatcggccacagaaagaggatcctggcatccctgggcgaccggctgcatgatgatcccccccagaaaccacctaggtcaataactctgcgggagccaagtggaaaccacacaccgcctcagctatctcctagcctttcccagagcacttacactaccggcggtagcctcgacgtcccccatatcatcatgcagggcgatgcccggagacgcaggaatgagaattactttgatgatatcccaaggtccaaattagaacgccaaatggcacagactggcgactggggggagccttctatcacactgagaccccctaacgaggccacagcttctacacccgttcaatactggcaacatcatcccgaaaaattaatcttccagtcttgtgattataaagctttttaccttggcagtatgttgatcaaagagcttagaggtaccgagagtacgcaggatgcttgcgccaagatgcgggccaattgtcagaagagcacagagcagatgaaaaaagtccctacaattatcttgtctgtttcatataagggagtaaaatttatagacgccaccaataagaatataatcgcagaacatgaaattaggaacatctcatgcgccgcccaagacccagaagacctttcaaccttcgcctatatcacaaaagatctaaaatccaaccaccattactgtcacgttttcactgcttttgacgtcaacctggcctacgagatcattctaacactcgggcaagcgtttgaggtggcctaccagctggctcttcaagcacgcaaaggggggcactcatcgacactgcccgaaagcttcgagaataagccctctaaacctattcccaagccacgggtgagtattagaaagtccgttcccttctgctttaaggcagatcggccgatttag

SEQ ID NO: 179068 - DNA, 2295 bp, synthetic construct
  misc_feature 1..2295: note = Description of Artificial Sequence: Synthetic coding sequence
  source 1..2295: mol_type = other DNA
atgctggcccaggagagctaccccaagaagcggaactacaccatggaaatcgtcccgtccgccagtttggatacattcccttccgagaacgaaaactttctgtgtgacctgatggacacggcagtcactaagaagccctgttcgctcgagatcgctcgggcgccttcacctcggactgataacgcctcagaagtggctgtcacaactcctgggactagcaaccacaggaacagctcgaccgggcccacgccagactgttcaccccccagccccgataccgccttaaagaacattgtgaaggtaattcgtccccagcctaagcagcggacctccatcgtctcctcacttgatttccacagaatgaaccacaaccaagagtatttcgaaatcaatacaagcacaggctgcacatcttttaccgcatccccacccgcaagcccacctacgagctcggtgggaaccacggaagtgaaaaatgaaggcactaaccatacagacgacttgtctcggcaagacgataacgatccgcccaaggagtacgaccccgggcagtttgctgggttgcttcacggtagctccccagcctgtgagtccccagagaatcctttccacctctacggcaaaagagagcagtgcgaaaaaggccaggatgaggtctcgctcgctaacagtcccctcccgttcaagcagtcccctatcgaaaataacagtgagcctttagttaaaaaaataaagcccaaggtggtgtcccgcaccattttccacaaaaaaagtaatcagctggaaaaccatacaattgtgggtactcgaagtaccagatcaggaagtcggaacggagatcaatgggtgatgaacgccggagggttcgtggagagggcgtgtacattgggacgaattcgcagcctaccgaaggcgctaatcgatatgcatctaagtaagagcgtttcaaaatctgattcagatctgattgcctatccgtccaatgaaaagacctctagggtaaattggtccgagtcttctaccgctgagcattcttcaaaaggcaatagcgagagaacgccctccttcaccagtgaatgggaggagatcgataaaatcatgtcttctattgatgtcggaatcaacaacgaactaaaagagatgaatggtccacgatgccctgtccagactgtcggccagtggctcgaaagtatcggactgcctcagtacgaaaaccatctgatggctaacgggttcgacaatgtgcaattcatggggtcaaatgtgatggaggaccaggacctcctggagattggtattctgaatagtggtcatcgccaacgcatcctccaggccatccagctcctgcccaagatgcgtccaattggccatgatgggtatcaccccacgtccgtggctgagtggttagatagcattgaactcggcgattataccaaggcgttcctgattaatggctacacatcgatggatctgctgaagaagatctgggaagtggaacttattaacgtgctgaagattaacctgatcgggcaccgaaagaggattctggcctccctgggcgatagactccatgatgacccacctcaaaagccccctaggtctattacactccgcactggggattggggggagccgagtattactctgagaccccccaacgaggcaaccgcaagtacccccgtgcaatattggcagcatcaccctgaaaaattgattttccaatcatgcgactacaaagcattttatctagggtccatgctgataaaagagttgagggggaccgagtccacccaggacgcctgtgcgaagatgcgagccaattgtcaaaaaagtaccgaacagatgaaaaaggtgcctacgatcattctgtccgtctcctacaagggagtgaaatttattgacgccactaacaaaaacataatagcagagcatgagatccggaacatctcttgcgccgctcaggaccctgaagatctgagtacatttgcctacatcacaaaggatctcaagagtaaccatcactactgccacgtgttcactgcctttgacgtgaaccttgcctatgaaatcattttaactctaggacaggcattcgaagtggcatatcagctcgcgttgcaggccaggaagggtgggcactcctctacccttcctgagagttttgaaaataagccgagcaaaccaattccaaagcccagagtatccatccgcaaatccgtggaccttctgcatgccagtcatacaggtcaggaacctagtgagcggcacactgaggaggccctccgtaaattctag

SEQ ID NO: 179069 - DNA, 3747 bp, synthetic construct
  misc_feature 1..3747: note = Description of Artificial Sequence: Synthetic coding sequence
  source 1..3747: mol_type = other DNA
atgggcaaggaccaggagctgctggaggccgcccggaccggcaacgtcgcactggtggagaagctcctgtctggacgaaagggcggcattctaggcgggggatccgggcctctcccactgtccaaccttcttagtatttggagggggcccaatgtgaattgcaccgacagtagcggttacactgccctgcaccatgccgcccttaacggccacaaggacatcgtcttaaagttgctccagtatgaggcatccactaacgtggctgataacaaaggctatttccctattcacctggctgcgtggaagggcgacgtggagatcgtcaagatcctaatccaccacggaccgtctcacagtagggtgaatgagcagaacaacgaaaacgaaacagctttacactgtgctgcccagtacggccattcagaggtcgtggcagtcctgctggaagagctgactgacccaaccatcaggaatagtaagctcgaaacacccttagacctggcagcgttgtatggcagactacgcgttgttaaaatgataatctcagcccaccctaaccttatgagctgtaacacccggaaacatacacccttgcacctggcggctaggaatggccataaggccgtcgtgcaggtgctgctggaagccgggatggatgtgtcttgccagactgagaagggctccgccctgcacgaggctgcactgttcggtaaagtcgacgtcgtgagagtcctcctagagaccgggatagacgctaatatcaaggacagtctcggaaggacggttctcgatattttaaaggagcatccttctcagaagtcgctgcagattgctaccctcctgcaagaatacttagagggagtcggtagatctaccgtcctggaggagccagtacaggaggatgccactcaagaaactcacatatcaagccccgtggaatcaccctctcagaaaaccaaaagtgagaccgtaacaggagaactctcaaagctacttgatgaaattaagctgtgccaggagaaggactacagctttgaggacttgtgccatacaatctccgaccactatctcgataatctatccaaaatttctgaggaagagctgggcaagaacggctctcagtcggttcgtacatcgagtaccatcaatctgagtcctggggaggtcgaagaggaggatgatgacgagaacacctgtgggccctctggcttgtgggaagcactgaccccatgtaatggatgtcggaatctcggcttcccaatgctggctcaggaatcctaccccaagaagagaaactatactatggaaatagtccccagcgcttcgctcgacacctttccatctgagaatgaaaattttctttgcgatctgatggataccgccgtcactaagaagccatgcagcttagaaatcgctcgtgccccttcaccgaggacagataacgcctctgaagtggcagttactacccctggtacctcgaaccacaggaactccagtactggtcccactcctgactgtagcccaccatctccagacacagctcttaaaaacatcgtgaaggtgattaggccacagcctaaacagaggacgtcgattgtgagttcactcgacttccaccgcatgaaccacaatcaggagtactttgaaatcaacacaagcaccggctgcactagctttacggcctctcccccagcaagtccaccaacctcaagcgttggaactacagaggtgaaaaacgaaggcactaaccacacggatgacttgtcgagacaggacgataacgatccccccaaagaatatgaccctggacagtttgctgggttactgcatgggagctctccggcatgtgagagtccagaaaatccattccacttgtacggaaaacgagaacagtgcgagaaagggcaggacgaagtttctctagcaaactctcctcttccctttaaacagtccccaattgagaataatagtgagccactagtgaaaaagatcaaaccgaaggtggtatcaagaactatctttcataagaagagcaatcagctagagaaccatactatagtgggcacacgctctactagatcaggctcaaggaatggggaccaatgggtaatgaatgctggaggcttcgtcgagcgcgcctgtactcttggccgcattagatcacttccgaaagcgctgattgacatgcatctcagtaagtcagtgtcaaaatctgattctgacctgattgcctatccaagcaatgagaagactagtcgggtcaactggtccgagagttctaccgccgaacattcctccaaaggaaactcagagcgaaccccaagtttcacttccgagtgggaagaaatagacaagatcatgagttctatcgatgtgggtatcaacaacgagcttaaggagatgaatggcgagacgacccgcccacgctgccctgtacaaaccgtgggtcagtggttggagagcattggcctgcctcagtacgagaaccacctaatggccaatggattcgataacgtgcaattcatgggctccaacgtcatggaagaccaagatctgctagagatcgggatcctgaactcaggtcaccgccagaggatactgcaagccatccagctgttacccaaaatgcgtcctattggccacgacgggtaccacccaaccagcgtggccgaatggctggactcaattgaattgggtgactatacaaaggcgtttctgattaatggctacaccagtatggacctgcttaaaaaaatttgggaggttgagttaattaacgtactgaagatcaacctgattggacaccggaagagaattctggcttccctcggagaccgccttcacgatgaccctcctcagaagccgccccggagcatcacccttcgggagcctagcggtaatcatactcccccccaacttagcccctccctgagtcagtcaacgtacaccacaggggggtcacttgacgtcccgcacatcataatgcagggagacgcacggagaagaaggaatgagaattatttcgatgatatacctcgcagcaagcttgaaagacagatggcgcagacgggtgattggggtgaaccctcaattacactgcgccctccaaatgaagctaccgcatccaccccggttcagtactggcagcaccatcccgagaagctaatttttcagtcttgcgactacaaggccttctatctgggtagcatgctcattaaagagctccgtggcacggagtcaacccaggatgcctgcgccaaaatgcgagccaattgtcagaagagcacagagcaaatgaagaaggtgccgacaatcatattgagtgtctcttacaaaggggtcaagtttatcgatgctacgaataagaatataatcgcagagcacgagatcagaaacattagctgtgccgctcaagacccagaggatttgtccacctttgcatatattactaaggacctcaaaagtaaccaccactattgtcatgtgtttacggcgttcgatgttaacttagcgtatgaaattatcctgacgttaggccaggcgttcgaagtggcatatcagctggctctgcaggcgcgtaaaggtgggcactcaagcactttgcccgaaagcttcgagaataaaccttccaaacccatccccaaacctcgagtcagcatccgcaagtccgttgacctgttgcatgcttctcacactggccaagagccttctgaacggcataccgaagaggctcttcggaagttctag

SEQ ID NO: 179070 - DNA, 1074 bp, synthetic construct
  misc_feature 1..1074: note = Description of Artificial Sequence: Synthetic coding sequence
  source 1..1074: mol_type = other DNA
atggccaacggcttcgacaacgtgcagttcatgggcagcaacgtgatggaggatcaggatctgctggaaataggtattcttaactccggccatcgtcagcgcatcctgcaggcaatccaacttcttccaaagatgagacctattggccacgatggatatcaccctaccagtgtcgctgagtggctagatagtatagagctcggggactataccaaggcatttttgattaacggctatacctcaatggacttactgaagaagatctgggaggtagagctaattaaccagtcaagtgtatgcgaaatttggactaatcaaaacgcggggtttcctttcagcgccattcaccaggtgcacaataccggggactggggagaacctagcattactctacgcccccccaacgaagccaccgccagcactccagtgcaatactggcaacaccatccagaaaaattgatattccaatcttgcgattataaagcattttaccttggttccatgctcatcaaagaattgcgcggaaccgagtctacgcaggatgcttgcgcaaaaatgagggctaactgccaaaaatcaacagagcagatgaagaaagtgccgactattattttgagcgtaagttacaaaggcgtgaaattcattgacgccaccaataaaaacatcatcgcagaacacgaaatccgcaacatttcatgtgccgcccaggaccccgaggatctttccactttcgcatacatcaccaaggaccttaaatccaaccaccactactgtcatgtgttcaccgcttttgatgtaaacctcgcttacgaaatcattctgaccctgggccaggccttcgaggtcgcctaccaactggctctgcaggctcgtaaaggtggacactcctcaacattacccgagagctttgagaataaacctagcaagccaatcccaaagccacgcgtcagcattcgaaagtctgtgattgacccctcagaacagaaaacacttgccaacttaccatggatcgtcgaacctggccaggaggccaagaggggcataaataccaagtacgaaacaactattttctag

SEQ ID NO: 179071 - DNA, 1533 bp, synthetic construct
  misc_feature 1..1533: note = Description of Artificial Sequence: Synthetic coding sequence
  source 1..1533: mol_type = other DNA
atgatgtggcagtgccacctgagcgcccaggactaccggtactacccagtcgacggttacagcttactgaagcgatttccgcttcatccactgacaggaccacgatgccccgtccaaaccgtaggacagtggctagagagcattggcttaccacaatatgagaatcatctgatggctaatggctttgacaacgttcaattcatggggagcaacgtcatggaggaccaggacctgctcgaaattgggattctcaacagcggtcacaggcaaagaattctgcaagcaatacagcttctgcccaagatgaggccaatcggccatgatggctaccacccgacatccgtggccgagtggttagattctatcgagttaggcgactacaccaaagctttcctgattaacggctacacatctatggatctactcaaaaagatatgggaggtcgagctcataaacgtgctcaagatcaacttgatcggccacaggaagcgcatcctggcatccctgggagacaggctgcatgatgatcccccgcagaagccgccaagatcaattactctgagggaaccctccggtaaccacacaccccctcagttaagtccatccctgtctcaatccacctacactacaggcggctctttggacgtgccccacattatcatgcagggagatgcccgccgtcgtcgaaacgaaaactacttcgatgatatcccacggagtaaactcgaaagacagatggctcagtccagtgtctgcgagatctggacaaaccaaaacgccgggttccccttttccgcgatccatcaggtccataacactggcgattggggtgaaccaagcatcactctcagacctccaaatgaggcgacggccagcacaccagtgcaatattggcagcatcatccagaaaaactcatcttccaatcatgcgattacaaagccttttacctggggtcgatgctcatcaaggaactgagaggcactgagagtacacaggatgcgtgtgctaagatgcgtgcgaattgtcagaagagcactgagcagatgaaaaaggtgccaaccataatcctctccgtctcatacaaaggggttaagttcatcgacgccactaataaaaacatcatcgctgagcatgagattaggaatatttcatgtgcagcccaggatcctgaggacctcagcacttttgcatatatcactaaagacctcaaatccaaccaccactattgtcatgtgttcaccgcttttgatgtgaatctggcctacgaaattattctaacgctcgggcaagctttcgaggtggcataccagctggccttgcaggcacgtaaaggtggacattcttccaccctgccggagtcattcgaaaataaaccaagcaagcctatccccaaaccccgcgtgtccattagaaaaagtgtgcagattgacccaagtgaacagaagacactcgccaatctcccttggatagtggagcccggccaggaagccaagagaggaattaatactaaatacgagactaccatcttttag

SEQ ID NO: 179072 - DNA, 1245 bp, synthetic construct
  misc_feature 1..1245: note = Description of Artificial Sequence: Synthetic coding sequence
  source 1..1245: mol_type = other DNA
atgatgtggcagtgccacctgagcgcccaggactaccggtactacccagtggacggttactctctgttaaagcgctttcctttacatccattaacaggccctagatgcccagtgcagacagtgggacagtggttagagtccattggtctaccacagtacgagaatcatctgatggcgaacggatttgacaacgtccagtttatggggagtaatgtcatggaggatcaggacttattagagatcggaattttgaactccggtcatagacagcgtatcttacaggcaatccaactgctaccgaaaatgcggcctatcggccatgatgggtatcacccaacgtctgtggcggagtggttggactctatcgagctgggagactacactaaagccttcctgataaacggttacacctcaatggatctgctgaagaagatctgggaggtggagctgatcaacgtgctgaaaatcaacctcatcggacatcgcaaacgcatcttggcttcactgggagaccgcctacacgacgatcctccacagaagccgccgcggagcataacacttcgtactggtgattggggggaaccctctattaccctcaggccgcctaacgaggccactgcatccactccagtccagtactggcagcatcacccagagaagctcatcttccagtcctgtgactacaaagcattttatctaggctcaatgctgattaaggaactcagggggactgagtcaacccaggacgcctgtgcaaagatgagggccaattgccagaagagtactgagcagatgaaaaaagtgccaaccattattcttagtgtgagctacaaaggcgtcaagttcatcgacgcaaccaacaagaacattatcgccgagcacgaaatcaggaacatatcgtgcgctgcgcaagaccctgaagacttatcaacctttgcttatattacaaaggacttgaaatcgaaccaccattactgtcacgtgtttacagccttcgacgtgaacctagcgtatgaaattatactcacgctcggtcaggcttttgaagtcgcctaccaattggctctgcaggcccgcaagggcgggcactcatccactctacccgagtctttcgagaacaaaccaagcaagcctatccctaaaccccgggtttccattcgcaagagcgtcgatctgcttcacgccagtcacaccggccaggagccctctgaacggcatacagaggaagcccttaggaaattttag

SEQ ID NO: 179073 - DNA, 1353 bp, synthetic construct
  misc_feature 1..1353: note = Description of Artificial Sequence: Synthetic coding sequence
  source 1..1353: mol_type = other DNA
atgatgtggcagtgccacctgagcgcccaggactaccggtactaccccgtggatggctactccctgttgaagcgattccctctgcatcctttaactggcccgcgctgcccggtccagactgtgggccaatggttagagtctattggtcttccacaatacgagaatcacctaatggctaacggtttcgataacgtgcagttcatgggctctaatgtgatggaagatcaggacctcctcgagatagggatcctcaattcagggcacagacagcgaatcctgcaggccattcagctgctccccaaaatgagaccaattggccacgacggttatcatcccacgagtgtggccgagtggctggactctatagaacttggagattacactaaagcttttcttatcaatggctatactagcatggacttgctcaagaaaatctgggaggtggaactgattaacgtgctgaagataaatctgatagggcaccgtaaacgcatcctggcaagcctgggcgacaggctgcacgatgatcctccacagaagcctcccaggagtatcactttgagaagttccgtgtgtgagatttggaccaatcagaatgctggattcccattttcagcgattcaccaggtgcacaatactggtgactggggagagccctcaattactctgaggccccccaatgaggcaacggcatccacacccgtgcagtattggcagcatcatccagaaaaattgatattccagagctgcgattacaaagccttttacctgggcagtatgcttatcaaagagctgcgcggaaccgaaagcacacaggatgcctgtgccaaaatgcgggctaattgtcaaaagtctacagagcagatgaagaaggtgcccactatcattctatccgtgagctataaaggggtgaaattcatcgacgctaccaacaagaatataattgcagaacacgaaatccgtaacatatcctgcgccgctcaagatcccgaggaccttagcaccttcgcttacatcaccaaggatctcaaaagtaaccaccattactgtcacgttttcaccgctttcgatgtcaatcttgcctatgaaataattctaaccctcggccaggcatttgaagtggcttaccagctcgcactacaggccagaaagggtgggcattccagcaccttgccggaatcttttgagaataagccatctaagcccatcccaaagcccagggtctccatccgcaagtccgtccagattgacccttctgagcagaagactctggccaatctcccatggatcgtggagccaggacaagaagccaaacggggcatcaatacaaagtatgagacaaccatcttctag

SEQ ID NO: 179074 - DNA, 1185 bp, synthetic construct
  misc_feature 1..1185: note = Description of Artificial Sequence: Synthetic coding sequence
  source 1..1185: mol_type = other DNA
atgggcccccggtgccccgtgcagaccgtgggccagtggctggagtcgataggcctccctcagtacgaaaaccaccttatggctaatggcttcgacaacgtgcagttcatgggttctaatgttatggaagaccaagacttgctcgagatcgggatcctgaattcaggccaccggcaaaggatactgcaggctatccagcttttacctaagatgagaccgatcggacatgacggttaccaccccacctccgtggcggaatggctcgacagcatcgaactgggggattacaccaaagcattcctgatcaacggctacacttccatggatctgctgaaaaagatctgggaagtggaactgatcaatgtactgaagatcaatctgatcggacatcggaagagaattcttgcaagtcttggagacagactgcatgacgaccctccccagaagccccccaggtctatcaccctgcgtaccggagactggggcgagccgagcattacactgcgaccccctaacgaagccacggcgtccactcccgtgcagtattggcagcaccatcccgaaaagcttatctttcaaagctgcgattacaaggccttttatctcgggagtatgcttatcaaagagcttcgtggaaccgaaagtacacaggacgcctgcgccaagatgcgggctaattgccagaagtccaccgagcagatgaagaaggtccccacgataatcctttcagtcagctacaaaggcgttaaatttatcgatgcaaccaataaaaatatcatcgcagaacacgagatacggaatatcagttgcgccgcccaagatcctgaagacctgagtacattcgcatatataactaaggatttgaaaagcaaccaccactattgccatgtattcacagctttcgacgtgaatcttgcgtatgagattatattaacactcggtcaggctttcgaggtggcgtaccaactggccctacaagcaagaaaaggaggccattccagtactttgccagaatcatttgaaaataaaccttccaagcccatcccaaagccacgagttagtatacgtaagtcagttattgacccaagcgagcagaagaccctagcaaacttaccatggattgtagaaccaggccaggaagcaaaaagaggcattaataccaagtacgagactaccatcttttag

SEQ ID NO: 179075 - DNA, 1254 bp, synthetic construct
  misc_feature 1..1254: note = Description of Artificial Sequence: Synthetic coding sequence
  source 1..1254: mol_type = other DNA
atgagcacccggtaccaccaggccgccagcgacagctacctggagttgctgaaggaggccacaaaacgcgatttgaatctaagcgacgaagatggaatgactcctacgttgcttgctgcctaccacggaaacctcgaggcattggaaatcatctgctcacgaggtggggacccagatagatgtgatatctggggaaatactccactgcactttgcggcaagcaatggacacgcgcattgtgtgtcattccttgtgaattttggtgcaaatattttcgcgttggataacgacctgcagacaccattagatgccgccgcatcccgagagcaaaacgagtgcgttgctctgctcgataaggccgctacagcgcaaaatatcatgaaccccaagaaagtgactcgactgaaggaacaagctcagaagaacgctcgtcgacagattaaggagtgcgagcgccttcaggagaaacaccagaacaagatggcccacacgtacagcaaagaggagtccggtactctgtcatctagcaagggtacgttctccagaagctctccgtccaatgcctctgctcccggcaccttcggtagcctgagtaagggcataaaagatacctttaagattaaattcaagaagaataaggacacagccgaacaggttggtaaggagggaaggtccggacagcggaacgtaatggaggtgtttagggaagaggaagaagactccttctcaggagacttcaaggagaagctgcagctctctgctgaggaagatggatccgttcatcatgagagcatcctgaaccgccccggtttaggctctatcgtgttccgcaggaatcggatcagcagccccgaagacatctccgatagcaagagagagttcggctttaagctgccctccgaacttttacaaagacagggggccagcgaagcggacgaaggggccgccgacgaagaaggagaggaaaatggcctaaaggacgatttgccatgggatgacgacgaagtagagtgggaagaggatgtggtggatgccactcccttggaagtatttcttctctcccagcacctcgaggagtttcttccgatcttcaaaagggaacagattgatttggaagccctgcttctgtgttcggacgaagacttacagagcattcagatgcagttgggccccagaaagaaggttttaaacgccatcaatagacgaaagcaagtgctgcaacagccggggcaattggtcgacacatctctgtag

SEQ ID NO: 179076 - DNA, 7992 bp, synthetic construct
  misc_feature 1..7992: note = Description of Artificial Sequence: Synthetic coding sequence
  source 1..7992: mol_type = other DNA
atgcccaagggcggctgccccaaggccccccagcaggaggagctgcccctgagttctgacatggtggaaaaacagaccggaaaaaaggataaggacaaggtcagtctcaccaaaactcctaaactggaaagaggcgacggcggcaaagaggttcgagaacgtgcaagtaagagaaagttaccctttaccgctggcgctaacggcgagcaaaaagattcggacacagaaaaacagggtcccgagcgaaagagaatcaagaaggaacctgtgacaagaaaagcagggctgctttttggaatgggcctgtctggcatccgtgctggctaccccctcagcgaaagacaacaggtcgcactgctcatgcaaatgacagctgaggaatcagctaacagtcctgtggatacgacccccaaacacccgagccaaagcactgtctgccagaaaggaactccaaactcagcctccaaaaccaaggataaagtaaacaaacggaatgagcgcggagagacccgtttacatcgcgccgccattcgtggtgacgcgcgccgcatcaaggagctcataagcgaaggagccgatgtgaatgttaaggacttcgccgggtggacagcactgcacgaagcatgtaaccgtgggtactacgatgtggctaaacaactactggcagccggcgccgaggtgaataccaaaggcctggatgacgacaccccgctgcatgatgctgctaataatgggcactataaagtggtcaaactcttgctgcgatacggtggcaacccccagcagtctaacagaaagggggaaacaccgctgaaagtcgccaattcacctactatggtcaacctcttgctgggaaagggcacatacacaagcagcgaggagtctagcaccgaatcatctgaggaagaggacgcaccatcgttcgcccctagttcttccgtggatggcaataatactgatagcgagtttgaaaaagggctgaagcataaagccaaaaatccggagcctcagaaggccacagccccagtgaaagacgaatatgagtttgacgaagatgatgaacaggacagagttccgcctgtcgatgacaagcatttgcttaaaaaagactaccggaaggagacaaagtctaatagctttatcagtatacctaagatggaagtcaagagttacacaaaaaacaataccattgcgcccaagaaagcatcccacagaatactctcggacacatccgatgaagaggatgctagcgtcaccgtcgggacaggggaaaaactgaggttgtctgcccacaccatcctgccaggctctaagacaagggagccctccaacgctaagcagcagaaggagaaaaataaagtgaagaagaaaagaaaaaaagaaaccaagggtagggaagtaagatttggaaaaagatcggacaaattctgttcttctgagtcagagtctgagtcatccgagtcaggggaagacgacagagattctttaggaagttctggctgtctgaaggggtcaccactggtcctgaaggacccatcactattttcatccctcagtgcaagctctaccagctcacatgggagttctgccgcacagaagcagaatccctcacacacagatcagcacaccaagcactggcgcacagacaactggaaaactatttcctcgccagcttggagcgaggtcagttctctgtccgattctactagaacgcgccttacttctgagtccgactactcaagtgaaggatcatcagtcgaatcactcaagccagtgcgaaaacgccaggagcaccgcaagagggctagtttaagtgagaaaaaatccccctttctctcttcagcagagggtgcagtccccaagctggataaggaggggaaggtggtgaagaagcataagactaaacacaagcataagaataaggagaaaggccagtgctcgattagccaggaactcaaacttaaaagtttcacatatgaatacgaagactcaaagcagaaaagtgataaagcaattctgcttgagaacgatctcagcacagaaaacaagctcaaggtgctgaagcatgaccgggatcatttcaaaaaagaggagaaactgtccaagatgaaactggaggaaaaggaatggctgttcaaggatgaaaaaagcctgaagcggatcaaggatactaacaaagatattagcaggagctttagggaagagaaagacagaagtaataaggcagagaaggagaggtcactgaaggagaaaagccctaaagaagaaaagcttaggctctataaggaagaacgcaagaaaaagtccaaggacagacccagtaaactggaaaagaaaaatgatttgaaagaggataagattagtaaggagaaggaaaagatcttcaaagaggacaaggaaaagctgaaaaaggagaaggtgtatcgggaagattctgcctttgacgagtattgcaacaaaaaccagtttcttgagaacgaggacaccaagtttagcctcagtgatgaccaacgagacagatggttctccgacctcagtgatagtagttttgacttcaaaggagaggattcatgggactccccagttacggattaccgcgacatgaagagcgactctgtggcaaaactgatcttggagacagtgaaggaggactcaaaggagaggagaagagattcccgagccagggaaaagcgcgattacagagaaccgtttttcaggaaaaaagatcgcgactacctggacaaaaatagcgagaaacggaaggaacagaccgagaaacacaaatctgtaccaggctatctttctgaaaaggacaagaaaagacgcgaatcagcagaagccggcagagaccgcaaagacgccttggaaagttgcaaagagagacgggacggtagggccaagcctgaggaagctcatcgcgaagagctgaaggaatgcggatgtgagtccggctttaaagacaaatcagacggcgacttcggtaagggcctagagccctgggaaaggcatcacccagcccgagagaaagagaagaaggatggcccagataaggagcgtaaagagaagaccaagcctgagcgctacaaggagaaatcatctgacaaggataagtcagagaagagtattttagagaaatgtcaaaaggacaaagagttcgataagtgttttaaggaaaaaaaagacaccaaagagaagcataaagatacacacggaaaagacaaagagaggaaggcctccctggaccaaggtaaggaaaagaaggagaaggccttccctggaatcatttcagaagatttcagtgaaaaaaaggacgacaagaaaggcaaagaaaaatcctggtatattgccgacatatttacagacgagagcgaggatgacagagattcctgtatgggaagcggattcaaaatgggcgaagcctctgatctgccacggactgatggtctccaagagaaggaggagggtcgagaggcttacgcctctgaccgacaccgcaagtcttctgataaacaacaccctgagcgacagaaggataaagaaccgcgagacagacgaaaggaccggggcgcagctgacgcaggccgggataagaaagaaaaggtgtttgagaaacacaaagagaagaaagataaagagtcaacagagaaatataaggaccggaaagatcgggcctcagtcgactcaacgcaagacaagaagaataagcagaaacttccagaaaaagccgaaaagaaacacgccgccgaggataaggcgaaatccaagcataaagagaaatccgacaaggaacattctaaagaacgcaagtctagcagatctgctgatgccgagaagtcactgctcgaaaaactcgaggaagaggctctgcacgaataccgggaagacagcaacgataagatctcagaggtgtcctccgatagttttaccgatagagggcaagaaccgggcttaacagcgtttctggaggtgagcttcaccgaaccccccggggacgataaacctcgtgaatcagcctgtctgcccgaaaagttgaaggaaaaggagcgccacagacactcttcatcatcatccaaaaaatcacacgacagggagcgggcaaaaaaggaaaaagcagaaaagaaggagaagggagaggattacaaagaaggaggcagcagaaaagactcagggcagtatgagaaggactttctcgaagcagatgcttacggtgtttcttataacatgaaagctgacatcgaagacgagctggacaagaccattgagttgttcagtaccgagaaaaaggacaagaacgactccgagcgagagcctagtaagaagatcgagaaagaacttaagccttatggttctagtgcaataaacattcttaaagaaaagaagaaacgtgagaagcacagggagaagtggagggatgagaaggagcggcacagggatcgccacgcagatgggctcctcagacatcacagagacgagctgctgcggcatcatagggacgaacagaaaccggcgacgcgagacaaggattcgcctccaagagtcctgaaggataagtcaagagatgaaggaccccgactaggcgacgccaagttgaaagaaaagtttaaagatggcgccgagaaggagaagggggacccagtcaaaatgtctaatggcaacgacaaagttgctccctctaaagatcccgggaaaaaggatgcgagacctcgggagaaactgctgggagacggcgacctgatgatgaccagctttgaacggatgctatcacagaaagacctcgagatcgaagaacggcacaaaaggcataaggaacggatgaagcagatggaaaagctgcgccataggtcaggcgatcctaagctgaaagagaaggccaagccagccgacgacggaaggaagaagggtttggatatcccagctaaaaagcctcctggtcttgaccccccgtttaaggacaaaaagttaaaggagagcactcccatacctcctgccgctgagaacaaactgcacccagcgtctggcgccgatagcaaggattggctcgccggaccacacatgaaggaggtcctcccagcaagccctcgaccggatcagagcagacctactggagtgccaacccctacctctgtgctatcttgtcctagttatgaggaagtcatgcacaccccccgcacacctagctgctcagccgacgactatgctgacctggtgtttgactgcgcggatagccagcatagcactcccgtgcctacagctcctacatctgcatgctctccttccttttttgaccgtttctctgttgcatcttccgggttgtcagagaacgccagccaggctcccgcgcgtccactgagtacaaatctgtacaggtcagtatctgtcgatattagacgaacccccgaagaggagtttagtgttggagacaagctgtttaggcagcaaagtgtccctgccgccagttcctatgactccccaatgcccccaagcatggaggaccgcgctccattgccccctgtgcctgctgagaaatttgcatgtctcagccctggttattacagtccagattacggactaccctcaccaaaggtcgacgccctgcattgcccccctgccgcagtggtcaccgttactcccagccctgaaggtgttttcagtagcttacaggcaaagccctccccgagccctagagcagagttgctggtgccatccttagagggtgccttgccgcctgacctcgatacctcggaggatcagcaggctaccgccgcaatcataccccccgagcctagttatctggaacctctggacgaaggcccatttagcgctgtgattactgaagagcccgtggagtgggcacacccaagcgagcaggctctcgcctccagcctcattggggggacctctgagaatcccgtctcatggcccgtggggtctgacctgctgctgaagtctcctcaacgttttcccgagagcccgaaacgtttctgcccagctgatcccctgcactccgctgcaccggggcctttctcagcctcggaagccccctaccccgccccacccgcatccccagccccctatgctttgcccgttgccgagcccggccttgaagatgtcaaggacggcgtcgatgccgtgccagctgcaatttcaacgagcgaagctgccccatatgccccaccttcagggctcgagtcttttttttccaactgcaaatcgttgcccgaagccccgctggacgtcgcacccgagcccgcctgcgttgccgccgtggcccaggtcgaggccctgggccctctggagaatagcttcctggacggttcgaggggactgtcccatttgggacaggtggaaccagtgccatgggctgacgcattcgcggggccagaagacgatctggacctgggaccattttctttacccgagttgccccttcagaccaaggatgcggcagatggcgaagctgaacctgtggaagagagccttgcacccccagaggagatgccccctggagcccccggtgtgattaatggcggcgatgtctccacagtggtggccgaggaaccaccagccctcccccctgaccaagccagtactaggctcccagcagagctggagcctgaaccctctggagagccaaaacttgatgtagccctcgaagccgcagtagaggccgagactgtccctgaagagcgcgctagaggagacccagatagtagcgtggaaccagccccagttcccccggagcaaaggccactcggatcaggtgaccagggtgcggaggcagaggggccgccggcagcaagcttgtgcgctccggatggtcctgcgcctaatacagtggcacaggcgcaggcagcagacggcgccgggcccgaggatgataccgaggcctccagggctgccgccccggctgagggtcctccgggaggcatccagcccgaagctgccgagccaaagccaaccgcggaggcccccaaggcgccgagggtagaagaaattccccaacggatgacacgcaatcgggcacagatgctcgccaatcagtctaagcaaggccctccaccaagcgagaaagagtgcgccccaacccctgccccagttacacgggccaaggcccggggctccgaggacgacgacgcgcaggcacagcaccccaggaaacggagatttcaacggtcgacacaacagcttcagcaacagttgaatactagtactcaacagacaagagaggtcatccagcagacactggctgccattgtggatgctatcaaactcgatgctatcgaaccctaccatagtgaccgagctaatccttacttcgaatatcttcagattcgcaaaaagatcgaagaaaagaggaagattctctgctgcattacaccccaggccccccagtgttacgccgagtatgtaacctacactggctcttatctgctcgacgggaagccgctctcgaaactgcatatacccgttatcgctccaccaccatcccttgcagaaccactgaaggagttgttccggcagcaggaggcggttagaggcaaactgcggttgcagcactccattgagagggagaaacttattgtgtcgtgcgagcaagagatcctgcgagttcattgtagggccgctcgaacaatagcaaaccaggccgtcccattcagcgcctgcaccatgttgttggatagcgaagtgtataacatgccacttgagtcacagggcgatgaaaacaagagcgttagagataggttcaatgcacgtcagttcatcagttggctgcaggatgtggacgataagtatgatcgaatgaaaacttgtttgttgatgcggcagcaacacgaagcagcagccctgaacgctgttcagcgaatggagtggcagctgaaggttcaagaacttgatcctgctggccataaaagtctgtgcgtgaacgaagtgccttcgttttacgtgccaatggtggacgttaacgatgactttgttctactgccagcttag

SEQ ID NO: 179077 - DNA, 1836 bp, synthetic construct
  misc_feature 1..1836: note = Description of Artificial Sequence: Synthetic coding sequence
  source 1..1836: mol_type = other DNA
agcatccccaagatggaggtgaagagctacaccaagaacaacaccattgcacctaagaaagccagtcatcgcatcttatccgatacgtccgatgaggaggacgcatcggtaacagttggtacaggagaaaaactgaggctgagcgcccacaccattctgccgggatcaaagactcgggagccctccaacgcaaaacagcaaaaggagaagaataaggtgaagaaaaaaaggaagaaggaaactaagggccgcgaagtcaggttcgggaaacggtcagacaagttttgctcatcagagtctgaaagtgagtcctctgaatctggtgaggacgaccgcgactccctcggttcttcgggttgcttgaaggggagtcctctggtgctaaaggacccctcactgttctcttccctcagtgccagctctacttccagtcacggatcctctgcggctcaaaagcagaaccctagccacacagatcagcacacgaaacactggcgcaccgacaattggaagaccatcagctcacccgcctggtccgaggtgtcatcgctgtcagactccactagaactcgactgacatccgagagtgattactccagtgagggaagctccgtggagagtcttaaacccgtgcggaagcggcaggagcaccggaagcgcgccagcctgagcgaaaaaaagtctccctttttgtcgtcagcagagggcgctgtgccaaagctggataaggaaggcaaggtggtcaagaaacataagaccaagcacaaacataaaaacaaggagaagggccagtgtagcatcagccaggagcttaagttgaaatccttcacctatgaatatgaggatagcaagcaaaaatctgataaagctattctgctggaaaacgatctctccactgagaataaacttaaggtgctgaagcatgatcgagatcactttaagaaagaggaaaagctctcgaaaatgaagttggaagagaaagagtggcttttcaaggacgagaaatccctgaaaaggatcaaagacaccaataaggatatctcaaggtcatttagagaagagaaggatcggagcaacaaggcagaaaaggagaggagcctgaaagaaaagtctcccaaggaagaaaagctgagactgtacaaggaggagaggaagaagaagtcaaaggaccggccaagcaagctcgagaagaagaatgacctcaaggaagacaaaatctccaaggagaaagagaagattttcaaggaggataaggagaagctgaaaaaggagaaggtttaccgagaggacagcgcctttgacgagtactgtaacaagaatcagttcctagagaatgaagacactaagttcagcttgtcggacgaccaaagagaccgatggttctcagatctcagcgacagcagctttgactttaaaggtgaagatagttgggattcacccgtcacagattatcgtgacatgaaatccgatagtgttgctaagctaatcctggagaccgtgaaggaggattccaaagagcgcagacgagacagccgtgctcgcgagaagagggactatcgagagcctttttttcggaaaaaggatcgcgactatctggacaagaatagtgagaaacgcaaggagcagaccgaaaaacataaatccgttcctggttatctgtcagagaaacatgaaaggcgcagaagacgaatggcccccattagaaaaggaaggaggcggcagaatcagaaggacactaaaagaaatcctgtcacccgcacaaaggtgcgaaatcagagttggaaaaatgtgaggcgcaccaaaaaccttatcaatgtgctcaaaaggaaaaagtag

SEQ ID NO: 179078 - DNA, 7992 bp, synthetic construct
  misc_feature 1..7992: note = Description of Artificial Sequence: Synthetic coding sequence
  source 1..7992: mol_type = other DNA
atgcccaagggcggctgccccaaggccccccagcaggaggagctgccactgagtagtgacatggttgagaagcagactggcaagaaagataaagacaaagtctctttgacaaagacccccaaactcgagaggggcgatggaggaaaagaagtccgtgagcgagcatccaagcgcaaacttccgttcaccgccggcgccaatggagagcagaaagactctgataccgagaaacagggccccgagcgcaaacgtatcaagaaggagccggtgactcggaaagcgggactacttttcggtatgggactttccgggattagagctggttaccctctgagcgaacgccagcaggtggcactcctaatgcagatgacagctgaggagagcgctaattcgcctgtggacaccactcccaaacatccgagccagtcaaccgtctgtcagaagggtacccctaactcagcgtctaagacaaaggacaaggttaacaaacgaaacgaacgaggggaaacgcggctgcatcgggcagcgattagaggcgacgctagacgaatcaaggaactgatctccgagggtgctgatgtgaacgttaaggacttcgccggttggactgcgctacacgaggcctgtaaccgggggtactatgacgtggctaagcagcttctagctgctggtgcagaagtgaacactaaggggcttgacgacgatactcccctgcacgatgcggctaacaacggacactacaaggtcgtgaagcttctacttagatacggtggaaacccccagcagagcaataggaagggagaaactccacttaaagtagccaattctccaactatggttaaccttttactggggaaaggtacatacacaagctctgaagagtctagtacggagtcttccgaggaggaagacgcgccgtctttcgctccctcttcttccgtcgatgggaataacaccgactccgaattcgaaaagggtctcaaacacaaggcaaaaaacccagagcctcagaaagcaactgccccagtcaaagacgaatatgagtttgatgaggacgacgagcaagatcgggtcccacccgtggacgataaacacctactgaagaaagattatagaaaggagaccaaatctaacagcttcatatctatccccaaaatggaagtgaagtcatatacaaaaaacaacacaatcgccccgaagaaggcttctcataggatactttcggatacttcggacgaggaagatgccagcgtgacggtgggtaccggtgaaaagttgcgactgtcagctcacactatcttacccggatctaaaactagggaacccagcaacgccaagcaacagaaggagaagaacaaagtcaaaaaaaaacggaaaaaggaaacaaagggccgcgaagtgagattcggaaaaagatctgacaagttttgcagttccgaaagcgaatctgagtcctcagaatccggcgaagatgatcgggattctttgggatccagtgggtgcttaaaaggatctcctcttgtactgaaagaccccagtctgttctcatcacttagcgccagcagcacctcttcccacgggagcagcgcagcccagaaacagaacccatcgcatacagatcagcataccaaacattggagaactgacaattggaagaccatcagtagccctgcttggagcgaggtgagctctctgtcagatagcactaggacaagactgaccagtgagtccgattatagcagtgaaggttcatcagtggagtcactcaagcccgttcggaagagacaagagcatagaaaaagggcatctctgtcagagaagaagagccccttcttgtcttccgccgagggggccgttcccaagctcgacaaggaaggaaaggtggtgaaaaagcataaaactaaacacaagcacaaaaataaagaaaaagggcagtgctcaatctcgcaggagctgaagctgaagtcattcacctacgagtatgaagatagcaaacagaaatctgataaggccattcttctggagaacgatctttctaccgagaacaaactaaaggtcttgaaacacgaccgggaccattttaagaaagaagaaaagcttagcaagatgaaactcgaagaaaaagagtggctattcaaagatgaaaaatctctgaaacggattaaagacacgaacaaggacatttcgagatcttttcgcgaggaaaaagatagaagtaacaaggctgagaaagagcgctcactaaaggaaaagtcccccaaggaagagaagctgcgactgtacaaagaagaacggaagaagaagagcaaggacagaccaagtaagcttgagaagaagaatgatctcaaagaggataaaatctcgaaagagaaagagaagattttcaaggaagacaaagaaaagttgaaaaaggagaaggtgtatcgcgaggattctgcattcgacgagtactgcaataagaaccagtttctggagaatgaagacacaaaattttccctgagtgatgatcagcgagacagatggttttcagacctgagcgactcaagtttcgacttcaagggggaggatagttgggatagccccgtcaccgattaccgggacatgaagtccgatagcgtggctaagttgattttggaaaccgttaaggaagacagtaaagaacggaggcgcgactccagggccagagaaaaacgggattaccgcgaaccattcttcagaaagaaagaccgcgactacctggacaagaactctgaaaagcgtaaggaacaaactgaaaagcataagtccgtccctggatacttgagcgagaaagacaagaagaggcgcgagagtgcagaggccggccgagaccgcaaagatgcccttgagtcttgcaaagagcgtcgcgacggaagggcaaagcctgaggaagcccatagggaggagctgaaggagtgtggttgtgagtcaggattcaaagacaagtcggatggggattttggaaagggtttagagccgtgggaacggcaccaccccgctcgcgaaaaagagaagaaagacggtccagacaaggagagaaaggagaaaactaaaccggaacgatataaagaaaaatctagcgacaaggacaagagcgagaagtccatcttagagaagtgccaaaaagacaaggaattcgacaaatgttttaaggaaaagaaagatacgaaggaaaagcataaggatacacacggaaaagataaggagcgaaaggcaagtctggatcaaggaaaggagaagaaggaaaaggctttccctggcatcatcagcgaggacttcagcgaaaaaaaggatgacaagaaaggcaaggaaaagagttggtacattgcggatatctttactgatgaatctgaagacgatagggactcctgcatgggttcaggattcaagatgggagaggcttcagatctgccccgtaccgacgggctgcaggaaaaagaggaaggcagggaggcatacgccagcgaccgtcatcggaaaagctcggataagcagcatccagagcggcaaaaggataaggagccacgtgaccggagaaaggaccggggcgcagccgatgccggacgggacaagaaggagaaagtgttcgagaaacataaggaaaagaaagacaaggagagtaccgagaagtataaagaccgcaaagaccgcgcgtccgtcgactctacccaggacaagaaaaacaagcagaagcttccagaaaaggctgaaaagaagcacgccgctgaggataaagcgaagtccaaacacaaagagaagtcagacaaggaacactccaaggagcggaagtcgtctagatcagcggatgctgagaaatctctgttggagaaattagaagaagaggcccttcatgagtatagggaggactccaatgacaaaatcagcgaggttagctctgactcatttacagataggggccaagaacctggcctgaccgccttcttagaagtctcatttactgaaccccctggggatgacaagcctcgcgagagcgcgtgcttgccagagaaactcaaggagaaggaacgccatcggcatagctcatcctcctctaagaagtcacacgaccgcgagagggcaaagaaagagaaagcagaaaagaaggagaaaggagaggactacaaagagggaggttcccggaaagacagcgggcagtacgaaaaagacttccttgaagccgacgcctatggtgtgagctataacatgaaggctgacatcgaggacgaactcgacaagactatcgagctgttttctacagaaaaaaaagataaaaacgatagcgaacgagaaccttctaagaagattgagaaggaactcaaaccttacggcagctcagcaattaatatcctcaaagagaaaaagaagcgggagaaacacagggagaagtggcgtgatgaaaaggagcgccacagggataggcacgctgatggactccttagacaccaccgggacgaactgttgagacaccatcgcgacgagcagaagcctgccacacgtgacaaagacagcccaccccgagtcctgaaggacaaaagtagggacgaggggcctagattgggtgatgccaaactgaaggagaagtttaaggacggtgcagaaaaggagaagggagatcctgtgaaaatgtccaacgggaacgataaagtcgccccatcgaaggaccctggaaaaaaggatgctcgcccccgtgagaagctgttaggggacggcgaccttatgatgaccagctttgagcgcatgctgagccaaaaagacctcgaaatcgaagagagacacaagaggcataaagaacgtatgaagcagatggaaaagctgcgacacaggtccggggatccaaagctaaaggagaaagccaaaccggcagatgacggacggaagaaaggcttggacatccctgccaagaagccacccggcctagatccaccttttaaggacaagaaactgaaggaaagcacccccattcccccagcagccgagaataaactccaccctgccagcggcgcagactcgaaggattggcttgccggcccacatatgaaggaggtcctgccagcctcgcccaggccagaccagtcgaggccgaccggggtccctacccctacctccgttctgtcgtgtccttcatacgaggaagtgatgcatactcccagaacccccagctgcagcgcagatgactatgccgatctggtttttgactgtgccgattcacagcacagcacacccgttcctacggctccaacttccgcttgctcgccttcattttttgataggttttcagtggcctcttccgggctcagtgagaatgcctcacaggctccagctaggccactttcaacgaacctgtataggtcggtttctgtggacattaggaggacccctgaggaagaattttctgtaggcgacaagctcttcaggcagcagagtgtgcccgcggcctcatcatacgactcaccaatgccgcctagcatggaagacagagcaccattgccaccggtgcctgctgagaagtttgcttgcctatcacctggctactacagtcctgattatgggcttccttcacccaaggttgatgctctgcactgccctcctgccgccgttgtgacggttacaccttccccggagggagtattctcatcattgcaggctaaaccatctccatcaccccgggccgagttgcttgttccctccctggaaggagcgctgccccccgatctcgacacatctgaggatcagcaggccacagcagcgatcatccccccagagccctcgtacttggaaccattggatgagggcccattctccgccgtgattaccgaagagccagttgaatgggcgcatcctagcgagcaagcattagccagcagcctcatcggaggtaccagtgagaatccagtgagctggccagtgggctcagacctgttactcaagtctcctcagcgttttcccgagtctcccaaaaggttctgcccagccgatcccctgcattccgcagcgcccggaccttttagcgccagtgaggcaccttaccccgccccgccagcttctcctgccccttacgcactacccgttgcggaacccgggttggaggacgtgaaggacggtgttgatgccgttccagcggctatcagtaccagtgaggccgcaccttatgccccaccttcaggtttagagtcctttttttccaattgcaaatcactgccagaggcccctctcgacgtagcgcccgagcccgcatgtgtagccgcggtcgctcaggtcgaagcacttggtcccctagaaaacagttttctagatggttccagaggcctctcccacctggggcaggttgaaccagtgccctgggctgatgccttcgccgggcctgaagatgatcttgacctcggcccatttagcctccctgagctgccgttacaaacaaaagatgcagccgatggtgaggccgagccagtagaggagagtctggctcctcccgaggaaatgcccccgggcgcgccaggcgtcatcaatggtggggatgtcagcacagtggtggccgaagagcccccagccctcccgccagaccaggcatccacaaggttgccagccgagcttgagcccgagccttccggagagccaaaactggacgtggcattggaggccgcagtcgaagccgagactgtgcccgaagagcgggcccgaggggatcccgacagctccgtggaacctgctccagtaccccccgagcaacgtcctcttgggagcggagatcagggcgcagaggcggagggaccccctgccgcgtctctttgcgcacccgatggacccgctcctaataccgtcgcccaagctcaggcggcggatggagctggccctgaagacgacacagaggcaagcagggcagccgcacccgccgaggggccacccggcgggatccagccggaagcagcagagcctaaaccgacagccgaggctcccaaagcccccagggtggaggagattccccaaagaatgacccgcaaccgagctcagatgttagcaaatcaatccaaacagggcccgccgccctcagagaaagaatgcgctcccacacccgccccagtgacccgggccaaagccagaggctccgaagatgacgatgcccaggcccagcaccctagaaaacgcagatttcagcggtctacccagcaactgcaacaacaactgaacacaagcacccagcagaccagggaggtgatacagcagacgctggcagccatcgtggacgccatcaagttagacgccatcgaaccttaccattctgatagagccaacccctactttgagtacctccagataagaaagaagatcgaagaaaagcggaaaatcctttgttgtattaccccccaggccccacagtgctatgccgagtacgtaacttatactggaagctacctgctggatgggaaacctctctcgaagctacacatccctgtcattgcccctccccctagtctggctgaaccacttaaagagctgtttcgccagcaagaagctgtcaggggaaagctgaggttacagcattccatcgaacgagaaaaacttatcgtatcatgcgagcaggagatccttcgggtccattgtagagcagctcggaccatcgcaaaccaggctgtcccctttagcgcttgtacaatgcttctggacagcgaagtatataacatgccactggaatcacagggcgacgagaataagtccgtcagggataggttcaacgccaggcaatttatcagctggctgcaggacgtggatgacaaatacgatcggatgaaaacttgcctcttgatgagacagcagcacgaggccgcagcattaaacgctgttcagcggatggaatggcagctgaaggtccaggagctagaccccgcaggccacaagtcactttgtgtcaacgaagttccttcattctacgtaccaatggtggacgtgaatgacgacttcgtcctcttacccgcttag

SEQ ID NO: 179079 - DNA, 1317 bp, synthetic construct
  misc_feature 1..1317: note = Description of Artificial Sequence: Synthetic coding sequence
  source 1..1317: mol_type = other DNA
agcgccggccgggtgaacgaggaccgggtgcggagccggaccatgcccaaggggggctgccctaaggcacctcagcaggaggagttgcctctcagttctgacatggtggagaaacagaccggaaaaaaggacaaagataaagtgtctctcacgaagactccaaaactggagcgcggcgatggcggcaaggaagttcgggaaagagcctctaaaaggaagcttccatttaccgccggagccaacggcgagcaaaaggattccgacactgagaaacagggacccgagcgtaagcgcataaagaaggagcccgtgacgagaaaagccggcctcctctttggcatgggtttatcaggaatcagggcggggtaccccctttctgagcgtcaacaggtggccctgcttatgcagatgactgctgaggaatcagccaactcacccgttgatacaactcctaagcatcctagccagtcgactgtttgccagaagggaacgccaaattccgcttctaaaactaaagacaaagtcaacaaaaggaacgaacgaggcgagacaagactgcatagagccgccatcaggggcgacgcccggcgaatcaaggaattaatctccgaaggggcagacgtgaacgtgaaagacttcgccggatggaccgctctgcacgaggcttgcaatagaggctactatgacgtggcaaaacaactactggccgctggagctgaagtgaatacaaaaggactggacgacgatacacccttgcatgatgccgccaataatggacattacaaggttgtcaagcttttattgcggtacggcggaaacccacagcagtctaaccgaaagggagagacccctctgaaggtcgctaatagcccaacaatggtcaatttattactcggtaaggggacatacacttcttccgaggagtcatccaccgaaagctccgaggaagaagacgccccttcatttgcaccatctagttcggttgacggtaacaacaccgattcagagtttgagaaaggactcaagcataaggctaaaaaccctgaaccccaaaaagccacagcgccggtgaaggatgagtatgagtttgatgaagacgatgagcaggatcgggtcccacccgtggacgacaagcacctcctcaagaaagactaccggaaggaaaccaaaagtaacagctttatcagtatacccaaaatggagaaggttactttgaagatcacaagactgcaccagcggaagcggcctatagtttcgtgccagacccgcagaacgcggcgcacacgggtaagtccatggggccaggagcggtcctag

SEQ ID NO: 179080 - DNA, 6189 bp, synthetic construct
  misc_feature 1..6189: note = Description of Artificial Sequence: Synthetic coding sequence
  source 1..6189: mol_type = other DNA
atgcccaagagcggcttcaccaagcccatccagagcgagaacagcgactccgatagcaacatggttgaaaagccttacggccgaaagtcgaaggacaagattgcctcctatagcaaaactccaaagatcgagcgatccgatgtcagtaaggagatgaaagaaaaatcctcaatgaaacggaagctccctttcaccattagtccatctcggaacgaggagcgcgactccgacactgacagtgaccctggtcacacgtctgagaactggggtgagcgtttgataagttcttaccgaacctactctgaaaaggaagggccagaaaaaaagaaaaccaaaaaggaagcagggaacaaaaaatctacacccgtcagtattctgtttggctaccctctgagtgaaaggaaacagatggccctgctgatgcagatgacagcaagggacaattcacccgactccactcctaatcatccatcccagactaccccagcccagaagaagacccccagctcatcttccagacagaaggataaagttaacaaaaggaatgagcgaggcgagacgccacttcacatggccgccattcgcggtgacgtgaaacaggtcaaagagttgatcagcctgggagccaatgttaatgtaaaagactttgcaggatggacaccactgcacgaggcatgcaatgtgggatactacgatgtggccaagatacttattgcggcaggtgctgacgtcaatactcagggtcttgatgacgatacaccccttcacgattctgcttcctcaggccatagagatatagtgaagctgctgttacggcacggaggtaatccattccaggctaacaagcatggtgagaggccagtggacgtcgccgaaaccgaagagctggaactgctgttaaaacgggaagtgcccctgagcgatgacgatgaaagctacacagatagcgaggaggctcagagtgtgaacccaagcagcgtagacgagaacatcgacagcgagactgagaaagattcattgatctgtgaatcaaagcagatccttcccagcaagacacccctgccgtcggctttggacgagtatgagttcaaagatgacgacgacgaggaaatcaataagatgatcgacgatcgccacatcctcagaaaggagcaaagaaaggagaacgaaccagaggctgaaaaaacgcatctcttcgctaagcaagaaaaggctttctacccgaaatcttttaagtctaaaaaacagaagccatccagagtactgtattcttctacagagtcaagcgacgaggaggccctgcagaacaagaaaatctctacttcatgtagcgtgatccccgagacaagtaattcagacatgcagacaaaaaaagaatacgtggtctctggcgagcacaaacagaagggcaaagtcaaaaggaaactcaaaaatcagaataaaaacaaggaaaaccaggagctgaagcaggagaaggaaggaaaggaaaacactcgtatcaccaacctaaccgttaatacaggccttgactgctcagaaaagacaagagaggaaggcaacttcaggaagtcgttcagccccaaggatgacacttcactccacctgttccacatctctaccggaaagtcccctaagcattcatgcgggctctccgagaagcagagtactcccctgaaacaggagcataccaagacctgcctttctcccgggtcttcagagatgtctctgcaaccagatctggtccggtatgataatacagagagtgaatttctgcccgagtcgtccagcgtcaaatcatgcaagcataaggaaaaaagtaagcaccagaaggatttccacttagaattcggagagaaatcgaacgctaaaataaaagacgaggatcactcaccaaccttcgaaaactccgactgtactctaaaaaagatggataaggagggtaaaacactgaaaaaacacaagctgaaacataaagaacgggagaaagaaaaacacaagaaggagatcgaaggcgaaaaggagaaatacaagaccaaagatagcgccaaggagctgcagcgtagcgtagaatttgacagggagttttggaaggaaaacttcttcaagtccgacgaaaccgaggatcttttcctcaatatggagcatgagtcgcttacccttgagaagaaaagcaaactcgagaagaatattaaagacgataagtcgacaaaagagaagcacgtgtcaaaagaacggaacttcaaggaagagagagacaagataaaaaaagaaagcgagaaaagctttagagaagaaaaaatcaaggacctgaaagaagaacgcgagaacattccaactgataaggacagcgaatttacctccttgggtatgagtgcaatcgaagaaagcattggtttgcatctggttgagaaagagattgacatcgaaaagcaggaaaagcacatcaaggaatctaaggaaaaaccagaaaagcggagccagattaaggaaaaggatatcgaaaagatggagcggaagacctttgaaaaggaaaagaagatcaagcacgaacacaagtctgagaaagacaaactcgacctgtccgagtgcgtcgacaagatcaaggagaaggataagctgtattcacaccataccgaaaagtgccacaaggagggcgaaaagtccaagaataccgccgccattaagaagaccgatgatagggagaaatcacgcgagaagatggatcgcaagcatgacaaggaaaagccggaaaaggaaagacatctggccgaaagtaaggagaagcacctcatggagaaaaaaaataaacaatcagataactccgagtactcgaagtcggaaaaaggcaaaaacaaagagaaggaccgagaattggacaagaaagaaaagtcccgtgacaaggaatctattaatataacgaacagcaagcatatccaagaggaaaaaaagtcttcaatagtggacggtaataaggcccagcacgaaaaaccactgtccctgaaggagaagaccaaggacgaaccattaaagacaccggatgggaaggagaaggacaagaaggacaaggacatcgatcgatataaagaaagggataagcataaggacaagattcagattaacagtcttctgaagctgaagtctgaggccgataaacccaagcccaagagtagccccgcatctaaggacactaggcctaaggaaaagcggctggttaatgatgaccttatgcaaaccagtttcgaaagaatgctcagtctgaaggacttggaaattgagcagtggcacaaaaaacacaaggaaaaaattaaacagaaggaaaaggagcggctgcgaaatcgtaattgcctggaactgaaaattaaggataaagaaaaaactaagcacactcccactgagagtaagaacaaggaattaacccgcagcaagtcatcagaggtcacggatgcatatacaaaagagaaacagcccaaggacgcagtttctaacaggagccagtctgttgacacaaagaacgtgatgactctgggaaagtctagcttcgtgtcagacaatagcctgaacaggtcccctaggtcagaaaacgaaaagccaggcctgtctagcagatccgtatccatgatttctgtggcttcttcggaagacagttgccacaccactgtcacaacgccacgccctcctgtggagtacgactccgacttcatgttagagagctccgagtcccagatgagtttcagccagagtccatttctgtctattgcaaagtctcctgcgttacacgagagggaacttgacagcctggctgatctccctgaacgaattaaacccccgtatgccaatcgcctgtccactagccacttgcgcagctcttcagtggaggatgtcaagctgatcatttccgagggccgacctactatcgaggtgagacgctgcagcatgcctagcgtgatctgcgagcacacaaaacaatttcagactataagcgaagagtctaatcaaggaagcttactcacagttccaggcgatacctccccctcacctaaaccggaggtgttctcaaacgtgcctgagcgcgatcttagtaatgtctccaatattcatagctcattcgcaacttctcctaccggcgcatccaactcgaaatacgtttccgctgatcgaaatttaatcaaaaacacagcccccgttaacacggtaatggacagccctgtgcacctggaaccgtcctctcaagtgggggttatccagaacaagtcctgggagatgcccgtcgaccgtctcgagacactcagcactcgggacttcatctgtcctaacagcaacataccagaccaggaaagctccctgcaatccttttgcaattccgaaaacaaagtcttgaaggagaatgccgactttctatctcttcgacaaacagagctcccagggaacagttgcgcccaggaccctgcgagtttcatgcctccacagcagccttgttcctttccttctcagtctctgtccgatgccgagtcaatttccaaacacatgtctctcagttacgtggcaaatcaggagccaggaatcctgcagcaaaagaatgccgtgcagatcatttcatcagccctggacaccgacaatgaaagtactaaggataccgagaatacttttgtgctaggcgatgtgcagaaaaccgatgcattcgtccctgtgtatagcgatagcacaattcaagaggcttccccgaattttgagaaggcctacacgctgccagtactgccttccgagaaggactttaatggatcagatgcctccactcagctgaatacccactacgccttttccaagttgacttacaaatcttctagcggtcacgaggtggagaattccactacagatacacaagtgatcagccacgagaaggaaaataagctagagtccctcgttctcactcatttgtctcgctgtgactctgatctgtgtgaaatgaatgccggtatgccgaaaggcaacctgaatgaacaggatcccaaacactgtccggagtccgagaaatgtctgttatccattgaagacgaggagagtcaacaatctattctcagcagcctggaaaaccattctcagcagagcacccagccagagatgcataagtacgggcagctggtgaaagtcgagctggaagagaacgctgaagatgataaaacagaaaatcagattccccaaagaatgacaagaaacaaagccaacacaatggcgaatcagagtaaacagatcctcgcttcctgcactcttcttagtgagaaggattccgagtcatcttctccaagaggtcgtattaggctgactgaggacgacgatccacagattcaccacccaagaaaacgaaaggtgtcacgggtcccgcagccggtgcaggtgtcccctagcctcctacaggccaaagagaagacacagcagagcctggctgccatcgttgatagtcttaagctcgatgagattcagccatattcttccgaacgagctaacccatacttcgaatacttacacatccgcaagaagattgaggagaagagaaagctgctgtgcagcgtgatcccacaggcccctcagtattacgacgaatatgtgaccttcaacgggtcctatcttctcgacggaaatccgctatcgaaaatatgtatcccaactatcactccccccccctccctctcggatcccctgaaggagctcttccgtcagcaagaagtagttaggatgaagctgcgccttcagcattccattgagcgagaaaagctcattgtcagcaatgagcaggaagtacttagggtccattatcgggccgccaggaccctggccaaccagaccttaccgttcagcgcctgtactgtgctattagacgcggaagtgtacaatgtcccactagactcccagtcggatgattcaaaaacctccgtcagggatcggttcaatgccaggcagtttatgtcttggctccaggatgtcgatgataaattcgataaactcaaaacctgcctgctcatgaggcaacagcacgaagccgctgcactgaatgccgtgcagcgacttgagtggcagcttaaactgcaagaactggaccccgctacgtataagtctattagtatttatgaaatccaggaattctacgttccgttggtcgacgttaacgatgactttgagctcacacccatttag

SEQ ID NO: 179081 - DNA, 1317 bp, synthetic construct
  misc_feature 1..1317: note = Description of Artificial Sequence: Synthetic coding sequence
  source 1..1317: mol_type = other DNA
atggtgaacgtgcccgagctgctgctgggccagagccccagccggaacgacacaaaaattattaattccgaggaagcgcagagcgtcaacccatcttcagttgacgaaaacatagactctgaaactgagaaggacagcttgatctgtgaatctaaacaaattctgccttccaaaactcctcttccgtcagcactggacgagtacgagttcaaggacgatgatgacgaagagatcaacaagatgattgatgacaggcatattctacgcaaggaacagcgtaaggagaatgagcccgaggccgagaaaactcatctatttgccaagcaggaaaaggcgttttatccgaaatctttcaaatctaaaaagcagaagcctagccgggtgttatactccagtacagaatcttcggacgaagaggccttgcaaaacaagaagatatctacctcatgctctgtgattcccgaaaccagcaacagcgatatgcagacaaaaaaggagtacgtggtctctggggagcataaacaaaaggggaaagtgaaacggaagctaaagaatcagaacaagaacaaagaaaaccaggagcttaaacaggagaaagagggcaaggaaaatacacggatcactaacttgaccgtgaacacagggcttgactgctcagagaagacaagagaggagggcaatttcaggaagtctttttcaccaaaagatgatacatcgctgcacctcttccacattagtacaggaaagtcccctaaacatagctgtggactctctgagaagcaaagtacgcctctcaaacaagaacacactaaaacatgtttgtctcccgggagttccgagatgagcctgcaaccagatctggtgcgctatgataacaccgaaagtgaattcctacccgagtctagcagcgtgaaaagctgcaaacacaaggagaagagtaaacatcagaaggattttcatttagagttcggcgagaaatctaacgcaaagatcaaggatgaagatcattcccctacatttgagaactccgattgcacgctgaagaagatggacaaagagggtaaaaccctgaaaaaacataaactaaaacacaaagaacgcgagaaggaaaaacataagaaggaaatcgagggcgagaaggaaaaatacaaaactaaggactccgcgaaggaattacagcgaagtgtggagtttgatcgcgagttctggaaggagaacttttttaagtctgacgagaccgaagatctgttcctgaatatggaacacgaatccctcaccctggaaaagatcaagatcggcaaaaaacaccagcgttag

SEQ ID NO: 179082 - DNA, 6120 bp, synthetic construct
  misc_feature 1..6120: note = Description of Artificial Sequence: Synthetic coding sequence
  source 1..6120: mol_type = other DNA
atgcccaagagcggcttcaccaagcccatccagagcgagaacagcgattcagactcaaatatggtcgagaagccgtacggcagaaagagcaaggataagatagcctcttattctaaaacacccaagatcgaaaggagcgatgtaagcaaggaaatgaaggagaagtcttctatgaagcgcaaactgcccttcactatctccccttcccgtaacgaggaaagggactccgacacagaaaaggagggccccgagaaaaaaaaaaccaagaaagaagcaggtaataagaaatcaacacccgtttcaattctttttggctaccccctgtccgagcggaaacagatggccctgctcatgcaaatgacagcccgcgacaactcccccgactctacacctaaccaccccagtcaaaccacgcctgctcaaaaaaagacaccctcttcctcctcacgccaaaaggacaaggtgaacaagaggaacgagcgcggcgagaccccactccacatggcagcgattaggggcgacgtgaagcaagtcaaggagttgatcagcctcggagccaacgtgaatgttaaggacttcgctgggtggactcccctgcatgaggcctgtaacgtcggttattatgacgtggctaagatattgatagctgctggcgcggatgttaacacacaggggctggacgatgatacccccctgcatgattccgcttcgagtgggcatagagatattgtgaaacttcttctccgacatggcggtaacccttttcaagctaataagcatggggagcgccctgttgacgtcgccgagacggaggagctggagttgctcttgaagagggaagtgcccctttccgatgatgatgagagctacaccgatagtgaggaggctcagagcgtcaacccctcttccgttgatgagaacatagattctgagacagagaaggactccttaatatgtgaaagtaaacaaatcctccccagcaaaacccccctgcctagcgccctcgacgagtatgaatttaaggatgacgatgacgaggagattaacaaaatgatcgatgacaggcacattctgagaaaagagcagaggaaagagaacgagcctgaagcggagaagacccacttgttcgccaagcaggagaaagcattttaccccaagagtttcaagtccaagaagcaaaaaccatctagagttttatactccagtacggaatcaagcgatgaggaagcacttcagaacaagaaaattagcacttcatgcagtgtcattcctgaaacctctaatagtgacatgcaaacgaagaaggagtatgtggtctcgggggaacataagcagaagggaaaagtcaaacggaagttgaaaaatcaaaacaagaacaaagagaaccaggagttgaagcaggaaaaagagggtaaggaaaatacacgcattaccaacctgaccgtgaacaccggccttgactgctccgagaaaacacgggaggagggaaatttcagaaagtctttttcccctaaagatgatacgagtctccatcttttccatataagcacaggaaaatcacccaagcactcatgcggcttatcagagaaacaatcaacccccctcaagcaggaacacacaaagacatgcctctcccctgggtcttctgaaatgtccctccagcctgacctcgtgcggtacgataataccgagagcgagttcttgccagagtcatcctcagtgaagagctgcaaacacaaggagaaaagcaaacaccagaaagatttccacctggagttcggcgagaaaagtaatgccaagattaaagacgaggaccatagccctaccttcgagaatagcgactgtaccctaaagaagatggacaaggaggggaagacacttaagaaacataaactgaaacacaaggagagggaaaaagaaaagcacaagaaagagatcgagggtgagaaggagaagtataaaacaaaagattccgctaaagaacttcagcggagcgtggagttcgatagagagttttggaaagaaaattttttcaaaagcgacgagactgaagatctcttccttaacatggagcatgagtccctgaccctggaaaaaaaaagcaagctggaaaaaaatatcaaagacgataagtccaccaaggaaaaacacgtatccaaagagcgcaatttcaaggaggaaagagataaaatcaaaaaggagagcgagaagtccttcagggaagagaaaataaaggatcttaaggaagagagggaaaacatccccactgacaaggacagtgagttcaccagcctggggatgagcgcaatcgaggagtctatcggcttgcatctcgttgagaaggagatcgatatcgagaagcaggaaaagcatatcaaagagagcaaagagaaacccgaaaaaaggtcccaaattaaagagaaggacatcgaaaagatggagcggaagacatttgagaaggagaaaaagattaaacacgaacataagagcgaaaaagataagctggatctgagtgagtgcgttgataaaattaaagagaaggacaaattgtattctcatcataccgaaaaatgccacaaggaaggggaaaagtccaagaatacagccgccattaagaaaacggatgaccgggagaagtcccgagagaagatggatagaaaacatgataaggagaagcccgaaaaagagaggcatctggccgagtccaaggagaagcatctgatggagaaaaaaaataagcagtcagataatagtgagtacagcaagtccgagaaaggaaagaataaagagaaggatcgcgagctcgacaaaaaggaaaagagtcgagacaaagagagtataaacatcaccaactccaagcacatccaggaggaaaagaaatcgagcatagtggacgggaataaggcccagcacgagaaacctctgtcgctaaaggaaaagacaaaagacgagcctctaaagacccccgacggtaaggagaaagacaaaaaagataaggatatcgacaggtacaaggagagagacaagcataaagacaagatccaaataaacagtctgttgaagctgaagtctgaggccgacaaacctaagccaaaatcgtcacctgcttccaaagacacgcggccgaaagagaaacgactggttaacgatgacctgatgcagacctcattcgagcgaatgttatctcttaaggatctggagatagagcaatggcataagaaacataaggagaagattaaacagaaagaaaaagaacgtctgcgaaacaggaactgtctggaactcaaaatcaaggacaaagaaaagactaagcacactccgaccgaatctaagaataaggagcttaccaggtcaaagagtagcgaggtgacggacgcctacacaaaagaaaaacagcctaaagacgctgttagtaatagaagtcagtcagtggacaccaagaacgttatgacgctagggaagtcatcattcgtatccgataattcccttaaccggtcacctcggagcgaaaatgaaaaacctggcctgtcctcccggtctgtgagtatgatttccgttgcgtcatccgaggactcgtgtcatactaccgtgactacaccaaggcccccagtcgaatacgatagcgacttcatgctggaatcctcggaatctcagatgagcttcagccagtccccttttctcagcatcgcaaaatcccctgcactgcatgaacgagagctcgattccctagctgatctgcctgaacgcatcaagccgccctacgctaatagactgtcaacttcccacctacgtagctcatccgtagaagatgtgaaactgatcatttctgagggccgacccactattgaagtgagacgctgtagcatgccctctgtgatctgcgagcacaccaaacagtttcaaactatcagtgaggaaagcaatcaaggcagtttactgaccgtccccggggatacttctcccagtccaaagccggaagtattctctaatgttccagagcgggatctgtcaaacgtatcaaatattcactcgagctttgcaacgagccctaccggcgcaagtaattcaaaatatgtctcagcggacaggaatctgatcaaaaatacagcacctgtgaatacggtgatggactctcccgtgcacctggagccatcctctcaggtgggggtaatccagaacaaatcgtgggagatgcccgtggatcggttggaaactctgtctactagagattttatatgcccgaactccaatattccagaccaggagtcctctctgcaaagcttttgtaatagtgagaacaaggtattgaaggagaatgccgatttcctgtccttacgacagacagagcttcccggaaattcctgcgcccaggaccccgcctcttttatgccacctcagcagccctgttcgttcccatctcagagtctctcagatgccgaatcaataagcaagcatatgtcgctgtcatacgtcgccaaccaggaaccaggtatcttgcagcagaaaaatgctgtgcagatcatttcaagtgcactggatacagataacgagtctaccaaggacaccgaaaacacatttgtgttaggagacgtccagaagacagatgcctttgtgcctgtctacagcgattccaccattcaagaggcctcgccaaatttcgaaaaggcctatactctgccagtgttgccatccgagaaagattttaatggctcagacgcaagcacacagctgaacacacactacgcattctccaagctgacttacaagagcagcagcggccacgaggtggagaatagcaccaccgacacacaggtcatctctcacgagaaggaaaacaagctcgaatcacttgttctgacacacctgagtcgatgcgattctgacctttgcgaaatgaatgcgggaatgcctaaaggcaatctaaacgagcaggatccgaaacactgtcccgagtctgagaagtgcctactaagtatcgaagatgaagaaagtcagcaatctatcctgtcatctttggagaaccactcacagcagagcacccagcccgaaatgcataaatacggccagctggtgaaggtcgagctggaagaaaacgctgaagacgacaaaacggagaaccagatcccacaaaggatgactcggaacaaagcaaatacaatggccaaccagagcaaacagattctggccagctgcaccttgctctccgagaaggacagcgagagctcaagcccccggggacggatccgactgaccgaggacgatgatcctcagatccaccacccgcggaaacgaaaggtctcaagggtgccacaaccagtgcaagtcagtccctcccttctacaggctaaggagaagacccaacagagtctcgccgccatcgttgattccttaaaattagacgagatccaaccctacagttcggagcgggccaatccctacttcgagtacctccacattcggaagaagatcgaggaaaaacgaaagcttttgtgctccgtcatcccacaggctccccagtattatgacgagtatgttaccttcaacgggtcatacctgctggacggcaacccactgtcgaagatctgtattcccaccatcactcctccaccgtcgctgtcagaccctttgaaggaactctttcgccaacaggaagtggttcgcatgaagttaaggctacagcatagtatcgagcgagaaaagctgattgtatccaatgagcaggaggttttgagggttcactatcgggcagcacgaacacttgccaatcagaccctccccttttctgcctgcactgtgctgctcgatgccgaggtgtataacgtgcccctggattctcagagcgacgactccaagacatccgtgagagaccgctttaatgcacgacagtttatgagttggctccaggacgttgatgacaagttcgacaagctgaaaacttgcttgctgatgagacaacagcacgaggccgccgctctgaacgctgtccagagactcgagtggcaactcaaactccaggagctggatcctgcaacttataagtccatttctatttacgaaattcaagaattctacgtgccactggttgacgtaaacgacgatttcgagctgacaccgatctag

SEQ ID NO: 179083 - DNA, 372 bp, synthetic construct
  misc_feature 1..372: note = Description of Artificial Sequence: Synthetic coding sequence
  source 1..372: mol_type = other DNA
accgaggacctgttcctgaacatggagcacgagagcctgaccctggaaaagaagagtaagctggagaaaaacattaaggatgataagtccacaaaggagaagcatgtttccaaggagcgtaacttcaaggaagaaagagataaaattaaaaaagagagcgagaagagcttccgggaggggatgagcgcgattgaggagtctattggcctacatctagtcgaaaaagagattgacatcgagaagcaagaaaaacacattaaagagtctaaggagaagccagaaaagagatcccaaataaaggaaaaggacatagagaagatggaaaggaaaacctttgagaaagggacatcttacatcaggatcactcagtag

SEQ ID NO: 179084 - DNA, 993 bp, synthetic construct
  misc_feature 1..993: note = Description of Artificial Sequence: Synthetic coding sequence
  source 1..993: mol_type = other DNA
atgcccaagagcggcttcaccaagcccatccagagcgagaacagcgatagtgattccaatatggtggaaaagccctacggtcggaagtccaaggataaaattgcatcctattcaaagacgccaaagatcgagaggagtgacgtgagcaaggagatgaaagagaaaagttcgatgaaaaggaaactgcccttcactatcagcccttccagaaatgaggaacgcgattctgatacagactccgatcccgggcacacatcagaaaactggggggaaaggctgatttcaagttatagaacatactctgaaaaagagggccccgaaaaaaagaagaccaagaaggaggccggcaacaaaaaatctacaccagtgtccattctcttcggctatcccctgtctgagcgcaaacagatggctttgttaatgcaaatgaccgctagggataattccccggacagcaccccaaaccatccaagtcagacaacacccgcccagaagaagactccaagctctagtagtcgccagaaggataaagtcaacaagcgcaatgaacgcggggaaacgccattgcatatggcggccatcagaggggacgtcaagcaggtcaaggagctgataagcctgggtgcaaatgtgaatgtaaaagactttgccggttggactccactccatgaagcttgcaacgtgggttactacgacgtagctaaaatactcatcgccgctggagctgacgttaatacccagggcctcgacgacgatacgcccctgcacgattcagcaagctcaggacacagggacatcgtcaagctccttctgcggcacggcggaaatcctttccaggccaacaaacacggcgaaaggccagtggatgttgctgagacagaagagttagagttattgcttaaacgcgaggttcctctgtctgacgatgatgagtcctacaccgggtcttcgtaccagttcgctggcaatgctaagctctcaggggctagctag

SEQ ID NO: 179085 - DNA, 1116 bp, synthetic construct
  misc_feature 1..1116: note = Description of Artificial Sequence: Synthetic coding sequence
  source 1..1116: mol_type = other DNA
atgcccaagagcggcttcaccaagcccatccagagcgagaacagcgattccgacagcaatatggtggagaaaccctacgggagaaagagcaaagataaaatagctagttatagcaaaactcccaagattgagagatccgatgtcagcaaggagatgaaggagaagtcgagcatgaaacgcaagctgccttttaccatctcgccatccagaaatgaagagcgcgatagtgacaccgagaaggagggacctgaaaaaaagaaaactaaaaaggaggctggcaacaagaagtcaacccctgttagcatcctgttcggttaccctctgtccgagcgaaagcagatggcattgctgatgcagatgaccgccagagacaacagccccgattctacaccaaatcacccgagtcagacaacacccgctcaaaaaaagactcctagtagttcctccaggcagaaggacaaagtgaacaagcggaacgagcggggtgagacacccctgcatatggcggccattaggggagacgtgaagcaggtgaaagagctgatatctttaggggctaatgtgaacgtgaaggactttgccggctggacaccgctccatgaagcctgtaatgtgggctactacgacgtcgccaaaatccttattgctgctggagccgatgtaaacactcaagggttggacgacgacacaccgctgcatgatagcgcctctagtggacatcgggacattgtcaagttgctactgcgacacggaggaaaccctttccaggccaacaagcatggggagagaccagtcgatgtcgctgaaactgaagagttggaactgctactcaaaagggaggtgccactgtccgacgacgacgagagctacacagactctgaggaagcacaaagcgtgaatccaagctcagtggatgaaaacatcgacagcgaaacagaaaaggattccctcatttgtgaaagtaaacaaatcctgccctcgaagacacctctgccaagtgccctggacgagtacgagtttaaggatgacgatgacgaggagatcaacaagatgatcgatgatcggcatattctgaggaaggaacagaggaagaagaagcgaaaagagaaaaagtag

SEQ ID NO: 179086 - DNA, 984 bp, synthetic construct
  misc_feature 1..984: note = Description of Artificial Sequence: Synthetic coding sequence
  source 1..984: mol_type = other DNA
atggccaaggcccccagctgggccggcgtgggcgccctggcctacaaggcccccgaagctctctggccggccgaggcagtcatggacggcaccatggaggatagcgaggctgttcagagggccaccgctcttatcgagcagcgcctcgcacaagaggaggagaatgaaaagttgcggggcgacgcgaggcagaaacttccaatggatttacttgtactggaagacgagaaacaccacggcgctcagagtgcagccctgcagaaggttaaaggacaggagcgagtgcgcaagacgtcgctggacctgagaagggagatcatcgacgttggggggatacaaaatcttatcgagctgaggaaaaagaggaagcagaagaagcgtgacgcgcttgcagcctcccacgagccaccgcccgagcctgaagagattacagggcccgtggatgaggaaaccttccttaaggccgctgtggaaggaaaaatgaaagtgatcgaaaagttcctggcagacggcgggtcggccgacacctgcgaccagtttcggagaactgctctgcacagggccagccttgaaggacacatggagatcctggagaagctgttggacaatggcgcaacagtcgacttccaggacagactggattgcactgcaatgcactgggcatgccgtggcggtcacctggaggtggtgaagcttctgcaaagtcacggtgcagacactaacgtacgggacaaagaaggggataccgccttgcatgacgccgtccggttgaaccgatataagattatcaaactacttctccttcacggcgcagacatgatgaccaaaaacctggccggtaagacacccaccgatcttgtgcagttatggcaggccgatacccgtcacgcactggaacatccggaacctggtgctgaacacaacggattggaaggccctaacgattctggccgcgagacgccacaacctgtaccagcccaatag

SEQ ID NO: 179087 - DNA, 1083 bp, synthetic construct
  misc_feature 1..1083: note = Description of Artificial Sequence: Synthetic coding sequence
  source 1..1083: mol_type = other DNA
atggccaaggcccccagctgggccggcgtgggcgccctggcctacaaagcccctgaagctctctggcccgcggaagccgtcatggacggaaccatggaagactctgaggccgtgcaaagagccaccgctttgatcgaacagaggttagcccaggaggaggagaacgaaaaactgagaggtgatgcgcggcagaagctgccaatggacctgctggtcctcgaggacgaaaaacatcacggggcccagagcgctgccttgcaaaaagtaaagggtcaagagcgtgttcggaaaacttctctcgacttgcggcgggagattattgatgtgggaggaattcagaacctgatcgagctgcgcaagaagagaaaacagaaaaaaagagatgctctggccgcgagtcacgagccgccccctgagccggaggaaatcactggccctgttgacgaggagacgtttctgaaagcggctgtggagggtaagatgaaggtcattgagaagtttctcgcggatggtggctccgctgatacatgcgatcagttccggcgtacagctctccatagagcttctctcgaggggcacatggaaattttggagaagctgctggacaatggagcgaccgtcgattttcaggatagactggactgtaccgctatgcattgggcctgtaggggaggacatttagaagtggtgaaactgctgcagagtcacggagctgacacaaacgttagggacaagctcctgagtacaccacttcatgtagccgtccggaccgggcaggttgaaatcgtcgagcactttctgagtctagggctggaaatcaatgctagagatagagaaggggatacagctctccatgatgcagtacgattgaatcgctataagataatcaagctgttgttgctccacggtgctgacatgatgaccaaaaacctggccggcaaaacccctactgatttggttcagctgtggcaggccgacacaaggcatgcactggaacatcctgaaccaggagccgaacacaacggactagaaggtcctaatgacagcgggcgcgaaacgccacagcccgtgcccgctcagtag

SEQ ID NO: 179088 - DNA, 1002 bp, synthetic construct
  misc_feature 1..1002: note = Description of Artificial Sequence: Synthetic coding sequence
  source 1..1002: mol_type = other DNA
atggacggcaccatggaggacagcgaggccgtgcagcgggccaccgccctgattgaacagaggctcgctcaggaggaagaaaatgaaaagctgcggggagatgcacggcaaaaacttcccatggacctcctggtgctggaagacgagaagcatcacggggcacagagtgcagcactgcagaaggtgaaggggcaggagcgcgtacgcaaaacttcgctcgacctcaggagagagattatcgacgtggggggcatacagaacttgattgaattgagaaaaaaaaggaaacagaagaaacgcgacgccctcgcagccagtcatgaacctcctccagagccagaggaaatcactggacccgtggacgaggaaacttttttgaaagcagccgtggaagggaagatgaaggtgatagagaagttcctggccgacggcggcagcgctgacacctgtgatcaatttagacggacagccctgcaccgcgcctcacttgagggacacatggagattctagaaaagctcctagataacggtgccactgtggactttcaggatcggctggactgtacggccatgcactgggcctgccgaggaggacaccttgaggtggtcaagcttctgcagtcccatggggccgacacgaacgtccgggataaactgttgtccactcctttacatgtggcagtacggaccggacaagtggagatcgttgaacattttctgtctctcgggctggaaatcaatgcaagggaccgcgagggcgacaccgcactacatgacgcagtgcgcttgaatcgatacaagataataaagctcctgctgctccatggcgccgacatgatgaccaagaatcttgctggaaagactcctaccgacctcgtgcagctttggcaggctgacacgagacatgcactggaacaccctgagcccggtgccgagcacaatggtctggaaggtccaaacgactcaggtagggagaccccacagccagttcccgcgcagtag

SEQ ID NO: 179089 - DNA, 903 bp, synthetic construct
  misc_feature 1..903: note = Description of Artificial Sequence: Synthetic coding sequence
  source 1..903: mol_type = other DNA
atggacggcaccatggaggacagcgaggccgtgcagcgggccaccgcactgattgaacagcggctggctcaggaggaagagaacgagaaactgcggggggatgcacgtcagaaactgccgatggatcttctggtgctcgaagatgagaaacatcatggcgcccagtccgcggcacttcagaaagtgaaaggccaggagcgcgtgaggaaaacctctttggatctgaggagggaaattattgacgtaggtggtatccagaatctcatagagctcagaaaaaaaaggaagcagaaaaagcgcgacgctctcgctgcttctcatgaacctccgcccgaacctgaggagatcacaggccccgtagacgaagagacctttctcaaggccgctgtggagggcaagatgaaagtgatagagaagttcctggctgatgggggaagtgccgacacctgtgatcagttccgcaggaccgcgctgcacagagccagtttggaagggcatatggaaattctagagaagttattggataatggagccacggtcgacttccaagaccgactggattgtacagccatgcactgggcatgtcgcggcgggcatttagaagtggtcaaactactgcagagtcatggtgccgataccaacgtccgcgacaaagagggtgacaccgccctccacgatgcagtgcgcctcaaccggtataaaatcattaagctcttgcttctgcatggcgccgacatgatgaccaaaaatctggcaggcaaaaccccaactgatctggtacagttgtggcaagccgacactcgccatgctttggaacatccagagccaggcgctgagcataatgggttagaggggccaaacgattctggccgcgaaacaccacagccagtccctgctcagtag

SEQ ID NO: 179090 - DNA, 918 bp, synthetic construct
  misc_feature 1..918: note = Description of Artificial Sequence: Synthetic coding sequence
  source 1..918: mol_type = other DNA
atggacttcatcagcatccagcagctggtgagcggcgagcgggtggaggggaaggtgctcggtttcggccacggagtgcccgatcccggtgcgtggccaagcgactggcgccgcggtccccaggaggccgttgccagggagaaactaaagctcgaggaggagaaaaagaaaaaactggagcggttcaacagtaccagatttaatctggataatctagccgacctggaaaaccttgtccaaagacgaaaaaaaagattgcgacatagggtaccgccccggaagccggaacctctcgtcaagcctcagagtcaggcacaggtggaacctgtgggtttagaaatgttcctgaaggccgccgccgaaaatcaagagtatctcattgacaagtacctgactgacggcggggatccaaacgctcacgacaaactccaccgcaccgccctgcattgggcttgcctcaaaggccacagccaactcgtgaacaagctgctcgtggcaggtgcaaccgttgatgctcgggatctattggatcggaccccggttttttgggcctgcagaggaggccatcttgtgattcttaagcagcttctcaatcagggcgcgcgcgtgaatgcaagggacaaaatcggaagtacaccgctgcatgtcgctgttcgaacccgacacccagattgtctagagcacctgatcgaatgtggggcccacctgaatgctcaggataaagagggagacacagcactgcacgaagcggtgaggcatggctcctacaaagccatgaaactgcttttgctatacggagccgagcttggagtacgaaatgccgcgtcagttacaccggtccaactcgctcgggattggcagcgtggcattagggaggccctgcaggcccacgtcgcccatccccgcacgcgatgctag

SEQ ID NO: 179091 - DNA, 792 bp, synthetic construct
  misc_feature 1..792: note = Description of Artificial Sequence: Synthetic coding sequence
  source 1..792: mol_type = other DNA
atggacttcatcagcatccagcagctggtgagcggcgagcgggtggaaggaaaagttctcggctttgggcacggtgtgccagatccgggagcctggccgtccgactggcgtagaggccctcaggaggccgtcgcccgagagaaactcaaattggaggaagaaaagaaaaaaaaacttgaacggtttaattcgactaggtttaatctggataacttagccgatctggagaatttagtgcagaggcgaaaaaagcgcctccgacacagggtgccgccaagaaagcccgagccactagtcaaactgcatcgtaccgctttgcattgggcctgcttgaagggtcactcccagctagtgaacaaactgctcgttgctggtgccaccgtggatgcccgggatctgcttgaccggacaccagtgttttgggcatgccgtggaggtcaccttgtgatcctaaaacagctgcttaaccaaggcgcaagggtgaacgccagggacaaaattgggtccactcctttacatgtggcagtgagaacgcgacatccagactgtttggagcacctgattgagtgcggagctcatctaaatgcccaggacaaggaaggcgatacagcattgcacgaggctgtgagacatggcagctataaggctatgaagctgttgttattgtacggtgctgagcttggagtccgaaatgccgctagcgtgactccagtacaattagcgagagattggcaaaggggaatcagagaggccttgcaggcacacgtggcacacccaagaacaagatgttag

SEQ ID NO: 179092 - DNA, 918 bp, synthetic construct
  misc_feature 1..918: note = Description of Artificial Sequence: Synthetic coding sequence
  source 1..918: mol_type = other DNA
atggacttcatcagcatccagcagctggtgagcggcgagcgggtggaggggaaagtattaggattcggacatggcgtccccgaccctggtgcatggccaagtgactggcgccgcggcccacaggaagctgtggctcgggaaaaactcaagctcgaggaggagaagaagaaaaagctggaacgtttcaactctacccgcttcaatctggataatctggccgatctggagaacctagtgcagcggcgtaagaaaaggctgcgacaccgagtgccgcctagaaagccagaaccgctcgtgaagcctcagtcccaggcacaggtcgagcctgtgggcctggagatgttcctcaaagccgccgcagaaaatcaggagtacctaattgacaaatacttgacagacggcggcgaccctaatgcccacgacaaactccatagaactgcactgcattgggcctgtctgaaaggacattcccagctagtcaataaacttctcgtcgctggagcaacggtcgatgctagggacttactggaccgaacaccggtattctgggcctgccgaggtggtcatttagtgatcctgaagcagctgcttaatcagggggcaagggtcaatgcccgtgataaaatcggaagcacaccactgcatgtggccgtgaggacgcgccatcccgactgccttgagcacctgatcgaatgcggggctcatctcaacgcacaggataaagagggcgatacagccctacacgaggccgtcaggcacgggtcatacaaggccatgaagctgttgctgctgtatggcgctgaactgggagtgcggaatgccgcaagcgtgactcctgttcagttagcgagggattggcagagaggcatccgggaggctttacaggctcacgtggcccatccgagaacccgctgctag

SEQ ID NO: 179093 - DNA, 3804 bp, synthetic construct
  misc_feature 1..3804: note = Description of Artificial Sequence: Synthetic coding sequence
  source 1..3804: mol_type = other DNA
atgaaccacatgttccacatcaagcggcacagcatcagcgccggcaccgacgcttacaagaagaccaaacctatacagaacctgttccaaaaacccttgtacgatcactgctcagccaacaattataagtcgatggagcctgagctcgagaacgtcagatcatcccctcctaggggggatcgcacatctaaggtttctttaaaagaggaactgcagcaggatatgcaaaggtttaaaaatgagatcgggatgctgaaagtcgaatttcaggcattggaaaaagagaaggtccagctccagaaagaagtagaggaggagaggaagaaacatcggaacaacgagatggaggtgagcgcaaatatacacgacggcgcaacagacgacgccgaggatgatgacgacgacgatgggcttatccaaaagcggaagagcggagagaccgatcaccagcagttccctcgcaaggagaataaggaatacgcatcatcagggcctgccttgcaaatgaaggaagtgaagtcgacagaaaaggaaaaacgcacatccaaagaaagtgttaactctcctgtattcggcaaggcttccctgctcactggcgggctgctgcaggtcgacgatgactcctctctctcggagatagacgaggacgaagggaggccaacaaaaaagaccagtaatgagaaaaacaaggtgaagaatcagattcagagcatggacgatgtggacgaccttacccagtctagcgagactgcctccgaagactgtgaactgcctcactctagctacaaaaacttcatgctgctcattgagcagttgggcatggagtgcaaggactcggtgagtcttctaaagatccaggacgccgcccttagttgcgaacgcctgctggaacttaagaaaaaccactgcgaattgctgacggttaaaatcaaaaaaatggaagacaaggtaaatgtgctgcaaagagagctgtccgagacaaaagagattaagagccaattggaacatcaaaaggtggaatgggaacgcgaactctgctctctgagattctccctaaatcaggaggaagagaagcgccggaatgccgatactctttacgaaaagattagagagcagctgcgccggaaagaggagcagtatagaaaggaagtcgaagtgaagcagcagctggagctgagcctgcagaccctggagatggaactgcgcacagtcaagtccaatctcaatcaggtggttcaggaacgcaacgacgcacagcggcagctctcccgcgagcagaacgccagaatgctgcaggatgggatacttactaatcacttatccaaacagaaagaaattgaaatggcccagaagaaaatgaatagcgagaactcgcattctcatgaggaggagaaggacctgagccataagaattcaatgctgcaagaggagattgctatgcttcgactggaaattgataccattaagaaccagaatcaagagaaggaaaaaaagtgcttcgaagatctgaagattgttaaagaaaaaaacgaagatctgcagaagactatcaaacagaacgaagaaactctgacacagactatttcccaatacaacggcaggttaagtgtactgactgcagagaacgccatgcttaattccaaattagagaatgagaagcagtctaaggaacgccttgaggcagaggtcgaaagctaccacagtaggcttgccgccgcaattcacgacagggaccagtccgagacatcaaaacgcgaactcgagttggcctttcagcgggcgcgggatgaatgtagcaggttgcaggacaaaatgaactttgatgtgtcaaacctgaaagataataatgagatcctgagccagcagctttttaagactgaaagcaaattaaacagcctcgagatcgaatttcaccatacaagagacgctcttcgggagaaaaccctggggctagaaagggtgcagaaagacctaagtcaaacacagtgccaaatgaaggagatggagcaaaagtatcagaatgagcaggtgaaggtgaacaagtacatcggcaagcaggagtccgtggaggaacggctgagtcagcttcagagcgagaatatgcttctccgccaacagctagatgatgctcacaataaggctgataacaaggagaaaactgtgatcaacattcaggatcagttccatgcaatagtacaaaagctgcaggcagagagcgagaagcagagcctgttgctggaggagcgaaacaaggagctcatttccgagtgtaaccacctcaaagaaaggcaataccagtacgagaacgagaaagcggagcgggaggtcgtggtgaggcagctgcagcaggaactagctgacacactgaaaaaacagagcatgtcggaagcttcactagaggtgacctcaaggtaccggatcaatctcgaggacgaaacccaggacctgaagaagaagttggggcaaattcgtaatcagctgcaggaggcgcaggatcgtcacaccgaggcggtgaggtgcgcagaaaagatgcaagatcacaagcagaagctagaaaaggataatgccaaactgaaagttacagttaagaagcaaatggataagatcgaggagctgcagaagaatctgttgaacgctaacctgtccgaggatgaaaaagaacagctgaagaaactcatggaactgaaacagtcactagagtgcaaccttgatcaggaaatgaagaaaaatgtcgagctagagagggagatcacagggttcaagaatctactgaagatgacgaggaaaaagctcaacgaatacgagaatggggaattctccttccacggagatcttaaaacatcccagtttgagatggatatccagataaataaactgaaacataagatagacgacctcaccgctgaactcgagacggccggtagcaaatgcctacatttagacaccaagaaccagattctccaagaagagttgctaagcatgaaaactgtacagaagaaatgcgaaaagctccagaagaataagaagaagctcgaacaggaggtgattaacttgaggtctcacatagagaggaacatggtagagctcggacaggtaaagcagtataagcaggaaattgaggaaagggcacggcaagagatcgccgagaagcttaaggaagtaaatctattcctgcaagctcaggccgctagtcaagagaacctcgagcagtttcgcgagaataacttcgcctcaatgaagtcccagatggagctccgcatcaaggacttagaaagcgagctcagtaagatcaaaacttcgcaggaggactttaataagactgaactagaaaaatataaacaactatacctggaggagctaaaagtgcgaaaatccctatcgagcaaacttacaaaaactaacgaaagactggccgaagtgaacacaaagctgcttgttgaaaagcagcagtcccggagtctcttcacaacccttaccacaagaccagtcatggagcctccttgcgtgggcaaccttaataactccttagatttgaacagaaagctgattccgagggagaatctcgttatctcaacaagcaatccccgggcttccaataatagcatggagaactatctgagcaagatgcagcaggagctcgaaaagaatattacgagggagcttaaagaagccgccgctgagctggaatctggctccatcgcgtccccgctaggcagcacagacgaatctaacctgaatcaggatctcgtatggaaggcatcacgggagtacgtgcaggtgctcaaaaaaaactacatgatctag

SEQ ID NO: 179094 - DNA, 5133 bp, synthetic construct
  misc_feature 1..5133: note = Description of Artificial Sequence: Synthetic coding sequence
  source 1..5133: mol_type = other DNA
atgaagaagatcttcagcaagaagggcgagagccccctgggcagctttgctagacgtcagcgcagcagtgccggcggtgggggcgaacctggagaaggggcgtacagtcagcccggctaccacgttagagacagggatctgggcaagatccacaaggcagcatccgctggaaacgtggctaaggtccagcagatcctgcttctgcgaaagaacggcctgaatgacagggataagatgaacaggactgccctgcatctcgcttgtgccaacggacaccccgaagtggtcacactcttagtggaccgcaaatgccagctaaatgtttgtgataacgagaaccgcaccgccctgatgaaagctgtacagtgtcaggaggagaaatgtgctacaatattactggagcacggagcagacccaaacctggcagatgtgcatgggaacaccgccctccactatgctgtctacaatgaggatattagtgtggcaactaaactactattgtacgatgccaacattgaggctaaaaacaaagatgaccttactcccctgctgttggcggttagtggaaaaaagcagcagatggttgagttcttaattaagaaaaaagctaatgtcaatgcggtcgataagctcgagagcagccaccaacttatcagtgaatacaaagaagagcgcatccctaagcatagcagccagaattctaatagtgtggacgaatcatctgaagattcactgtcccgcctgagtggaaagccaggggtcgacgattcgtggccaactagcgacgatgaagacctgaatttcgatacaaaaaacgtgccaaagcccagcctggcaaaacttatgaccgctagccagcagagccgtaaaaaccttgaggccacctacggcactgtgcgcacaggaaacagaacccttttcgaagatagagacagtgactctcaagacgaagtggttgtggaaagccttcctaccacttcaatcaaagtgcagtgcttctcccacccgacctatcagtcccccgatctgctgccgaagccttcacacaagagtcttgctaacccaggtttgatgaaagaggagcctacaaagcctggtattgccaaaaaggaaaatggcattgacatcatcgagtctgccccacttgagcagaccaacaacgataacctgacatacgtcgatgaggtacacaagaacaatagatctgatatgatgtcagctctcggcctgggccaggaagaagatatcgagtctccttgggacagcgagtcaattagtgaaaactttcctcagaagtatgtggacccactggctggcgcagccgacggcaaggagaagaacattggcaatgaacaggcagaagatgtgttctacataccgagttgtatgagcgggagtcggaattttaaaatggccaaactggaggacacccgcaacgttgggatgcccgtagcacacatggagtctccagaaaggtatttacacctgaagccgactattgagatgaaggactccgttccgaataaagccggaggtatgaaggacgtgcagacctcaaaggctgccgaacacgacctggaagtggcttctgaagaggaacaggagcgtgaagggtcagaaaataaccagccgcaggttgaggaggaacgcaaaaagcaccgtaacaatgaaatggaggtgtctgccaacatccacgatggggcaactgatgacgcagaggatgatgatgatgatgacggcctcatccagaaacgcaagtcaggggagacagaccatcagcagttccctcggaaggaaaacaaggaatacgcaagctctggacctgccctccagatgaaggaggtcaagagtacggagaaagagaaaagaaccagcaaggagagtgtgaattccccagtgtttggtaaggcctcgctgttgaccggaggtcttttgcaggtggatgatgactccagcttgtctgaaatcgatgaggatgaggggcggcctaccaaaaaaacgtcaaatgagaagaataaggtcaagaatcagatccaaagcatggacgatgtggacgacctgactcagtccagcgaaacagcctctgaagactgtgaacttccccactcaagctacaaaaacttcatgctcctgatcgagcagctcggcatggaatgtaaggacagcgtgagccttctgaaaattcaagacgctgctctgtcttgcgagagactactggaactcaagaaaaaccattgtgagcttctcaccgtgaaaatcaaaaagatggaagacaaagtcaacgtgctgcaaagggaattatcagaaaccaaggagattaagtcccagttggagcatcaaaaggtggaatgggagcgagaattgtgcagtctccgcttcagcctgaaccaagaagaggagaagagaagaaatgccgataccctgtatgagaaaatccgagaacagctgaggaggaaggaggagcaatacaggaaggaagtcgaggtcaagcagcagctggagttgtcgctgcaaactctcgaaatggagctcaggaccgtaaaaagtaacctgaatcaagtggtccaggagcgaaatgatgctcagaggcagttatcacgcgagcagaatgctcgtatgctccaggatggcatcctgacaaatcatctctctaagcagaaggagatcgaaatggcccagaagaaaatgaactctgagaactcgcactctcatgaggaggagaaggatctcagccataagaattcaatgctgcaggaagaaatcgctatgctgagattggagatagatactatcaagaaccagaaccaagagaaagagaaaaagtgctttgaagatttgaaaattgtgaaagagaaaaacgaagatctgcaaaagacgatcaagcaaaatgaagagacacttacccaaacaatctcccagtataacgggcgcctgtcagtccttaccgccgagaacgccatgcttaactctaaactagagaatgaaaaacagtctaaggagcggcttgaagcggaggttgaatcctatcatagtaggctcgccgctgccatccatgatcgcgaccaatccgaaaccagtaaacgggaactggagctggcttttcaacgtgcaagagacgagtgcagtcgactccaagacaagatgaactttgacgtcagtaaccttaaagataacaatgagatcttaagtcagcagctcttcaaaactgagtcaaagttaaatagtctggaaatcgaatttcatcatactagagacgctctccgggagaagaccctgggcttagagagagtccagaaggatctcagtcagacacagtgccagatgaaggagatggagcagaaatatcagaatgagcaggtcaaggtgaacaaatacattgggaagcaggagtcagtggaagagcgcctgtctcagctccagagtgaaaatatgctcctccggcagcagttggacgacgcacataacaaagcggataataaggaaaagaccgtgattaacatccaggatcagtttcatgcgatcgtacagaagctgcaggcggagtctgaaaagcagtcgctgctattggaggaacgaaacaaggagcttatttctgaatgcaatcacttgaaggagcggcaatatcagtacgagaatgagaaggccgaaagggaagtggtcgtccgacagctgcagcaggagctggccgatacattaaagaaacagtcaatgagcgaggctagcttggaagttactagtcggtaccgcataaacttggaggatgagacacaggatttgaagaagaaactgggccagatcaggaatcagcttcaggaagcacaggaccggcacactgaggcagtgagatgcgcggagaagatgcaggaccataaacagaagctagaaaaggacaatgccaagctcaaagtgacagttaagaaacagatggataagattgaggagttacagaaaaacctgctgaacgccaacctcagtgaggacgagaaagaacagctgaaaaaattaatggagctgaagcagagcttggaatgtaacctggatcaggaaatgaagaaaaacgtggagctggaacgcgaaatcacaggctttaaaaatcttttgaagatgactcggaagaaacttaacgagtacgaaaacggggagtttagctttcacggcgatctgaaaaccagccaatttgagatggacatccaaataaacaagctcaaacataagatcgatgatctcactgcagagctcgagaccgctgggtcaaaatgcttacatctggacacaaagaaccagattctccaggaagagttactttcaatgaagacagttcagaaaaagtgcgagaagttacagaagaacaaaaagaagcttgagcaggaggtgattaatctgagatctcatatcgaaaggaacatggtcgaactgggacaggtgaaacagtacaaacaggagatcgaggagcgggcgaggcaggaaatcgctgagaagctgaaagaagtgaacctgttcctccaagctcaggcagccagccaggagaatttagaacagtttcgagaaaataatttcgcctcgatgaaatcacagatggagctgagaataaaggatctcgaatccgagttaagtaaaattaagacctcccaagaggattttaataagactgagttggagaaatacaagcagctgtatcttgaggaattaaaagttaggaaatcactgagcagcaagctcactaaaacaaacgaaagattggccgaagttaataccaaactgttagttgagaaacaacagtctaggagcctgtttactaccctgacaacgaggcctgtcatggagccaccatgtgtcggaaatctgaacaactcacttgatttaaacaggaaactgatccctcgagagaacctagtgatatcaacctctaatcctagggcctcaaacaacagcatggaaaactatctctctaagatgcagcaggagctggagaaaaacattactcgggagctgaaagaggccgccgctgagttggagagtggttcgatagcctccccactggggtctactgacgaaagcaacctgaaccaggacctggtatggaaagcctcaagagagtatgtgcaagtcttgaagaagaactacatgatatag

SEQ ID NO: 179095 - DNA, 5181 bp, synthetic construct
  misc_feature 1..5181: note = Description of Artificial Sequence: Synthetic coding sequence
  source 1..5181: mol_type = other DNA
atgaagaagatcttcagcaagaagggcgagagccccctgggcagctttgcccggcggcagagatcatcagcgggcggtggaggcgaacctggggagggagcatacagccagccaggatatcacgttagggatagagatctggggaaaatacacaaggccgcatcagctggtaacgtggcgaaggtgcagcagattctgttgcttcgaaaaaatgggctgaatgaccgagataaaatgaaccgtactgccttacaccttgcctgcgccaatggtcaccctgaggtcgttacacttctggttgaccgaaaatgtcagctgaatgtatgtgacaatgaaaacaggactgccctgatgaaagcagtgcagtgccaggaagaaaagtgcgccaccatcttgctagagcacggggcggacccgaatttggcagacgtgcatggaaataccgctctccactacgccgtgtataacgaagatatctctgtggcgacaaaactgctgctctacgacgccaatatcgaagctaagaataaagacgatcttacacctctgcttctggcggtgtccggcaagaaacagcaaatggtagagttcctcataaagaagaaagcgaatgtcaacgccgtcgataagttggaatcctcacaccaacttatctctgaatataaggaagagagaatcccgaaacacagtagccaaaattcgaattcagtagatgaatcttcagaggattctctgtcctccctgttttatttcatctttttcgaaacaaagagctgtactgtggcacaggctggggtattacagcacgacctctcatctcttcaaagtctgctgccggggtttactcagtttttctgcctacacctcccttcgagttgggaccatcggttgtccggcaaacccggagttgatgactcctggcccacctcagatgatgaggatctcaacttcgatacgaagaacgttcccaagccgtctttagccaaacttatgaccgcaagtcagcagtctcgaaagaatctggaagctacctacggcacggttcgaactggaaatcgaaccctcttcgaagacagggacagtgattctcaggacgaggtggtcgtggaatccttgccgactaccagcattaaggtgcagtgtttctcccatcccacttaccagagccctgatctgcttccaaagccttctcataaatcgcttgcgaaccccggcctgatgaaggaggaacccacaaaacccgggatcgctaagaaggaaaatggaatcgatatcattgagagtgcacctttagagcagactaataatgataacctgacctatgtagatgaagtacataagaataaccggtctgatatgatgtcagccctgggcctggggcaggaggaggatatcgagtccccttgggattctgaaagtatcagcgagaattttccacaaaaatatgtggacccactggccggtgcagctgatggtaaggaaaaaaatattggcaatgaacaggctgaagaatctccggaacgctacttgcacttaaagccgacgattgaaatgaaggacagcgtacccaataaagcaggaggaatgaaggacgttcaaacatcaaaagctgccgagcacgaccttgaggttgccagcgaagaggagcaagagagagagggcagcgaaaataatcagcctcaagtggaggaagagcgaaaaaaacaccggaataacgagatggaagtgagcgcaaatatacatgatggtgctactgacgatgccgaggacgacgacgatgacgacggtctgatccagaaaagaaagagcggggagaccgatcatcagcagtttcctagaaaggaaaataaggaatatgcatcatcgggacctgccttacagatgaaagaggtgaagtctaccgaaaaggaaaagagaaccagcaaagagtccgtaaacagtcctgtcttcgggaaggctagcttacttaccggtgggttgctgcaggtggacgatgactcctcactgagcgagattgatgaagacgaaggccgacccacgaagaaaacatcaaacgaaaagaacaaggtgaagaatcagattcagtccatggacgacgtggacgatctcacacagtcatccgagaccgcctccgaggattgtgaactcccacacagttcttacaagaacttcatgctcctgatcgagcagctgggtatggaatgcaaggactcagtctccctgttgaagatccaagacgctgcgctgtcttgcgagcgccttctggagctgaagaagaatcactgcgagttattgaccgtgaaaattaaaaaaatggaagataaagttaacgtgctgcagcgagagctgtctgaaacgaaggagatcaagagccagctggagcaccaaaaagtggagtgggagcgtgagctgtgcagtctgagattctctctgaaccaggaagaggagaaaaggcggaatgctgacacactctacgagaaaatcagggaacagctcagaagaaaagaggagcagtacagaaaagaggttgaggtgaagcagcaactggaactgtcactgcaaaccttggagatggagctgcggacagttaaatcaaacctgaaccaggtcgtccaggagcggaacgatgcccaaagacagctttcccgtgaacagaatgctcgcatgctgcaggacggcatcctgacaaaccacctgtcaaaacaaaaggaaattgaaatggcccagaaaaagatgaatagcgagaacagtcactctcacgaagaagagaaagacctcagtcacaagaacagtatgttgcaggaagagattgctatgttaaggcttgagattgacacgatcaaaaaccagaatcaggagaaggaaaagaagtgtttcgaggacttaaagatcgtgaaggagaaaaacgaagacctgcagaagacaatcaagcagaatgaagagactctgacacagaccatatcccagtacaatggacgcctgagcgtgttaaccgctgagaacgcaatgcttaattccaaattggagaacgagaagcagagcaaggagcgcctggaggccgaggtcgagtcttaccactcgaggctcgccgctgccatacacgatcgcgaccagagcgagacctctaagagggagctggagctcgcctttcaaagggcgagagacgaatgttcccgcctgcaggataagatgaatttcgacgtcagcaacctgaaggacaataatgagatcctgtcccaacagctcttcaagactgagtcaaaactgaactctttggagatcgagttccatcacaccagggacgccctgagggagaagacactgggacttgaacgcgttcagaaagacctctctcagacccaatgccaaatgaaggagatggagcagaagtaccagaacgagcaagtcaaggtcaacaaatacattggtaagcaggaaagcgtggaggagcggctctctcagttgcaatcagaaaatatgctcttgagacagcagctggacgatgcgcacaacaaggctgacaataaagagaagaccgtcattaacatccaggaccagtttcacgcaatcgttcagaaattacaggccgaaagcgagaaacagtcgcttctgctcgaagaacgaaataaggagttaattagtgagtgcaaccacctaaaagagcgacagtatcagtatgagaacgagaaagccgagagggaggtggtcgtgcgtcagttgcagcaggagcttgctgacactttaaagaaacagtccatgtcagaggcttctctagaagtaactagtaggtaccggataaatctggaggacgaaacccaagacctcaaaaagaaacttggccagatccgcaatcagttacaggaggcacaggacaggcataccgaggcggtgcgctgcgcggaaaagatgcaagaccacaagcaaaaactggagaaagataatgccaagctcaaggtcactgtaaaaaagcagatggataaaattgaggaattgcagaagaaccttctgaacgccaacctgtcagaggatgaaaaggagcagctgaagaagttgatggagcttaagcagagcctcgaatgcaacttggaccaagaaatgaaaaaaaatgtcgaactggagcgagagataaccgggtttaagaatctgctgaagatgacccggaaaaagcttaatgaatatgagaatggagagtttagctttcacggcgatctgaagaccagtcagttcgaaatggatatacagatcaataaactgaaacataagatcgacgacctgactgccgaactcgaaactgccggttccaagtgcctccatctcgacactaagaatcagatcctccaggaagagctgctcagcatgaaaacggttcaaaagaaatgcgagaaactgcagaagaataagaagaaactggagcaagaagtgattaacctccggagtcatatagagcgaaatatggtcgagttgggtcaagtcaaacagtataaacaagagattgaggagagagctaggcaggaaatcgctgaaaagctgaaggaggtgaatctgtttctgcaggcccaagctgccagccaggaaaatttagagcagtttagagagaacaattttgcttccatgaaatctcagatggagctgaggattaaagatctggagtccgagctctctaaaattaaaacttcacaagaagacttcaataaaacggagctagagaagtataagcagctttatctcgaagagctgaaagtccgtaagtctctgtcatccaagctgactaagacgaatgaaagattggccgaagtgaataccaagttgctagttgaaaaacagcagagtcgctccctcttcaccactcttacaacccggcccgtgatggaacctccgtgtgtggggaatctcaataattcattagacctcaatcgaaaactgatcccaagggaaaacttggtgatctccacctctaacccacgagcctcaaacaacagtatggagaactatctttccaagatgcagcaagagctggagaaaaatataactcgggagcttaaagaagccgctgccgagctggaatccgggagtatcgcatcgccccttgggtccactgacgaaagcaatttgaatcaggacctggtgtggaaagcttcacgcgaatatgtccaggtgctcaaaaaaaattatatgatctag

SEQ ID NO: 179096 - DNA, 642 bp, synthetic construct
  misc_feature 1..642: note = Description of Artificial Sequence: Synthetic coding sequence
  source 1..642: mol_type = other DNA
tgattccgggagaacaacttcgccagcatgaagagccagatggagctccgcattaaagatctggaatccgaactgtcaaaaattaaaacttcccaagaggactttaacaaaacagagctcgaaaagtacaaacagctgtacttggaagagctgaaggttaggaagtccctgagctctaaactgactaagaccaacgagaggctcgccgaggtgaatacaaagctcttagttgaaaagcagcaatcaaggtcattgttcacgacattaactactcgtccagtgatggagcctccctgtgtggggaacctgaacaactctctcgatctgaacagaaaactaatacctcgagagaacttagttatctccacatcaaatccccgtgcatcgaataatagcatggagaattatttaagcaagatgcagcaggagctcgaaaaaaatattactcgggaactgaaggaagcggccgccgagttggaaagtggaagcatcgcaagtcctctgggctccacggatgaatctaacctgaatcaggatctggtgtggaaggcatccagggaatatggacccagtgacgagaccccacatgattacgtgctgatgacggaccaatgcctcacatcccggactgatctccagtag

SEQ ID NO: 179097 - DNA, 3261 bp, synthetic construct
  misc_feature 1..3261: note = Description of Artificial Sequence: Synthetic coding sequence
  source 1..3261: mol_type = other DNA
atgagccgggtgtgcatcgtggtgctggaggaggtggaggacgagtcacccgcatttatctctaagctgcctcaggagaataaatcccttcattcacccccctcagggaacgttctcgtcaggtatccgtccctcgtgcaggcaatattcaatggcgacccggatgaagttcgggcattaatttttaagaaggaggacgtcaatttccaagacaacgagaagcggacccccctccatgctgccgcctatctgggcgatgctgagatcatcgaacttttgatcctgtccggggctcgggtgaatgcaaaagattctaagtggctgacgcccctccacagggccgtcgcctcttgttccgaagaggctgtgcaagtcctgctcaagcactcagccgacgtgaatgcgcgcgacaagaactggcaaacccctctgcacatcgccgcagcgaacaaggccgtaaagtgtgcagaggccctggtgccacttctgagcaatgtcaacgtctcagatagagcaggacggactgcattacaccacgctgccttctccggtcatggcgagatggtcaaactgctcctgagcagaggtgccaacatcaatgccttcgataaaaaggaccgaagggcgatccactgggcagcctacatggggcacattgaggtcgtgaaactgttagtgtcgcacggcgctgaagttacctgtaaagacaagaagtcctacacgccactgcatgctgcagccagctccggaatgataagtgtggtgaagtatttacttgatttaggagtcgatatgaacgagcccaacgcctatgggaacaccccccttcacgtggcctgctacaacggccaggacgtggttgtgaatgagttgatcgactgtggagccatcgtaaatcaaaagaacgagaagggattcacgcctctgcactttgccgcagcatcgacccacggagcactctgtctagaactgctcgtgggaaatggcgctgatgtgaatatgaagagcaaggatggtaaaactcccttacatatgaccgcactccacggcaggttctctaggagccagaccattatccagagcggtgccgtgatcgactgtgaggacaagaatggcaacactcctttgcacatagcagccaggtatggacatgaacttttgatcaatactctgataaccagcggtgccgacaccgcaaagcgtggcattcacggtatgtttccattgcatctggccgccttgagtggttttagcgactgctgcagaaagctgttatcgtccgggtttgacattgacacacctgatgactttgggagaacttgcttacatgccgcagcagccggtggaaatctggagtgcctgaatctcttgctgaataccggtgccgactttaacaagaaagacaaatttggaaggagcccgctgcattatgcggccgccaattgcaattatcagtgtctgttcgcactcgtaggaagtggtgcaagcgtgaacgacctcgacgaacgggggtgcacccctctgcactatgcagccacaagtgataccgacggaaagtgcctggagtatctgctgagaaacgacgcaaacccgggaattcgcgataagcagggctataatgccgttcattattccgctgcatacgggcataggctgtgcctgcagctaatcgcgagcgaaacacccttagacgtgttgatggaaacttccgggaccgacatgctttccgactctgataacagggccactatcagtccgctgcatctggctgcataccacggccatcaccaggccctggaggtcctggttcagtcacttttggatcttgacgtgagaaatagctccggaagaactcctctagacctagcggcttttaaaggccacgttgagtgtgtggacgtgctgatcaatcaaggggccagcattttggtcaaagactacatactgaaacgcacccccatccacgcagccgctaccaatggccactccgagtgtctcagacttctgattgggaacgctgaaccccagaacgcagtggacattcaggacggaaatgggcagaccccgcttatgctgagcgtcttaaacggtcacactgattgtgtgtatagtcttctgaataagggtgctaatgtggacgccaaggacaagtgggggagaacagccctgcaccggggggctgtgacagggcatgaagaatgtgtggatgccctgcttcagcatggtgcaaagtgcctgctgcgagatagccgcggcagaacccctatccatctgagcgccgcctgtggccatataggcgtgctgggcgcattactgcaatccgcagcttcaatggatgcaaatcctgctacagcagataaccatggctacaccgccctccattgggcctgctacaatggccacgaaacttgcgtggagctcctcctcgaacaggaagtcttccagaagactgagggcaacgccttctcccccctccattgcgctgtcatcaacgacaatgaaggtgccgctgagatgctcatagatactctcggcgcctccatcgtgaatgccactgactcaaaaggtcgcacaccgctgcatgcagcagctttcacagaccacgtggaatgtctgcagttacttctgtcccacaacgcccaggtgaatagcgtggattccaccggtaaaaccccattgatgatggcagcagagaacggacagacgaatactgtcgagatgctcgtcagctcagccagcgccgagctgactctgcaggacaactctaaaaacaccgccttgcacttggcctgctcaaaaggccatgagactagcgccttgctcatcctggagaagattaccgatcggaatctcattaacgcaactaacgcagctctgcagacaccactgcatgtagccgctcgcaacggcctcactatggtggtgcaggaattgctggggaagggagcgtcagtgctggctgttgacgagaatgggtacactcctgctctggcttgtgcgcctaacaaggacgtggcagactgcctggccctgatcctcgccaccatgatgccagtcagctctagcagtccacttagctccctgacattcaatgccatcaaccgctacaccaacacctccaagactgtctcatttgaggctctgcctatcatgcggaatgagcccagcagttactgttcatttaataacatcggcggagagcaggaatatctgtacactgacgtggatgagctcaacgattccgactccgaaacatattag

SEQ ID NO: 179098 - DNA, 3162 bp, synthetic construct
  misc_feature 1..3162: note = Description of Artificial Sequence: Synthetic coding sequence
  source 1..3162: mol_type = other DNA
atggccttcctgaagctgcgggaccagcccagcctggtgcaggccattttcaatggcgaccccgatgaagtgcgtgctttgatattcaagaaagaggatgtaaatttccaggataatgagaaaagaaccccactgcatgccgccgcttatctgggagacgctgaaattattgaactcctgattttgagcggtgcgcgtgtgaatgcaaaagattcaaagtggctgacaccgcttcacagggctgtggccagttgcagtgaggaggcagttcaagttctgttaaagcactccgcagatgtgaatgcccgggacaagaattggcagacgcctcttcacatcgcggctgccaacaaagctgtcaaatgcgctgaagctctggtcccactgctcagtaatgtcaatgtgtccgatcgggccgggaggactgcactgcaccatgccgccttcagtgggcacggagagatggtgaagctactgctctcacgtggggctaatatcaatgcatttgacaaaaaagatagacgggccatacattgggcggcttacatgggccatatcgaagtcgtcaaattgctcgtgtcacatggagccgaggtcacctgcaaggataagaaatcttatacccccctgcatgctgcagcaagctcaggaatgatatcagtagtcaagtaccttttagacctcggcgtggacatgaatgaacctaacgcttacggaaatacacccctgcacgtggcatgctacaacggacaggatgtcgtagtcaatgagttgattgattgtggagcaattgtaaatcagaaaaatgagaagggcttcacaccactgcatttcgcggccgctagcactcacggtgctctgtgtttggaattgctagtcggaaatggcgctgatgtgaatatgaagagtaaggacggaaaaacacctctccacatgacagccttgcatggacggttctcaagatcacagacaataatccagagcggggcagtgattgattgcgaggacaagaacggcaacacacctctgcatattgccgcacggtacggtcatgaattactaatcaatacccttatcaccagtggagccgataccgctaaaaggggaatccacggaatgttccccctgcacctggcagccctctccgggttctccgactgttgtagaaagctgctgtccagcgggtttgacattgacactccagatgactttggaagaacctgtctccatgccgcagctgcaggcgggaacttggagtgcctcaacctcctgcttaacacgggggcagattttaacaagaaggacaaatttggcaggtctccacttcattacgccgccgccaattgcaattatcagtgtttattcgcccttgtcgggtccggggcttcagtgaatgatcttgatgagcgaggctgtacgccattacactatgccgcgacttctgacacggacgggaagtgtcttgaatacttgctgcggaacgatgccaaccccggcattcgggacaaacaggggtacaatgctgtgcactacagcgcggcttacgggcataggctctgcctgcagctcattgcaagcgagactcccctcgacgtgttaatggaaacatctggcactgacatgctatccgacagtgacaatcgcgccacaatttccccacttcatttggccgcgtatcatggacaccaccaggctttggaagtgctggtacagtctctcctggacctcgacgttcggaattcctctgggagaactcctctcgacctggctgcgtttaagggccacgtggagtgtgtggatgtgcttatcaatcaaggagctagcatcctggtgaaggattatattctgaagcgcacaccaatccacgcagcagctacaaatggacatagtgaatgcctaaggctgcttatcgggaacgctgagcctcagaatgcggtggacattcaggatggcaatggtcagacgccactgatgctttctgttttgaatggtcacactgattgcgtctacagtctcttaaacaaaggcgccaacgtggacgccaaagacaagtgggggagaacagccctgcaccgtggggccgtcactggccatgaagaatgtgtggatgctctcctccagcatggtgccaagtgcctgctgagggattcccgaggtcggacacctatccacctgtccgcagcatgtgggcacataggggttctgggcgcactgctacagagtgcggcctctatggacgctaaccccgctaccgcagataaccacgggtacaccgctctccactgggcctgttacaatggacacgagacgtgtgttgagctgctgcttgaacaggaggttttccagaagactgaaggaaacgcattttccccactgcattgcgccgtgataaacgacaacgagggtgccgccgagatgctgatagatacgctcggagccagcatcgtgaatgccacagattccaaaggcagaacccccttgcacgcagccgcatttaccgatcacgtggagtgcctgcagcttttgctgagccataatgcccaggtgaacagtgtcgactccacgggcaaaactcccttgatgatggcagcagagaatggccaaactaacaccgtcgagatgcttgtgtcctctgcctcggccgagctcaccttgcaggacaactccaagaacaccgctctgcacttagcttgctccaaaggtcacgagacctccgctctgctgattctggaaaaaatcaccgacaggaacctaattaacgctactaacgctgcactgcaaaccccactgcacgtcgccgccaggaatggcctgaccatggtggtccaggagttgctgggtaagggggcttctgtgcttgcagtcgacgagaacggatacactcctgccctggcctgtgcgccaaacaaggacgtcgccgattgcttggccctcattctggcaacaatgatgccggtgtctagcagcagtcctcttagcagcctgacattcaatgcaatcaatagatacactaatacatccaagactgtatcctttgaagcactgcccattatgcggaacgagccgtcttcatactgttcatttaacaatataggaggagagcaggaatatctctacacagatgttgacgaactgaacgattcagattcagaaacgtattag

SEQ ID NO: 179099 - DNA, 3162 bp, synthetic construct
  misc_feature 1..3162: note = Description of Artificial Sequence: Synthetic coding sequence
  source 1..3162: mol_type = other DNA
atggccttcctgaagctgcgggaccagcccagcctggtgcaggccattttcaacggcgaccccgatgaggtgcgagcccttatctttaaaaaagaggatgttaatttccaggacaatgagaaacgcacaccccttcacgctgcggcttatcttggggacgccgagattatcgagcttctgatcctgagcggcgctcgcgttaatgcaaaggactccaaatggttaaccccccttcatcgcgccgtcgctagctgctcagaagaggcggtgcaggtgctccttaagcattccgccgacgtgaatgcccgtgataagaattggcagacaccgcttcatattgccgccgctaacaaagctgtgaagtgcgcagaagcactggtaccattgctgagtaatgtgaatgtgtccgaccgagctggtcgcaccgcactccaccatgctgctttttccggtcacggggagatggtaaagcttctcctgtctcgtggcgccaatatcaatgcatttgataaaaaagacaggagagcgattcattgggcagcatacatgggacacattgaagtggttaaactcctggtcagtcatggagccgaagtgacctgcaaagacaaaaagtcctacacaccactccatgcagctgcgagctcggggatgataagcgtggtgaagtacctgttggacctaggggtcgatatgaacgagccaaacgcctacggcaatactcccctccatgtggcatgctataatgggcaggatgtcgtggtgaatgaactgatcgactgtggagcaattgtcaaccagaagaacgagaaaggattcacccccctgcattttgccgctgcatccactcatggcgcactttgcctcgagctgttggtcgggaatggcgccgatgtgaatatgaagtctaaagatggcaaaacccccttacacatgaccgcattgcatggtaggtttagccggtcccaaaccatcattcagtcaggtgccgtgatcgactgtgaggacaagaacggaaacacaccactgcacattgccgctaggtatggtcacgagctgctgataaataccctgataacatccggcgcagatacagcgaaacgtggtatacatgggatgttccctctgcatctggctgccctgtccgggtttagtgattgttgccgaaagctgctttcctctggatttgacatcgacaccccggatgacttcggacggacttgcctgcatgccgccgccgccgggggcaaccttgaatgtctcaatcttctgcttaacaccggcgctgattttaataaaaaggacaagtttggcaggagccccctccactatgccgccgccaactgcaactaccagtgccttttcgccctcgtcggatccggcgccagcgtcaatgatctggatgagcgggggtgcacacccttgcactacgcggcgacatctgatacagacggcaagtgtttggagtacctgttacggaatgatgccaatcccgggataagagacaagcagggctacaatgcggtacactattccgcggcatatggccatcgcttatgcctccagttgatagcaagtgaaacccccctcgatgtgctgatggagacatccggaactgacatgttgtcggactctgataaccgggccactatctcccctctgcatctcgccgcctaccacggacaccatcaagctctggaggtgttagtgcagagtttgctcgacctggacgtcagaaatagctctggaaggaccccattggatctggctgcttttaaggggcacgtcgagtgtgttgacgtgctcataaaccagggcgcatctatcctggtaaaagattacattttgaagcggacccccatccacgctgccgctacaaatgggcactccgagtgtctcagactgctgatcggaaatgccgagccccagaatgcggtggacatacaggatgggaatgggcagacaccattaatgcttagtgtactcaatggccacaccgattgcgtgtattcgttgctgaacaagggtgctaatgtagatgctaaggacaaatggggtcgcacggctcttcatagaggtgctgtgactggacatgaagaatgcgtggatgccttattacagcatggcgccaaatgtctgctgagagacagccggggtagaacccccatccacttatctgcagcttgcggtcacataggggtcctcggagctctgctccagagtgcagcctctatggatgccaatcctgccactgccgacaatcacggctatacggctctgcattgggcatgctacaacggacatgaaacttgtgtcgagttactccttgagcaggaagtttttcaaaagaccgagggtaatgcgttttccccactccactgcgccgtgatcaacgataacgagggagccgcagaaatgttgattgatacactgggagccagtatcgtgaacgctacggattcaaagggtcgaacccccctgcacgctgccgccttcaccgatcacgtcgaatgcttgcaactgttactgagtcacaatgcacaggtgaactctgtggatagcaccggcaagacacccctcatgatggccgccgaaaacggccagactaacacggttgaaatgctcgtgtcttcagccagtgctgaactgactctccaggataactctaaaaacactgcactccacttggcctgttctaagggacacgaaacgagcgcactgctgatattagagaagataaccgacaggaatctgataaatgccactaatgccgccctgcagaccccactacacgtggcagctcgaaacggcttaacaatggttgttcaggagctgctagggaaaggggcttctgttcttgctgtggatgagaacggttacacgccagcccttgcctgcgctcccaataaagatgtagctgactgtctggcattgattctggccacaatgatgcccgtgtcttcaagcagccccctctcgtcattaacatttaacgcaattaatagatataccaacaccagtaaaactgtgtcatttgaggcattgccaatcatgagaaacgaaccctcctcatactgctctttcaataacataggcggagaacaggagtatctgtatacagacgttgacgagctgaatgattccgattcagaaacgtactag

SEQ ID NO: 179100 - DNA, 4026 bp, synthetic construct
  misc_feature 1..4026: note = Description of Artificial Sequence: Synthetic coding sequence
  source 1..4026: mol_type = other DNA
atgaccaagcggaagaagaccatcaacctgaacatccaggacgcccaaaaaagaaccgctttgcattgggcctgcgttaacggccacgaagaggttgtgaccttcctagtagacagaaagtgtcagctcgacgtcctagacggagaacataggaccccccttatgaaggcacttcagtgccatcaagaggcctgtgccaacattctgatcgatagcggcgcagatattaacctggtagacgtgtacggtaacactgctctgcactatgccgtgtactccgagatactcagtgtggtggctaagctgttgagccacggcgcggtcattgaggttcataacaaagccagcctcacccctctgctgctgagcatcaccaaaagatctgaacagatcgtggagtttctgctgatcaagaacgccaacgccaatgccgtgaataagtacaaatgcacagccctcatgctggccgtatgtcatggtagctccgaaattgttggtatgctattgcagcagaacgtggatgtcttcgccgcagacatctgcggggtgactgcagagcattacgctgtcacttgtggttttcaccatatccatgagcaaattatggaatacatcagaaagctctcaaaaaaccatcagaataccaatcctgaggggactagcgccgggaccccggatgaggccgcccccctggccgaacgcacccccgataccgcggagtccctcgtggagaagacacctgatgaagccgctccgctggttgaaagaacgccggatacagccgaatcactcgtggagaagacgccagatgaagcggcctctctggtagagggcacaagtgacaagattcaatgcctcgaaaaagccacaagcggcaagtttgaacagagcgctgaggagaccccccgtgaaattacctcgccagccaaagagacgagtgagaaatttacttggcccgccaaaggccgacccagaaagatagcatgggagaaaaaagaggatactcctcgggagatcatgtcgcctgcaaaggagacgtctgagaaatttacctgggctgcaaaggggagacccaggaagatcgcttgggaaaagaaagagactcccgttaaaaccggttgtgttgctcgggtgacaagcaacaaaactaaagtgctggagaaaggccggagtaagatgatcgcttgtccaaccaaagaatccagtacgaaagcgtccgcaaacgaccagagattccctagcgaatccaaacaggaggaagatgaggagtatagttgcgattcccgatccctcttcgaatcctcagccaaaatacaggtctgcattcccgagagcatctaccaaaaagttatggagatcaaccgcgaggtcgaggaaccgcccaagaaaccatccgctttcaagcccgccatagaaatgcagaacagcgtacctaataaggcctttgaactgaagaacgagcagacattacgagcggaccccatgttccctcccgagtctaagcagaaagactacgaagaaaacagctgggacagtgagagtctgtgcgaaaccgtgtctcagaaggacgtttgtctgccaaaggctacccatcagaaggagatcgataagattaacggtaaactcgaggagtcaccgaacaaagacgggctgctgaaggctacttgcggcatgaaggtctctatccctacgaaagccctggaacttaaggacatgcagacctttaaggcagagcctcctgggaaacccagtgccttcgagccagctaccgagatgcagaagtccgtacccaacaaggcacttgagttgaagaatgaacaaacactacgcgctgacgagatccttccaagtgaaagtaagcaaaaagattacgaggagaattcttgggatactgaaagtttatgtgaaaccgtgtcccagaaggatgtgtgtctcccgaaggctgcacaccagaaagaaatcgacaagattaatgggaagctcgaaggcagtcctgtaaaggatggattacttaaggccaactgcgggatgaaagtttccatccctaccaaggcactggagcttatggacatgcagacctttaaggctgaacctccggaaaaaccctcagccttcgagcctgctattgagatgcagaagtccgttcccaataaagcattagaattgaaaaatgagcagactttacgggctgatgaaatacttccaagcgagagcaagcagaaagactacgaagaaagctcgtgggattctgagtccctgtgcgaaaccgtctcacagaaggacgtctgccttcccaaggctacacaccagaaggaaatcgacaagattaacggcaagctcgaggagtcaccagacaatgatgggtttcttaaggctccatgccgcatgaaagtcagcattccaacaaaagctttggagctgatggatatgcagacttttaaggccgaacccccagaaaaaccctccgcattcgaaccggccatcgagatgcaaaagtccgtgccaaataaggccctcgaactgaagaatgaacagacactgcgtgctgatcagatgtttccaagcgagtcaaaacagaagaaagtggaggaaaacagttgggactccgaatctctgcgtgaaaccgtctcacagaaagacgtgtgcgtccccaaagctactcatcagaaggaaatggacaaaatcagtgggaaactagaagacagcacgagcttatccaagatcttggacacagtgcactcttgcgagagggcaagagaacttcagaaggatcattgcgagcaaagaaccggtaaaatggagcaaatgaagaagaagttctgcgttctgaaaaagaagttaagtgaagccaaggagattaagtcacaattggaaaaccaaaaagtcaagtgggaacaggagctgtgctccgtgcggctgacgctgaaccaggaagaagaaaaaagaaggaatgcagatatcctcaacgagaagatccgcgaagagctgggcagaattgaagaacagcaccgaaaggagctcgaggtgaaacagcagctggaacaagccttaagaatccaagacattgagctgaaaagcgttgagtcaaatctgaaccaggtctctcatacacacgagaacgagaactatttgttacatgaaaactgcatgttgaaaaaggagatcgcaatgctgaagctagagatcgccactctaaaacatcagtatcaggaaaaggaaaacaaatacttcgaagatattaagatcctcaaggagaaaaatgcagagctgcagatgaccttaaaattgaaagaagaaagcctgacaaaaagagcttctcagtattccggtcagttaaaagtgctgattgcagaaaataccatgctgacgagtaagctcaaggagaaacaggacaaggaaattctggaggccgaaatcgagtcacatcaccctagactggcctctgctgtgcaagaccatgaccagatagttacaagtcggaagtctcaagagccagcgttccacatagcaggcgacgcttgcttgcagagaaagatgaacgtggatgtgtcaagtactatatacaacaatgaggtgttgcaccagcccctcagcgaagcacagcgcaagtccaaatcattgaagatcaacttgaactacgccggtgatgcattgcgtgagaacacccttgtgagtgaacatgcacaaagagatcaaagagaaacccaatgccaaatgaaagaagccgagcatatgtaccagaacgaacaggacaatgtgaacaaacatacagagcagcaggaaagcctggatcagaagcttttccagctacagtctaaaaatatgtggctgcagcagcagctggttcacgctcataaaaaagcagacaacaagagcaaaatcacaatcgatatacacttcctcgaaagaaagatgcagcaccacctgctgaaggagaaaaatgaggagatcttcaactataataaccatttgaagaatcgtatttaccagtatgagaaggagaaggccgaaacagaaaacagctag

SEQ ID NO: 179101 - DNA, 360 bp, synthetic construct
  misc_feature 1..360: note = Description of Artificial Sequence: Synthetic coding sequence
  source 1..360: mol_type = other DNA
atgggcacccggaccctgcagttcgagatcagcgacagccacgagaaggaagaggatctgctacacaagaaccacttaatgcaggacgagatcgcacgcctgcgtcttgaaatccacactatcaaaaatcagatactagagaaaaaatatctgaaagatatcgaaataattaagcgcaaacacgaggatcttcagaaggcactaaaacagaacggagagaagagcaccaaaaccatcgcccactattccggacagctgacagccttaaccgatgaaaacacaatgctccgttctaagctggagaaagaaaaacaatctaggcagcgcctcacaaagtggaatcacacgatcgttgattag

SEQ ID NO: 179102 - DNA, 759 bp, synthetic construct
  misc_feature 1..759: note = Description of Artificial Sequence: Synthetic coding sequence
  source 1..759: mol_type = other DNA
atgagccaggccgccaaggccagcgccagcgccaccgtggccgtgaatccagggcctgacacaaaagggaaaggtgctccgccggctggcacttctccttcaccaggaacaacattggcacctactacagtgcctatcacctcggccaaagccgctgagttgccccccggcaactatcgacttgtcgtgttcgagctggagaactttcagggacgcagggctgagttttctggagagtgttctaatctggccgatcgtggctttgatagggttcgctccattatcgtgtctgctggaccttgggtagcttttgaacaatcaaatttcaggggagaaatgttcatcctggagaaaggggaatatccgagatggaacacatggtcaagttcctataggagtgaccgcttaatgagctttcgcccaattaaaatggacgcccaggaacataaaatcagcctgttcgaaggggccaattttaagggcaacacgattgaaatccagggggatgacgcgccttctctatgggtttatggcttttccgatcgcgtgggatccgtgaaggtgtctagtggtacatgggtagggtatcaataccccggctatcgcggataccagtatctgctggagcccggcgatttccgacattggaacgaatggggggccttccagcctcagatgcagtctttgagaaggttgagagataaacagtggcatcttgagggttccttccctgtcttagccacagaacctccgaaatag

SEQ ID NO: 179103 - DNA, 627 bp, synthetic construct
  misc_feature 1..627: note = Description of Artificial Sequence: Synthetic coding sequence
  source 1..627: mol_type = other DNA
tgacgggacgagctgcggtgcaagatccccgccggccggctgcggcgggctgctcgtccgcataggcggcttggccctactgggaaggaggtgcatgcactgaaaaggctcagggacagcgctaacgccaacgatgtcgagactgtccagcaattgctggaagatggggcagacccatgcgctgcagatgacaagggaagaactgcccttcattttgcatcctgtaatgggaatgaccagatcgtgcagctgctgctcgatcacggggccgacccgaaccaacgcgacggtctagggaatactccactacacctggagtgttctccacagcttgtaccagcgggggcacgtgtggacgctctcgaccgcgctgggcgaactcccctccatctggccaaaagtaagttgaacatccttcaggagggtcacgcacagtgtctggaggcggtcaggctggaagtgaaacaaattatccacatgctgagggagtatctggaacggttgggtcagcatgagcagcgagaacggctagacgatctgtgcacgaggcttcaaatgacttcgactaaggaacaggtcgacgaggtcaccgatctactggcctcctttacttcgctctccctctag

SEQ ID NO: 179104 - DNA, 2184 bp, synthetic construct
  misc_feature 1..2184: note = Description of Artificial Sequence: Synthetic coding sequence
  source 1..2184: mol_type = other DNA
atgagccagcaggacgccgtggccgccctgagcgagcggctgctggttgccgcctacaaaggtcagactgagaatgtagttcagcttattaacaaaggcgcccgcgtcgccgtaaccaagcatggtcgaacaccactgcaccttgccgccaacaaaggccatctgcctgtcgtccagatcctgttaaaggctggctgcgacctggacgtgcaggacgatggcgaccaaaccgcgctccatcgtgccacagtggttggaaacaccgaaataattgccgcgctaatccacgagggctgcgcgctcgacagacaggataaagatggtaataccgcactacacgaggcctcgtggcacggctttagccagtccgccaagctgttgatcaaagctggggccaacgtcttggccaaaaataaagcaggcaatacagctctgcacctcgcctgtcagaacagtcactcgcaaagcacaagggtgttactactcgcgggatctcgagccgatctcaagaacaatgccggagacacttgccttcatgtggcagctaggtataatcacctcagcattatccgacttttgctaacagctttttgttctgtacacgagaaaaaccaggcgggcgataccgccctccacgtggccgccgccctgaatcacaagaaagtagcaaagatattgctcgaggcaggcgcggatacaacaatagtgaacaatgccggacaaactcccctcgaaaccgcccgctaccataataatcccgaggtggcgctgctgctgaccaaggcaccccaggttttgcgattctctcggggacggagtctcagaaaaaaacgcgagagactcaaagaggaacgccgagcccaaagcgtcccccgggacgaagtggctcagtctaagggctccgtcagcgccggggatactccaagcagcgagcaggctgttgcccgtaaagaagaggctcgggaagagttcttgagcgcttctcccgaaccgcgggccaaggatgatcgccggaggaaaagccggccgaaggtgtcggctttttcagatcctacgccacccgccgaccagcaaccaggccaccagaaaaacctgcatgcacacaatcaccccaagaagcggaaccgccaccggtgctcgtccccgcccccgccccacgagtttcgcgcgtatcagctgtacaccctgtaccgggggaaggatggaaaggtgatgcaggcacctattaacgggtgtaggtgcgagcccctgattaacaagctggagaatcagctcgaagctaccgtggaagaaataaaagcagagctaggctcagtgcaggataaaatgaacacaaagttagggcagatggaaaataaaacccagcatcagatgcgggttctggataaactcatggtcgaacgcctaagcgctgagcggacagagtgtttgaatagacttcaacagcatagtgataccgaaaagcatgagggcgagaaacggcaaattagtcttgtcgatgagctaaaaacctggtgtatgctaaaaattcagaatcttgagcagaagctcagcggtgactcacgtgcctgtcgcgccaagagtaccccaagcacttgtgaaagttcaacaggcgtagaccagttggttgtgacggcagggcctgcagccgcatcggatagcagtccccccgttgtgcgtcccaaggagaaagcactgaattccacagccacacagagattacagcaagaattatccagctccgactgcacaggcagccgacttcgtaacgtgaaggtgcaaacagccctgctgcccatgaacgaggcggcacgttcagaccagcaagccggcccgtgcgttaaccgtggtactcagactaaaaagtctggcaagagtggaccaactaggcaccgggcccagcagcccgctgcatcatctacctgcggccagccgccacctgccactggtagcgagcagactgggccacatatcagggatacctcccaggccctagagcttacacagtacttctttgaggcggtctctacccaaatggaaaagtggtacgagcggaaaattgaggaggctcgatctcaggccaatcagaaagcccagcaggacaaagctacactcaaggaacacatcaagagcttggaggaagagcttgctaaattgagaacaagagtgcagaaagagaactag

SEQ ID NO: 179105 - DNA, 2079 bp, synthetic construct
  misc_feature 1..2079: note = Description of Artificial Sequence: Synthetic coding sequence
  source 1..2079: mol_type = other DNA
atgagccagcaggacgccgtggccgccctgagcgagcggctgctggtggcagcctataagggtcagactgagaacgtggtacagctgattaataagggggctcgtgtagccgttactaagcatggacgaacaccccttcacctggctgctaacaagggccacctgcctgtagtacagattttgctgaaggcaggttgcgatctggatgtgcaggacgacggtgatcaaacggccctccaccgggccactgtcgtggggaatacagaaataatcgcagccctgatccacgaaggatgtgctcttgatcgacaagacaaggacggtaatactgccctgcacgaggctagctggcacggattttcacagagcgcaaaacttctgatcaaggccggggcaaacgtccttgcaaagaacaaggctggcaacaccgcactccacttagcctgccaaaattctcattcccaatcaacaagagtcctcctgctagccgggtctagagccgacctgaaaaacaatgctggcgatacctgcttacatgtcgcggccagatataaccatctgtcaattatccggctccttctgaccgcgttctgttccgtgcacgagaagaaccaggccggcgatacagcgctccacgttgctgcagccctcaatcataagaaggtcgcaaaaatcttgctggaggctggcgccgatactacgatcgttaataatgccggacaaactcctctggaaactgcccgataccacaataatcccgaggtcgctctgttgttaacaaaggctccccaggggtccgtcagtgccggagacactccatcatctgagcaagcagttgctaggaaagaggaggccagggaagagttcctttccgccagtcctgagcctagggctaaggatgatcgccgtaggaagtctcgtccaaaggtctcagccttctcagatcccacccctcctgcagaccaacagccgggccaccagaaaaatttgcatgctcacaatcatccgaaaaaaaggaacaggcatagatgcagcagtccaccccccccacacgagtttcgagcatatcagctatacacactgtatagggggaaagatggcaaggttatgcaggccccaatcaacgggtgccgctgcgaacccttgatcaacaagctcgaaaaccagttggaggctaccgtagaggagattaaagccgagctgggctctgttcaggacaaaatgaatacaaaactcggacagatggagaataagacacagcatcagatgagagtgttagataagctgatggtcgagaggttgtccgctgaaaggaccgagtgcctcaatcgactgcagcaacattccgacaccgaaaagcacgagggcgagaaaagacagattagtttggtggacgaactgaagacctggtgtatgttgaaaatacaaaacctcgagcagaaactgagcggtgattctagagcgtgccgtgccaagagcacaccgtctacttgtgagagttccaccggcgtagatcagcttgtggtgacagctggaccggctgccgcctcggacagctctccccccgtagtgcggcccaaggaaaaggcattgaattctacagccacccaacggcttcaacaggagcttagcagctccgattgcacaggctcgagattgcgcaacgtgaaagtccagaccgctcttctaccaatgaacgaggcagcccgctccgatcagcaagctggaccctgcgtcaataggggcacccaaaccaaaaagagcggaaaaagtggtcccaccaggcatagagcccagcagcccgctgcaagctccacttgtggccagcccccacctgccactgggtctgaacagacgggtccccacatccgcgacacctctcaggcccttgagttaactcagtatttcttcgaagcggtgagtacccaaatggaaaagtggtatgaaagaaagatagaggaagcccgcagtcaggctaatcaaaaggcccaacaagacaaggccacactgaaagaacacatcaagtccctcgaggaggaactagccaagttacgcacccgcgtgcaaaaggaaaattag

SEQ ID NO: 179106 - DNA, 2169 bp, synthetic construct
  misc_feature 1..2169: note = Description of Artificial Sequence: Synthetic coding sequence
  source 1..2169: mol_type = other DNA
atgagccagcaggacgccgtggccgccctgagcgagcggctgctggtggcagcctacaaggggcagaccgaaaacgtcgttcaactcattaataaaggcgcacgggtggctgtgactaagcatggcaggaccccactccacctggcagcaaataaggggcatctcccagtggttcaaatcctgctgaaggctggttgtgatcttgacgtgcaggatgatggcgatcagactgccctgcacagagcaaccgttgtaggtaatactgagattattgccgctctaatccacgagggctgcgcacttgataggcaggacaaggatgggaatacagcgctacacgaagctagctggcacgggttttcgcagtctgctaagttattgattaaggccggagcgaatgtgctggctaagaataaggcaggcaacacggcccttcacttggcctgccagaattcgcattcccagagtactcgagtgctgctattagccggttctcgtgccgatcttaagaataacgccggagacacatgcctccacgtggccgccaggtacaaccatctcagcataatcagactcctcctcactgctttttgttctgtgcatgaaaaaaatcaggcgggcgacactgccttgcatgttgctgccgcactcaatcataaaaaggtcgcaaagatcctgctggaggccggcgcagatactacaatcgtcaacaatgctgggcaaaccccactggagaccgcaaggtaccacaacaaccccgaggtcgccctgttattgacgaaagctccacaggttctacgctttagtcgtggacggtcattgaggaagaagcgcgaacggctcaaagaggagagaagggctcagagcgtgccaagggacgaagtagcccagtcgaaaggttctgtgtctgccggggatacaccctctagcgagcaggcggtcgcccgcaaggaagaggctagagaggaatttctgtcagcctccccggaacctcgggccaaggatgacaggagacgcaaatcacgcccaaaggttagcgccttctctgacccgaccccacccgcggaccagcaacctggtcaccagaaaaatctccacgcgcacaatcaccccaagaaaagaaatcgccatcgctgcagttccccgccacctccacacgaattccgggcttaccagctttacaccctctatcgaggcaaagatggaaaggttatgcaagcgcccatcaatggatgtcgatgtgagcctttaatcaataaactcgagaaccaactggaagccactgtggaggaaatcaaagcagagcttggctctgtgcaggacaaaatgaacaccaagctgggccagatggagaataagactcagcatcagatgcgggttctggacaaattaatggtggaaaggctttcagctgaacgcaccgagtgtttgaacagacttcagcagcactcagacaccgaaaagcacgaaggtgagaaacggcaaatcagtctggtggacgagctgaagacttggtgcatgctgaaaattcagaacctggagcagaaactttcaggggattcgagggcgtgccgcgccaagtctaccccctccacgtgcgtggatcaactggtggtgacagcaggacccgcagcggccagcgactcctccccccccgttgttcgacctaaggagaaagcgctcaatagtactgccacacaaaggctgcagcaggaattgtccagctccgactgcactggaagtagacttcggaatgtcaaagtgcagactgccctgctgccaatgaatgaagccgcacggtctgatcagcaggccggaccctgtgtgaatcgagggactcagactaaaaagagcggaaaatcaggcccgacacggcaccgggctcagcagcctgcagcctcctcgacctgcgggcagcctccaccagcaacaggtagcgaacaaaccggaccacacatccgcgatacctcccaggctttggaactgactcagtatttctttgaggctgtctcgacccagatggagaagtggtacgagcgcaaaatcgaagaggcccggtctcaagctaaccagaaggcccagcaagataaagctactctgaaagaacatatcaaatctctcgaagaagagctcgccaagttacgaacaagggttcagaaggaaaattag

SEQ ID NO: 179107 - DNA, 528 bp, synthetic construct
  misc_feature 1..528: note = Description of Artificial Sequence: Synthetic coding sequence
  source 1..528: mol_type = other DNA
atgagccagcaggacgccgtggccgccctgagcgagcggctgctggtggctgcctataaggggcaaacggaaaacgtagttcagcttatcaacaagggcgctagggtcgcagtaacaaagcacgggagaactccactgcatctggccgctaacaagggacatctccctgtagtacagatcctcctcaaggcaggctgtgacctggacgtacaggatgatggagatcaaacggccctgcaccgcgccactgttgttggcaacaccgaaatcattgctgccctcatccacgaagggtgtgctctcgatcgccaggataaggatggcaacactgcactgcatgaagcctcatggcacggtttctctcagtctgccaagctgttaatcaaagccggcgccaacgttttggccaaaaacaaggctggtaatactgccctccatttagcatgtcagaattctcactcgcagtcaacacgcgtgttgctgctggctggctctcgggcggatctgaagaataatgccggtgattag

SEQ ID NO: 179108 - DNA, 243 bp, synthetic construct
  misc_feature 1..243: note = Description of Artificial Sequence: Synthetic coding sequence
  source 1..243: mol_type = other DNA
atgagccagcaggacgccgtggccgccctgagcgagcggctgctggtagcggcgtacaaaggccaaaccgaaaacgtggttcagcttatcaacaagggggcccgagttgcagtcaccaagcacggtcggactcccctgcaccttgctgctaacaaggggcatcttcccgtggtgcaaatactactgaaggctggttgcgatctggatgtccaagatgatggcgaccagaccgcgcttcactag

SEQ ID NO: 179109 - DNA, 2184 bp, synthetic construct
  misc_feature 1..2184: note = Description of Artificial Sequence: Synthetic coding sequence
  source 1..2184: mol_type = other DNA
atgagccagcaggacgccgtggccgccctgagcgagcggctgctggtggcagcttacaagggccagaccgaaaacgtcgtgcagctcattaacaagggtgcccgggtcgcagtcacaaaacacggccgcaccccgctccatctcgcagcgaacaagggacacctgcctgtagtacagatcctgttgaaagccggctgcgaccttgacgtccaggacgacggtgaccagaccgcactccatcgggctaccgttgtaggtaataccgaaattatcgctgcccttatccatgaagggtgcgccctcgatcggcaggacaaagacggcaacacagccctacatgaggcttcatggcatggatttagccagagcgccaaattgcttattaaagccggtgcgaatgttctggcaaaaaataaggctggaaataccgcactgcacctggcctgccagaacagtcactcccaatcgactagggttctgctactggccggaagccgcgctgatctaaaaaacaacgccggtgatacctgcctccacgttgccgccaggtataaccacctgagtataatccgtttacttcttaccgcgttctgcagtgtgcatgaaaaaaaccaggccggcgacactgctctacatgtcgctgccgctttgaaccataaaaaagtcgctaaaattctcctggaggccggagctgatacgaccatagttaacaacgccggccagaccccattggagaccgccagatatcacaacaatcctgaagtggctctgctgctgaccaaagccccccaggttctcagattctcaagaggaaggtcgctacggaaaaaacgcgagaggttaaaagaagaaaggcgggcccaatccgtccctcgcgatgaggttgcacaaagcaaagggtctgtctccgctggtgatacaccgagtagcgagcaggcagtggcacggaaggaggaagccagggaggaattcctaagcgcttcccccgagccacgtgcgaaggatgatagacgtcgtaagtcgagacctaaagtgtctgccttctctgatccgacccccccagcggaccagcagccaggccaccagaagaacctacacgcccataatcaccccaaaaaaagaaatagacaccggtgttccagtccacctcccccgcatgaatttagggcttaccagctctacacactgtataggggcaaagacggcaaagtcatgcaggctcctatcaacggttgccgctgtgaacccttaatcaacaagctggagaatcaattggaagcgacggtcgaggaaatcaaagctgagttgggttccgtccaggataaaatgaacacaaagcttggccaaatggagaacaaaacacagcaccagatgcgcgtcttggataagctcatggtcgagagattgtctgcagaaagaactgagtgcctgaatcgtctgcagcagcatagcgacactgagaagcatgagggtgaaaagcgacagatctcccttgtagacgaactgaagacctggtgtatgctgaaaatacagaatcttgaacagaagctgtcaggggatagccgcgcttgccgggccaaatcaaccccgtctacatgtgagagctctaccggagttgaccagttagtggtgacagccggaccagcggctgcttctgactctagcccaccagtggtgcgcccaaaggagaaggccctgaattcaacagccacccaacgactgcaacaggagctgtccagctccgactgtacaggctcacggctgaggaatgtgaaagtgcagactgcattgctgcccatgaacgaggccgcgcgatccgatcagcaggccggtccatgcgtgaacagggggacacaaactaagaaatctggcaaatccggccctactcggcacagggcacagcagcctgctgcgagtagcacctgcggccagccacccccagccaccgggagcgagcagacgggcccccacattcgcgatacgagccaagcgttagaactgactcagtacttcttcgaagctgtgagtacccagatggaaaagtggtatgagcgtaaaattgaggaagcaaggtcccaagctaatcagaaggctcagcaagataaggcaacgctgaaagagcatatcaaatcgctggaggaggagctggccaagctgaggacccgagttcagaaagagaactag

SEQ ID NO: 179110 - DNA, 357 bp, synthetic construct
  misc_feature 1..357: note = Description of Artificial Sequence: Synthetic coding sequence
  source 1..357: mol_type = other DNA
atgagccagcaggacgccgtggccgccctgagcgagcggctgctggttgccgcttacaaggggcagaccgagaatgtggtgcagctgattaataaaggggcaagagtcgccgtcacaaaacacggcaggactccactgcacttggccgcgaacaaaggacacttgcccgtggtccagattcttctgaaggccgggtgtgacctggacgttcaggacgacggggaccagaccgcccttcaccgggcgactgtagtgggaaacactgagattatcgccgcgcttattcacgaagggtgtgctctcgatcgccaggataaagacgggaatactgccctgcacgaagctagctggcactag

SEQ ID NO: 179111 - DNA, 309 bp, synthetic construct
  misc_feature 1..309: note = Description of Artificial Sequence: Synthetic coding sequence
  source 1..309: mol_type = other DNA
atgagccagcaggacgccgtggccgccctgagcgagcggctgctggtggcagcttataagggccagactgagaacgtggtccagctgattaacaaaggcgctcgcgtggccgttactaaacacggccggacgccactgcacttggcagcaaacaaaggccacctgccggtggtgcagatcctgcttaaggccggttgcgatttggatgttcaagatgatggcgaccaaacagcacttcatcgcgccacagtggtcgggaacaccgaaatcatagccgcactcattcacgaaggctgcgcacttgactag

SEQ ID NO: 179112 - DNA, 1992 bp, synthetic construct
  misc_feature 1..1992: note = Description of Artificial Sequence: Synthetic coding sequence
  source 1..1992: mol_type = other DNA
atgagccagcaggacgccgtggccgccctgagcgagcggctgctggtggccgcctacaaggggcagactgagaatgtggttcagttgattaataagggcgctcgggtggcagtcactaaacatggtagaactccactccatttagctgcgaataaggggcaccttcccgttgttcagatactcttgaaagccgggtgtgacctggatgtgcaagacgatggggaccaaacagccctgcacagggccacggtggtgggaaacacagagattattgccgcactgattcatgagggttgcgcccttgatcgtcaagacaaagctgggaacaccgcactgcacctcgcttgtcaaaacagccacagccagagcacgcgggtgctgttgttagcaggatcccgcgccgatctgaagaataatgccggtgacacatgtctgcacgtggccgcccgctacaatcacctgtctattattaggctgctcctcacagcattttgtagcgtccacgaaaaaaatcaggccggggacactgctcttcacgtggccgcggctttgaatcacaagaaagtcgccaaaatactgctggaggccggggcggatacaaccatcgtcaataatgtgcttagatttagccgaggacggtctctgcgaaaaaaaagagagcgccttaaggaagaacgccgggcccaatccgtccccagggatgaggtagcccagagcaagggctccgtgtcagctggtgataccccgagcagcgaacaggctgtggcaagaaaggaggaagcccgagaagaattcctcagcgccagccccgagccccgagcaaaggacgaccgtaggagaaaaagtcgacctaaagttagtgccttctctgatcctacaccgcctgctgaccagcagcccgggcaccagaagaacctgcacgcccacaaccaccccaaaaaaagaaaccgccacagatgttcctccccccctcctccccacgagtttagggcctatcagttgtatacactgtacagaggtaaagatgggaaagtgatgcaggcacctatcaacgggtgccgatgtgagccactcatcaataaactggaaaaccagctcgaggcaactgtggaggaaattaaggccgagctgggaagcgtgcaggacaagatgaacaccaagctgggccagatggaaaacaagacacagcaccaaatgagggtgctggacaaattgatggttgagcggttgtcagctgaacgtactgagtgtttgaaccgcttacagcagcactcagacactgaaaaacacgaaggagagaaaaggcagattagcctcgtggacgaactcaaaacgtggtgtatgctgaaaattcagaacctggaacagaagctgtctggcgattcgcgtgcttgccgagccaagtccacaccgtcaacctgcgtcgaccagctcgtggtcaccgctggtcctgccgccgcctccgacagcagtcctcccgtagttagacctaaagagaaggccctgaacagcaccgccactcaacgactgcaacaggaactctcatcttcagattgtacaggatcgaggctgaggaacgtgaaggttcagacagctctgctacccatgaatgaggctgcacggtccgatcagcaagccgggccctgcgtaaacagaggaacccaaacgaaaaagtcaggtaagagcgggcctacaagacaccgggcacagcagcctgctgcctcatctacatgcggtcaaccaccccccgccacaggcagcgaacagactggcccccacatacgggataccagtcaggccctggagctgacgcagtatttttttgaggctgtgtccacgcagatggaaaaatggtacgaaaggaaaattgaggaagcccgcagccaagctaatcaaaaggcgcaacaggataaagccaccctgaaagaacacatcaagtctttggaggaggagctggctaagctcagaacacgcgtccagaaggagaactag

SEQ ID NO: 179113 - DNA, 765 bp, synthetic construct
  misc_feature 1..765: note = Description of Artificial Sequence: Synthetic coding sequence
  source 1..765: mol_type = other DNA
atgaacaagctgttcagcttctggaagcggaagaacgagacccggtcgcagggctataaccttcgagaaaaagacctgaaaaagttacacagagccgctagtgtgggtgatctgaaaaaacttaaggagtacttacagattaaaaaatacgacgtcaatatgcaggataagaagtaccgtactcccctgcacctagcctgtgctaacggccatacagacgtggtcctgttcctgatcgagcagcagtgtaagatcaacgtaagagactccgagaataagagtcccttgatcaaagccgttcaatgccagaatgaggactgcgctacaatcctcctgaattttggcgctgatcctgacctgcgggacattagatacaatacagtgctgcattatgccgtctgcggccaaagcctgagcctggtcgagaaactcctagagtatgaggccgacctggaggctaagaacaaggatggatatactccgctcctggtggctgtcataaacaataacccaaaaatggtgaaattcctattggagaaaggtgcggacgtgaacgcatcagacaactatcaaagaacagctctaatcctcgcagtgtcaggggaacctccgtgcctggtcaagctgcttctgcagcagggcgtagagctgtgctacgaaggcattgtcgatagccaattgcgaaatatgtttatatcaatggttcttctccaccggtacccccagttcactgcgtcccatggcaagaagaaacacgctaagtag

SEQ ID NO: 179114 - DNA, 825 bp, synthetic construct
  misc_feature 1..825: note = Description of Artificial Sequence: Synthetic coding sequence
  source 1..825: mol_type = other DNA
atgaacaagctgttcagcttctggaagcggaagaacgagacccggagccagggttacaacctgcgggagaaagacctgaagaagctgcaccgggcagcttcagtaggcgatctgaaaaagcttaaagaatacctgcagattaagaaatatgacgttaacatgcaggataagaaatactctgtggtgcaatcatcaagatggctgctatcttatacgacacccctgaatgattttatacgcactcccctgcatctggcctgtgcaaacggtcacaccgatgtggtactctttcttattgaacaacagtgcaagattaatgtaagagactcagagaacaagtctcccctaattaaagctgttcagtgccagaatgaggattgtgcaacaatactcctgaacttcggagctgaccccgatctcagggacatccgatataataccgttctccattacgcagtttgcgggcagagtctttccctggttgagaagctgcttgagtatgaagccgatctggaggccaagaataaggatggttatacacctttgctggtcgccgtcataaacaacaatccaaaaatggtgaagtttctccttgaaaaaggggcagatgtgaacgcaagcgacaactatcagcgaaccgcattgatcctcgccgtctcaggagagcccccatgcctggtgaagttgctgcttcagcaaggagttgagctctgctacgagggcatcgtcgacagccagctgcgtaacatgttcattagtatggtactgcttcataggtaccctcaatttacagcatcccacggaaagaaaaagcatgctaagtag

SEQ ID NO: 179115 - DNA, 606 bp, synthetic construct
  misc_feature 1..606: note = Description of Artificial Sequence: Synthetic coding sequence
  source 1..606: mol_type = other DNA
atgcaggacaagaagtaccggacccccctgcacctggcctgcgccaatggacacactgatgtcgtactctttcttatcgagcagcagtgtaagattaatgtgcgcgactccgaaaacaaatcccccctcattaaagcagtccagtgccaaaacgaagactgtgctactatcttgttgaactttggcgcagatccagatctgagagatattaggtacaacaccgtgcttcattatgccgtgtgtggtcagtccttatcgctcgtagagaagctacttgaatacgaggccgatctagaggccaaaaacaaagatgggtatacacctttactcgtcgcggtaatcaataacaaccccaaaatggttaagttcctcctcgaaaagggtgccgacgtgaacgctagcgataattaccagaggaccgccctgatcctagctgtgtctggagaacctccttgcctcgtgaaactcctgctacaacagggcgttgagctgtgctatgagggaattgtcgacagccagctgcggaacatgtttatctccatggtcctgctgcacagataccctcagttcacggctagtcatgggaagaaaaagcatgcgaagtag

SEQ ID NO: 179116 - DNA, 942 bp, synthetic construct
  misc_feature 1..942: note = Description of Artificial Sequence: Synthetic coding sequence
  source 1..942: mol_type = other DNA
atggacaccagcaccaacctggacatcggcgcccagctgatcgtggaagagtgtccgagcacttacagtcttaccggcatgcccgatattaaaatcgagcatccacttgacccaaacagcgaggaaggtagtgctcaaggcgttgcgatgggcatgaaatttattctccctaaccgtttcgacatgaatgtctgctcacgtttcgttaagtcactaaatgaagaagattccaaaaatattcaggatcaggtgaactccgacctggaagtggcttcagtgctctttaaggcggaatgcaacattcacacctccccttcaccgggcattcaggtccggcacgtctacacacccagtactacgaaacacttctcccctatcaagcagagtacgaccctcaccaacaaacaccgggggaacgaagtgtctactactccactgctcgccaactcactgagcgtccaccagcttgcggctcagggtgagatgctctacctggctactagaattgagcaagagaacgtaatcaaccacacagatgaggaagggttcaccccattgatgtgggccgccgcccacggccagatcgcggtggtcgagtttcttctgcagaacggcgccgatccccagcttcttgggaaaggcagggaatcagccctgagtctcgcttgctccaagggctacacagatatagtgaaaatgcttctcgactgcggcgtcgacgttaacgagtacgactggaacggaggtactccactgttgtacgcagtacatggcaatcatgtgaaatgcgtgaagatgctgctggagagcggagctgacccgaccatcgagacagatagtggatataactcgatggatttagctgtggctttagggtatagaagcgtacagcaggttatagagagccatttgctgaaactgttacagaatatcaaggaatag

SEQ ID NO: 179117 - DNA, 1428 bp, synthetic construct
  misc_feature 1..1428: note = Description of Artificial Sequence: Synthetic coding sequence
  source 1..1428: mol_type = other DNA
atggccgccagcgccctgcggggcctgcccgtggccggcggcggcgagtcatcagaatccgaggatgacggttgggaaatcggctatctggaccgcacttctcagaaactgaagcggcttcttccaatagaagagaaaaaggaaaaattcaagaaagcaatgaccatcggtgatgttagcttggttcaagagctactggatagtggcatcagcgtagattcaaatttccagtacggctggaccccacttatgtacgccgccagcgtggccaacgccgagctcgtccgagtgttactcgatcgtggggctaacgcatcgttcgagaaggacaagcagtccatccttatcacagcttgttcggctcacgggtccgaggaacagattttaaaatgtgttgagcttctgctcagtcgcaacgccgaccccaatgtcgcctgcaggagacttatgacaccgattatgtatgcggctagggatggacacacgcaggtggtcgctctcttggtggcgcatggggcggaggtgaacacccaggatgaaaacgggtacaccgcactgacctgggccgcacggcagggtcacaagaatattgtactgaagttgttggaactgggcgccaacaaaatgttgcaaaccaaagatggcaagatgccgtctgaaattgcaaaacgaaacaagcatcacgaaatttttaacctgctaagcttcactttaaacccactggaagggaagttacaacagttaaccaaagaggatactatatgcaagattctaaccaccgactcagacagagagaaggatcatatcttttcctcttacactgcgtttggcgaccttgaagtgtttctccatggcttaggcctggagcatatgacagatttgctaaaggagagggatatcacacttaggcatctactgactatgcgtgaagacgaatttacgaaaaatggcatcacatcaaaggaccagcagaaaatcctagcagccctgaaggagctacaagttgaagagattcaattcggtgagctgtcggaagagaccaaacttgagatttcaggcgatgagtttctcaacttcctgcttaaactaaacaagcagtgtggacatttgatcacagctgtgcagaatgttataacggaactccccgtgaatagtcagaaaatcaccctagagtgggcaagcccccagaactttaccagcgtctgcgaggaactggttaacaacgtggaggacctgtccgaaaaggtatgtaaactgaaagatttgatccaaaaactccaaaatgagcgagaaaatgaccctactcacattcagctcagggaagaagtgagcacttggaatagtcggattcttaaacgaacggccatcaccatctgtgggtttggttttctgttatttatatgtaaactgactttccaacgcaaatag

SEQ ID NO: 179118 - DNA, 1041 bp, synthetic construct
  misc_feature 1..1041: note = Description of Artificial Sequence: Synthetic coding sequence
  source 1..1041: mol_type = other DNA
atggccatggtgagcgagttcctgaagcaggcctggttcatcgagaacgaggagcaagaatacgtgcaaactgtgaaatccagtaaaggtggcccggggagcgccgttagcccttaccctaccttcaatccaagcagtgacgttgcagcgctgcataaagcaataatggtgaagggggtggatgaggcaacgataattgacattctgactaagcgcaacaacgcccaacgtcagcaaataaaagcagcctatctgcaggagaccggcaaacctctcgatgaaacattaaagaaagctttaaccgggcaccttgaggaggtagttctggctctgctgaaaaccccggcccagtttgacgccgatgagctacgggcagccatgaaaggcctaggaaccgacgaagacaccttaattgagattctggcgtctcggacaaacaaagagatcagggatataaacagagtataccgggaggaactcaagagagacttagcaaaagatatcaccagcgataccagcggggatttcaggaacgctctattgagccttgctaagggggatcggtctgaagacttcggcgtcaacgaagatctcgcagattcagacgctagagccctctatgaagctggggagagacggaaaggcacagacgtgaacgtttttaacacaatcctgacaactcgcagttatccacaactgcgcagagtgtttcaaaagtatactaaatactcgaaacatgatatgaacaaggtcttggacctagagctgaagggagacattgagaagtgcttgaccgcaattgttaaatgtgctacaagcaagccagctttcttcgcagagaaattgcatcaagcaatgaaaggggtggggaccagacacaaggcattaattcgcattatggtgagccgctctgagatcgacatgaacgacatcaaggctttttaccagaagatgtacggaattagtctgtgccaggccattcttgacgagaccaaaggagattacgagaagatccttgtggccctgtgcggaggaaattag

SEQ ID NO: 179119 - DNA, 1041 bp, synthetic construct
  misc_feature 1..1041: note = Description of Artificial Sequence: Synthetic coding sequence
  source 1..1041: mol_type = other DNA
atggccatggtgagcgagttcctgaagcaggcctggttcatcgagaatgaggaacaagaatatgtgcaaactgtgaagtcttccaagggaggacctgggtccgccgtttccccatatcccaccttcaatccaagttccgatgtagctgctctccataaagctatcatggtgaaaggggtggatgaggccacaatcattgacattctgaccaaacgcaataatgcccagcgacagcaaattaaagcagcctacctgcaggaaactggtaaaccattggacgaaaccctgaagaaggccctgactggccacctggaagaggtggttctcgcactgctgaagaccccagcccagttcgatgctgacgaacttagggcagccatgaaaggactggggaccgatgaggataccctcattgagattctcgctagccgcactaacaaggagatccgcgacattaaccgcgtgtacagggaggagctgaaacgtgatctcgctaaagatatcacatccgatacctctggtgacttccggaacgccctgctctctctcgcaaaaggtgataggtccgaggatttcggggtgaatgaggacctcgccgatagtgacgccagggccctgtacgaagcgggagaaagaagaaagggtactgacgtcaatgtgttcaataccatactgaccaccaggtcatatccccaattgaggcgggttttccagaaatatactaagtattctaagcacgatatgaacaaagtgttggacctcgaactcaaaggagacattgagaaatgtctgacagccatcgtcaagtgcgctacttctaaaccagcattcttcgctgaaaagcttcaccaggcgatgaagggagttggaactcggcacaaagcccttattcgtattatggtgtctcgttctgaaattgacatgaatgacatcaaagctttctatcaaaaaatgtacggtatcagcctgtgccaggcaatcctcgacgagacaaaaggcgattatgagaagattctcgtggctttgtgcgggggaaattag

SEQ ID NO: 179120 - DNA, 348 bp, synthetic construct
  misc_feature 1..348: note = Description of Artificial Sequence: Synthetic coding sequence
  source 1..348: mol_type = other DNA
atggccatggtgagcgagttcctgaagcaggcctggttcatcgagaatgaggagcaggagtacgtgcagaccgtcaaatcaagcaagggcggccctggctcagccgtgtctccataccccacctttaatccatctagcgacgtagccgctctgcataaagctatcatggttaagggagtggacgaggcaactatcatcgacatcttgacaaagcgcaataatgcccaacggcagcagatcaaggccgcatacctccaggaaacaggaaagccgctggacgaaactctgaaaaaagccctaaccgggcacttggaagaagttgtactggccctcctgaagactccttag

SEQ ID NO: 179121 - DNA, 615 bp, synthetic construct
  misc_feature 1..615: note = Description of Artificial Sequence: Synthetic coding sequence
  source 1..615: mol_type = other DNA
atgaacctgatcctgcggtacaccttcagcaagatggccatggtgtcagaatttttgaaacaagcctggttcatcgaaaacgaagagcaggaatatgtccaaacagtaaagagtagcaaaggaggcccagggtctgctgtcagcccgtatcccacctttaacccttcgagcgatgtcgccgccttgcataaggcaataatggtgaagggtgtcgacgaagccacgatcatagacatcctaacaaagcggaacaatgcccagcgacagcagattaaggccgcctacttgcaggagacggggaagcctctagatgagaccttaaaaaaggccctgactgggcatctggaggaggtggtgctggcattactgaagacgcccgcccagttcgatgccgatgaactgagggcagcaatgaaggggttgggaactgacgaagacacattgattgagatattggcgtcacggacaaacaaggaaattagagatattaacagggtgtaccgtgaagagctgaagagagacctggccaaggatatcacatccgacacgtctggagatttcaggaacgcactgctgtcccttgcgaagggggaccgctcggaagattttggatag

SEQ ID NO: 179122 - DNA, 975 bp, synthetic construct
  misc_feature 1..975: note = Description of Artificial Sequence: Synthetic coding sequence
  source 1..975: mol_type = other DNA
atgttctgcggcgactacgtgcagggcaccatcttccccgcccccaattttaatcctattatggatgcccagatgctggggggggctcttcagggttttgactgcgacaaagacatgctcataaatattttgacacagaggtgcaatgcccaacggatgatgatcgccgaagcttaccagagtatgtatggcagggacctgataggagatatgagggaacagctctctgatcacttcaaggacgtaatggccggactgatgtatcctcccccactatacgacgcacacgagctgtggcatgccatgaaaggtgtgggtaccgacgagaattgcttaatcgagattctcgcgagccgaacgaatggcgaaatcttccagatgcgggaggcatattgtttgcagtattctaataacctgcaggaggatatatacagcgaaactagtggccacttcagagataccctgatgaatctcgtgcagggaactcgcgaggaaggttatacagaccccgctatggccgcgcaagacgctatggtgctctgggaagcttgccagcagaagacaggagaacacaagacaatgctccagatgattctctgcaataaatcatatcaacagctgaggctggtgttccaggagttccagaacataagcggccaagatatggtggacgcaatcaatgaatgttatgacggctacttccaggaactactggtggcaatagtcctgtgtgttagagacaagcccgcgtacttcgcctatcggctctattccgctatccatgacttcggcttccacaacaagactgtcatccggatactgatcgcgcgctccgagatcgacttactcactatcaggaagcgctataaggagcgctatggaaagagtctgttccacgacattaggaacttcgcctcaggacactacaagaaagccctgcttgccatatgcgctggtgacgcagaggactactag

SEQ ID NO: 179123 - DNA, 975 bp, synthetic construct
  misc_feature 1..975: note = Description of Artificial Sequence: Synthetic coding sequence
  source 1..975: mol_type = other DNA
atgttctgcagcaacctggtgcagggcaccatcttccccgcccccaattttaatcctattatggatgcccagatgttgggaggcgcattgcaggggtttgactgtgataaggacatgctgattaatatccttactcagagatgtaatgcccagaggatgatgatcgccgaagcttaccagagcatgtatggccgggatttgatcggcgacatgcgggagcaattgagcgatcatttcaaggacgttatggccggcctcatgtatcccccaccactgtatgacgctcatgaactgtggcatgctatgaaaggggtggggaccgatgagaattgccttattgaaattctggcttccaggacaaacggggagatctttcagatgagggaagcctattgcctgcagtattccaacaacctgcaggaggatatctactctgaaacctccggacactttcgcgacaccttaatgaatcttgtacagggaaccagggaggaaggctacaccgacccagcgatggccgcccaagacgccatggtactgtgggaagcgtgccagcagaaaaccggtgaacataaaaccatgcttcagatgattctctgtaacaagagttatcagcagctccgactagtcttccaggaatttcagaacatctccggccaggatatggtggacgccatcaacgaatgttatgacggttacttccaggagctgctcgtcgccattgtcctctgtgtcagagataaacccgcgtactttgcctaccgactgtactctgccatccacgatttcgggtttcacaacaagactgtgatccgtattcttattgccaggagcgaaatcgatctcctgaccatcaggaaacggtacaaagaacgctacggtaagagcttgttccacgacattagaaatttcgcttccgggcactataagaaggctctactggcaatatgcgccggagatgccgaggactattag

SEQ ID NO: 179124 - DNA, 1518 bp, synthetic construct
  misc_feature 1..1518: note = Description of Artificial Sequence: Synthetic coding sequence
  source 1..1518: mol_type = other DNA
atgagctaccccggctacccccccccccccggcggctacccccccgccgctcctggtgggggaccttggggtggcgcagcctaccctcctcctcccagcatgccaccaatcggcctggataatgtggccacctacgcgggccagtttaatcaggactatctctcaggcatggccgcaaatatgagtgggacatttggcggcgccaatatgcctaacctgtaccccggggctccaggcgctgggtatcctccggttcctcctggtggttttgggcagcctccatccgcgcagcagccagtgccaccatacgggatgtaccctcctcccgggggtaaccccccttcccgtatgccatcttatcctccatatcccggtgccccggtcccgggtcaaccaatgccccctcccggccagcagccccccggtgcatatcctggtcaaccgccagtgacctacccaggtcagcctcctgtgccactgcccggacagcagcagcctgtgcccagctaccctgggtaccccgggagcgggacagtgactcccgcagttcctcctacacagttcgggtcacgagggaccattacggacgcaccggggttcgaccccctgcgggatgcagaggttctgcgcaaggcaatgaaagggttcgggacggatgaacaagctataatagattgtctgggatcaagatctaataagcagcggcagcaaatccttcttagcttcaagaccgcgtacggcaaagacctcattaaggatctcaagtctgagttatccgggaatttcgagaagaccattctggctttgatgaagacgcccgtcctgtttgatatctacgaaattaaagaggcgatcaaaggggtcgggaccgatgaggcctgcctgattgaaatcctggcaagccggagtaacgagcacatacgggaactgaatagagcctacaaggctgaatttaaaaaaaccttagaggaggccatccggtctgatacgtcaggccactttcagaggttgcttatcagtctctcacagggaaatcgagacgagtcaacaaatgtagatatgagcctggcccagagagatgcccaagaactgtacgccgctggtgagaatagactgggtactgacgaatcaaaatttaatgcggtcctctgctcccgatcccgcgctcacctcgttgccgtgtttaatgagtaccagcgaatgacaggccgtgatatcgagaaatcgatttgccgggaaatgtctggcgaccttgaagaggggatgctggctgtggttaagtgtctgaaaaatacacccgcattcttcgcggagaggctcaacaaagccatgcgcggcgccggaacgaaagatcggactctgatcagaatcatggtgtccaggtctgaaacggacctcctggacattcgcagcgagtataagagaatgtacggcaaaagtctctaccatgacatctccggtgatacaagcggggattaccgaaagatactgttgaaaatctgtggtggcaacgattag

SEQ ID NO: 179125 - DNA, 1518 bp, synthetic construct
  misc_feature 1..1518: note = Description of Artificial Sequence: Synthetic coding sequence
  source 1..1518: mol_type = other DNA
atgagctaccccggctacccccccccccccggcggctacccccccgctgctccgggaggggggccgtgggggggcgccgcatatcctcccccaccttccatgccacctatcggactcgacaatgtggccacatacgcaggtcagttcaatcaagattatttgagtggcatggccgcgaacatgagcgggaccttcggcggagccaacatgccgaatctctatcccggagccccaggggcaggctacccccccgtgccgccagggggatttggacagcccccatccgcgcaacagccagtgcccccatatgggatgtacccccctcccggcggcaaccctccaagtagaatgcctagttaccctccgtaccctggcgcacctgtacccgggcagcccatgccgccccctggccagcagcctccaggagcatatccagggcagccacccgtgacttaccctggtcagccccctgtgccactgcctggacagcaacagcctgttccctcatacccaggttatccaggaagcggcaccgtgaccccagcggtcccaccgacccaatttgggagcagaggtaccatcaccgacgctccagggttcgaccccctccgggacgcagaggttctgaggaaggccatgaagggatttgggacggacgaacaggccatcatcgattgtttgggatctcgctccaataaacagcgtcagcagatactactgtcctttaaaacggcgtatggcaaggacctgataaaggacctcaagagcgaattatctggaaattttgaaaagacgattctggctcttatgaagactccagttctcttcgatatctacgagataaaggaagccatcaagggtgtgggaacagatgaggcttgtcttatagagatactggcctctcggtctaatgaacatattagagaactgaacagggcctacaaagccgagtttaaaaaaactctggaggaggccattcgcagcgacacttctggccacttccagagactgttgattagcttaagccaaggaaaccgcgacgagagcacaaacgtggacatgtctctagctcagagagacgcgcaggagctgtacgccgccggtgagaatcgccttggaacagacgaaagcaagttcaatgccgtgctgtgtagccgcagccgagcccatctggtggctgtgtttaacgaataccaaagaatgaccggccgcgatatcgaaaagagtatctgccgagagatgtcaggtgacctagaagaaggtatgctggctgtagtcaagtgcttgaaaaacacccctgccttctttgctgaacggctgaacaaggctatgcgaggggcaggtacaaaggacaggaccctgatcaggatcatggtcagcagatccgaaacagatctcttggacattcgttcagagtataagcgcatgtacggtaagagtctgtaccatgatatctcaggcgacacttctggtgattaccgcaaaatccttctgaaaatctgcggaggcaacgattag

SEQ ID NO: 179126 - DNA, 489 bp, synthetic construct
  misc_feature 1..489: note = Description of Artificial Sequence: Synthetic coding sequence
  source 1..489: mol_type = other DNA
atgagcctggcccagcgggacgcccaggagctgtacgccgccggcgagaacagactggggaccgacgaatcaaaatttaacgccgtgttgtgttcccgcagtagagcgcatctggtagctgtgttcaatgagtaccaacggatgaccggacgggacatagagaagtcgatatgccgggagatgtcaggagaccttgaagaaggcatgctggccgtggtcaaatgccttaagaatacacccgctttcttcgctgaaaggctgaacaaagccatgcgcggtgccgggaccaaagatcggacactgatcagaatcatggtttcccgttccgaaaccgatctgctggacatccgctcagagtacaaaaggatgtatgggaaaagcttatatcacgatatctcgtccattagttgcatgcctgcctcttatggtcatctcgaggaggccacttgcctcgctctcaaactcttgcgagtggaaggcaatgattag

SEQ ID NO: 179127 - DNA, 1518 bp, synthetic construct
  misc_feature 1..1518: note = Description of Artificial Sequence: Synthetic coding sequence
  source 1..1518: mol_type = other DNA
atgagctaccccggctacccccccccccccggcggctacccccccgccgcacctggcggtggtccctggggaggcgccgcctatccacccccaccttctatgccccccatcgggctggataatgttgcgacgtatgcaggacagtttaatcaggattacctgagcggcatggccgctaatatgtcaggcacttttggcggggctaacatgccgaatctttaccctggagcacccggagcgggctatcctccagtccctcccggcggattcggtcagcccccttcggcccaacagcctgtgccaccatacggaatgtacccacctccaggcggtaatccaccttctcgcatgccgagctaccctccatatccaggcgcaccggtgccggggcagccgatgccaccgcccggtcaacaacctccaggcgcttacccaggccagccccccgtgacttaccccgggcagccacccgtgccacttcccggtcagcagcaaccagttccctcttaccccggatatcccggctcaggcaccgtgacccccgcagttcccccaacccaatttggatcaaggggtactataacggacgccccaggattcgatccactccgtgacgccgaggtgctgcgtaaggctatgaagggtttcggtactgatgaacaggctatcatagattgcctcgggtcacggagcaataagcagaggcaacagatactgctaagctttaaaactgcttacgggaaggatcttatcaaggacctgaagtctgaattgtcaggtaatttcgaaaagaccattttggccctgatgaagaccccagtcctctttgacatctacgaaataaaagaggccatcaaaggtgttggaaccgacgaagcctgtcttatcgaaatactggcgagccgaagcaacgaacatatcagggaattaaaccgggcctacaaggccgaattcaagaaaacattagaagaagccatcaggagcgatacctctggccacttccaacgcctgctcataagcctgagccagggaaaccgggacgaaagtacaaatgtggacatgtctctggcgcagcgcgacgcccaggagctctacgctgctggggagaaccgattaggcaccgacgagtccaaatttaatgccgtgctctgctccaggtctcgtgcacacctggttgccgtgttcaacgaataccagcgcatgactggcagagacatagaaaagagcatctgccgtgagatgtccggcgatttagaagagggcatgttggcagtagtgaaatgcctcaagaatacccctgcattttttgctgagaggttgaacaaagcaatgagaggagctggcactaaagatagaaccctcattagaatcatggtgtcacgatcagagaccgatctgctagatatcagaagtgagtataagcggatgtacggaaagagcctgtatcacgacattagcggcgatactagcggtgactacagaaaaatcttactcaagatctgcgggggtaacgactag

SEQ ID NO: 179128 - DNA, 1518 bp, synthetic construct
  misc_feature 1..1518: note = Description of Artificial Sequence: Synthetic coding sequence
  source 1..1518: mol_type = other DNA
atgagctaccccggctacccccccccccccggcggctacccccccgctgcccccggtggcggcccttggggaggagccgcataccccccgcccccaagcatgccacctatcggcttggacaacgtcgccacctacgctggacagttcaaccaggactatttgtccggcatggcagccaacatgtctggcaccttcggaggggcaaacatgccaaatttgtatccaggcgctcctggcgctggttatcctccagttccaccaggaggatttggccaaccgccatcagctcagcaacccgtgcccccctatggtatgtaccccccaccgggcggaaatcctcccagtcgtatgccttcttatcctccctaccccggagctcccgtgcccggacagccaatgcctcccccaggacagcagccaccaggcgcttatcccggacaacccccagttacatacccaggacagccccctgtgcctctgccgggccagcaacagcctgtgccctcctacccaggctatcccgggtctggcacagtcacaccagccgtcccacccactcaattcggttctcgtggaactatcactgacgcacccggatttgaccctctgagggacgctgaagttctccgcaaagcaatgaaaggatttggcacagacgagcaggcaatcatcgattgtctcggatcacggtctaacaagcagagacaacagatattactgtcttttaagacagcttacggcaaggacctcatcaaggatctgaagtcagaactgtccggcaacttcgagaaaacaattctggccttaatgaagacgcccgtgctgtttgatatatatgagattaaggaggccataaaaggggtgggaacagacgaggcatgcctcattgaaattctggcctctcggtctaacgagcacataagggagctcaaccgagcatataaggctgagttcaagaagaccctggaggaggccattcggagcgacacgagcggccactttcagaggctcctgatctcactgtcccaggggaatagggacgagtcaaccaacgtggacatgagtctagctcagcgtgacgctcaggaactctatgcagccggcgaaaatcgtttgggaactgacgagagtaagttcaatgcggtgctctgttcccgcagccgagcccacctggtggccgtctttaacgagtaccagcgaatgacagggagggacattgaaaaaagcatatgcagagaaatgagcggcgacctggaggaagggatgctggccgtcgtgaagtgcctgaagaatactcccgctttcttcgcggagcggttaaataaagccatgcgtggtgctggcacgaaggatagaaccttgatacggattatggtatcccggtcagagaccgacctgcttgatattcgatccgagtataagagaatgtatgggaagagtctataccacgacatttctggcgatacgtccggggactataggaaaatcctgctgaaaatctgcgggggcaatgactag

SEQ ID NO: 179129 - DNA, 1518 bp, synthetic construct
  misc_feature 1..1518: note = Description of Artificial Sequence: Synthetic coding sequence
  source 1..1518: mol_type = other DNA
atgagctaccccggctacccccccccccccggcggctacccccccgccgctccgggcggaggcccatggggaggtgcagcatacccacctcctccgagtatgcctccaattggcctggacaatgttgccacatacgcgggacagtttaatcaggactatcttagtggcatggctgccaatatgtcgggtaccttcggaggagcaaacatgccaaacctctatcctggcgcaccaggggccggatacccacctgtcccacccggcgggttcgggcagcccccatctgcccagcagcctgtgccaccatatggtatgtatcctccacccggggggaacccgcctagtcggatgcctagttatccgccctaccctggagcccctgtgcccggccagccaatgccaccaccgggccaacaaccacccggcgcataccccggacagcctccagtaacatatccaggccagccgccagtccccttacccggccagcagcagccagtcccaagttacccgggatacccggggagcggaaccgtgacccctgccgttcctcccacccagtttggctcaagagggactatcaccgatgccccaggtttcgatcctttaagagacgccgaagtgctcagaaaagctatgaagggatttggaaccgatgaacaagccattattgactgtcttggaagtcgcagtaacaaacagcggcagcagattttactgtcctttaagacagcctacggcaaggatctcattaaggatttaaagtcagagctgtccggaaatttcgagaaaacgattctggctctgatgaagactcccgttctgttcgacatttatgaaattaaagaagccatcaaaggtgtcggcacggacgaggcgtgcctcattgagattcttgctagcagatctaatgagcacattcgtgaactaaatagggcgtacaaggctgaatttaagaagaccctagaagaagcaattagatcagacaccagcggacatttccagcgtttgctcatcagtctgagccaaggcaatcgcgacgagtctacaaatgtggatatgagcctggcccaacgggacgcgcaggagttgtatgcagctggggagaatcgcctcgggacagatgaatctaagttcaacgccgtgctgtgcagtaggagccgcgctcacctggtggctgtgttcaatgagtatcagcggatgaccggcagggacatcgaaaaaagcatatgtagagagatgtctggagatctggaagaggggatgttggccgtggtgaaatgtctgaagaatacccctgccttctttgccgagcgcctgaacaaggcaatgaggggggctggtactaaggacaggaccctgataagaattatggtgagcagatcagagaccgatctcctggatatccgatcggaatacaaacgaatgtatgggaaaagcctgtaccacgacatctctggcgacactagcggcgactatcgaaaaattcttttgaaaatctgtggaggcaatgattag

SEQ ID NO: 179130 - DNA, 1239 bp, synthetic construct
  misc_feature 1..1239: note = Description of Artificial Sequence: Synthetic coding sequence
  source 1..1239: mol_type = other DNA
atgcggggcagcagcacccggaccatcagccgggagtgctggcggctgtgggcagcgccattgtgccccgccgcgtgcagtagcttatgggacgtgtcaactcccaggcggaagccgacattgcaggacgcacttatttcagcaatcccatatccgggccagccacccgtgacataccccggccaacctcccgttccattacctggccagcagcagcctgttcccagttaccccggatatcctgggtccggcacggtaacccctgcagtgccaccgactcaatttggctcacgcggaactatcacggatgcacccggcttcgacccactgagggacgccgaggtgctgcgtaaggctatgaagggctttggtaccgatgaacaggccattatagattgccttggcagtcgctcgaataagcaacggcaacagatacttctgtcattcaagacagcatacgggaaggatttaataaaagacctgaaatcggaactgagcgggaatttcgaaaagacaattttagcccttatgaagaccccagtactgtttgacatttacgagattaaggaagccatcaagggggtagggacggatgaagcgtgcctcatcgagatcctggcctctcggtccaatgagcacatcagggaactgaatcgagcctacaaggccgaatttaagaagacccttgaggaggcaattagatctgatacttccggccattttcagagattgctgatctccctcagtcagggcaaccgcgatgagtccaccaatgtggacatgagcctggcccagcgggatgcgcaggaactttacgctgcaggcgaaaataggctggggaccgatgagtctaaattcaacgctgtactctgctcccgtagccgcgcccacttggtggccgtcttcaatgaataccagcggatgaccggcagagacattgaaaagtctatctgccgcgagatgtctggtgacctcgaagaaggtatgctggcagtcgtgaagtgtcttaagaacacgcccgccttcttcgcggagagattgaataaagctatgcgcggcgcgggcacaaaggatcggacactcataaggattatggtgagcagaagtgaaaccgacctgctggacatccgctctgagtacaagcggatgtatgggaagtctttgtaccacgatatcagcggggacacttctggtgattataggaagattctccttaagatctgtggcggtaatgactag

SEQ ID NO: 179131 - DNA, 453 bp, synthetic construct
  misc_feature 1..453: note = Description of Artificial Sequence: Synthetic coding sequence
  source 1..453: mol_type = other DNA
atgagctaccccggctacccccccccccccggcggctacccccccgccgcaccgggagggggtccctggggaggtgctgcgtatcccccccccccaagcatgcctcctatcggtctggacaacgtggccacttatgcaggccagtttaaccaggactatctctctggcatggcagcaaacatgtctggcaccttcggaggagccaacatgccaaacctctatcccggcgcgcccggcgctgggtaccctccagtacctcccggaggcttcggacagcctccttccgcccagcagcccgtgcctccttacgggatgtaccccccaccagggggcaacccacctagcagaatgccaagctatccaccctaccccggtgctcctgtgccgggccagcctatgcccccacctggacagcaacctcctggggcgtaccctggacaacctcccgtctag

SEQ ID NO: 179132 - DNA, 1518 bp, synthetic construct
  misc_feature 1..1518: note = Description of Artificial Sequence: Synthetic coding sequence
  source 1..1518: mol_type = other DNA
atgagctaccccggctacccccccccccccggcggctacccccccgccgcccccggggggggcccatggggaggtgctgcctacccacctccccccagtatgccccctattggattggataatgtcgccacctacgcagggcaattcaatcaggactacttgtctgggatggccgccaacatgtcagggaccttcggaggtgctaatatgccaaatctgtatccaggcgcccctggagctggatatcctcctgtgccacccggtggattcgggcagccacccagtgcacagcagccggtaccaccttacggcatgtacccaccacctgggggcaatcccccttcccgaatgccttcatacccaccctatcccggggcgcctgtcccaggccagcccatgccgccacccggccaacagcctcccggcgcctaccctggtcagccacccgttacctacccgggccagccacccgtgcccttgccaggccagcagcaacccgtgccttcatatccagggtatccagggagcgggacagtaactcctgccgtacctccgacccaatttggttcccgcggcactatcaccgacgctcccggctttgacccgttacgcgacgccgaggtgctgaggaaggccatgaaaggcttcgggacggacgagcaagctatcatcgactgccttggaagcaggtccaacaagcaaaggcaacagattctcctctcgttcaaaacagcctacggaaaagacctgataaaggatttaaaatctgagctttccggcaactttgaaaaaacaatcctggccctgatgaagaccccagtgctgttcgacatatacgagatcaaggaggctataaaaggggtcggcactgatgaagcctgtttaattgagatactggcatccaggtctaatgaacatatcagagaattaaatcgcgcgtataaggccgagtttaaaaaaaccttggaagaagccattcgatcagataccagtgggcatttccaaagattacttatctcactgtcacaggggaaccgcgacgagagcactaacgtagacatgtcattggcccagagggatgcccaggaattatatgctgccggcgaaaacagactggggactgacgagtccaaattcaacgccgtattgtgcagccgtagtcgagctcacttggtggcagtattcaatgaataccagagaatgacaggtcgggatattgaaaagtccatttgcagggagatgagcggcgacctggaggaagggatgctggccgtggtaaaatgtcttaagaatactccagcgtttttcgctgagcggctgaacaaagcaatgcgcggggctggcacgaaagatcggactctgattcgcatcatggtttcacgctctgagaccgaccttcttgacatcagatcggagtacaagagaatgtacggcaaatccctctaccatgacatctcaggggacacatccggggactatcgaaagatcctccttaagatctgcggaggaaatgactag

SEQ ID NO: 179133 - DNA, 615 bp, synthetic construct
  misc_feature 1..615: note = Description of Artificial Sequence: Synthetic coding sequence
  source 1..615: mol_type = other DNA
atgagctaccccggctacccccccccccccggcggctacccccccgcagcccccggtggcggcccgtgggggggggccgcctatcctcctccaccaagtatgcctccgatcggcctcgacaacgtcgccacctatgcgggtcagtttaatcaagactacctgtctggcatggctgctaatatgagcggaacgttcggaggagccaacatgcctaacctatatccaggggcccctggggccggctaccccccagtacctcctggcgggttcgggcagccacctagcgcccagcaacccgtgccaccgtatggaatgtaccctccaccaggcggaaaccccccctctcggatgcctagttatcctccctatccaggtgcccccgtgcccggccagccgatgcctccccctgggcaacagccaccgggggcctatcccggacagccacccgttacctatccaggtcaacctcccgttcccttgcccggccagcagcagccagtgccctcgtatccaggttaccctggatcaggcacagtgactccggccgtcccgcccacgcagttcggaagtaggggcacaatcactgatgctcccggtttcgatccccttcggtag

SEQ ID NO: 179134 - DNA, 447 bp, synthetic construct
  misc_feature 1..447: note = Description of Artificial Sequence: Synthetic coding sequence
  source 1..447: mol_type = other DNA
tgagagaaccggctgggcaccgacgagagcaagttcaacgccgtgttgtgcagcagatcgcgtgctcacctggtggcagtgtttaacgaataccagaggatgacaggaagggatatagagaaatcaatttgcagggaaatgagtggtgacctggaggaaggtatgctggctgtggttaaatgtttaaaaaatacccctgccttctttgctgaacggctcaacaaggctatgcggggcgcagggactaaagacaggactctgattcggatcatggtgtctagaagtgagactgaccttctggacatccggagcgagtataagaggatgtacggaaaatctctttaccatgatatatcaagcataagttgtatgccagcaagttacggacatttggaggaggctacttgcttggcattaaaacttttgcgtgtggagggtaatgactag

SEQ ID NO: 179135 - DNA, 1518 bp, synthetic construct
  misc_feature 1..1518: note = Description of Artificial Sequence: Synthetic coding sequence
  source 1..1518: mol_type = other DNA
atgagctaccccggctacccccccccccccggcggctacccccccgcagctcctgggggcggcccttgggggggggccgcgtatcctcctccaccctctatgccccctattggcctcgacaacgtggctacatatgcaggtcagttcaatcaggactatctctctggcatggctgctaacatgagcgggacctttgggggagcaaacatgcccaatctgtaccctggggccccaggtgccgggtacccccccgtcccccccggcgggttcggccagccaccaagtgcccaacaacccgtccctccttacggaatgtatcctcctcctggtggaaacccaccgtctagaatgcccagttatccaccataccctggtgcccctgttccagggcagccaatgccccctccaggccagcaaccgcccggtgcttacccagggcaaccacctgtgacctacccagggcagccacccgttcctctccctgggcagcaacagcctgtgccctcttaccctggctatcctgggtctgggaccgtgacgcccgccgtacctccgactcagtttgggtctcgcggcactattaccgacgcccctggatttgatccattgcgggacgcagaggttctacggaaggcaatgaagggatttggcactgacgaacaggccatcatcgactgtttaggcagtagaagcaataagcagaggcagcagatcctgctgagtttcaaaaccgcctatgggaaggacctcatcaaagaccttaaatcagagctatccggaaattttgagaaaacaatactggctttaatgaaaaccccagtgcttttcgatatctatgaaataaaagaggccattaagggggtagggactgacgaggcttgccttatcgagatcttggctagtcgctccaacgaacacattcgggagttaaacagagcctacaaagctgagtttaagaaaactttggaggaggcgattaggagtgacacaagtggccacttccaaaggctccttatttccctgagtcaaggaaatagggatgagagcactaatgtggacatgagcctggcccaacgcgacgctcaggagctgtatgcagcaggcgaaaataggttaggcaccgacgaatccaaattcaacgcagtgctgtgcagtaggagtagggcccatctcgtagctgtgtttaacgaatatcaacggatgaccggccgggacatcgagaagtcgatttgcagagagatgtctggagacctggaagaagggatgttggccgtggtgaaatgtctgaaaaataccccagcattctttgcagagaggttgaataaggctatgcggggagcagggactaaggatcgtacactgataaggattatggtgtccagatctgagacagatttgctagatatcaggtctgagtacaagagaatgtatggaaagagcctgtatcatgacatctctggggacacctctggcgactatcgcaaaatcctgcttaagatctgtggtgggaatgattag

SEQ ID NO: 179136 - DNA, 1419 bp, synthetic construct
  misc_feature 1..1419: note = Description of Artificial Sequence: Synthetic coding sequence
  source 1..1419: mol_type = other DNA
atgccccccatcggcctggacaacgtggccacctacgccggccagtttaatcaggattacctctcgggcatggccgccaatatgtccgggactttcggaggcgcgaatatgccaaatctctatccaggggcacccggggccggatatccccccgtccccccaggaggatttgggcagcccccaagtgcccagcagcccgtgcctccctacgggatgtacccccctcccggcggtaaccctccttcaagaatgccttcttatcccccttaccctggcgctcccgtgccgggccagcccatgcctccccccggacagcaaccgccaggtgcttacccagggcagcctccagtgacctatcctggacagccaccagtgcctctacctggccagcaacagcccgtaccgtcttatcccgggtaccccgggagcggaacagttactcctgctgtgcctcccactcagttcggctcgcgagggaccattactgacgccccaggctttgaccccctgagagacgccgaggtgcttaggaaggccatgaaggggttcggaactgatgagcaggccattattgactgtttgggctcacggtctaataagcagcggcagcagatccttctctcttttaaaacagcctacggcaaggaccttatcaaagacttaaaatccgagttaagtgggaatttcgaaaagacgatcctagcactgatgaaaacaccggtgttgtttgacatttacgaaatcaaagaagctatcaaaggcgtaggaaccgacgaagcctgcttgatcgagatcttggccagcagaagtaatgaacatatcagggagcttaacagagcctacaaagcggaattcaaaaaaacactggaagaagcaattaggtcggacacatcaggtcacttccaacgactgttaataagcctgagtcagggcaatcgagacgaatccacaaacgtcgacatgtccctggctcagagagacgcacaagagctgtacgccgccggcgagaatcggttgggcaccgatgagagcaagttcaacgccgtcctgtgttccagaagccgcgcgcatctggtcgctgtgttcaacgaatatcagcgcatgactggccgggacatagagaagtctatttgtagggaaatgtccggcgatctagaagagggcatgctggccgtagtgaagtgcttgaagaacacacccgccttctttgcggagagactcaacaaagccatgcggggcgccggaactaaggaccgaaccctcattcggatcatggtcagcaggagcgaaaccgaccttctcgacattcggtccgagtacaagagaatgtacggtaagagcctgtaccacgatatcagcggcgatacttccggtgactacagaaaaattctgcttaaaatctgtggaggaaatgattag

SEQ ID NO: 179137 - DNA, 1074 bp, synthetic construct
  misc_feature 1..1074: note = Description of Artificial Sequence: Synthetic coding sequence
  source 1..1074: mol_type = other DNA
atgggccggcagctggccggctgcggcgacgccggcaagaaggcctcattcaaaatgtccaccgtgcatgagatcctgtgtaagctgtctctagaaggggatcactctactccaccctctgcctatggaagtgtgaaggcctacacaaatttcgacgccgaacgagacgccctcaatattgaaaccgcgattaagactaaaggggtagacgaagtgacaatagtcaacatcctgactaataggtcaaacgcccagcgtcaggacattgcctttgcctaccagaggcggactaagaaggagctcgcctctgccctgaagtccgctctgtcaggacacttggaaactgtcattctgggactgttgaagacgcctgctcagtacgatgctagcgagctgaaagcgagtatgaaaggcttggggactgacgaagacagcctaattgaaataatctgctcaaggactaatcaggagctgcaggaaataaaccgtgtgtataaagaaatgtacaaaacagatcttgaaaaggacataatctcagacacctcaggcgacttccgtaagctgatggtcgcgctggccaaaggaaggagagccgaagacggaagtgtgatcgactatgaattgatcgaccaggacgctagggatctctacgacgcaggcgtcaaacggaaggggaccgatgttcctaaatggatatccatcatgactgagcgatccgtgcctcacttgcagaaagttttcgatcgctataagagctattctccctacgacatgctcgagtcaataaggaaagaggtcaagggcgacctggaaaatgcgttcctgaacctggttcagtgtatccaaaataagccactgtattttgctgatcggttgtacgactccatgaagggaaaggggacccgtgacaaggtcctaatcagaatcatggtctcacggtccgaagtagacatgttaaaaatcaggtcagaattcaagaggaagtatggtaagtccctctactactatattcagcaggacaccaagggggattatcagaaagcactcctgtatttatgcggcggtgacgattag

SEQ ID NO: 179138 - DNA, 1020 bp, synthetic construct
  misc_feature 1..1020: note = Description of Artificial Sequence: Synthetic coding sequence
  source 1..1020: mol_type = other DNA
atgagcaccgtgcacgagatcctgtgcaagctgagcctggagggcgatcactcaacccccccaagtgcatatggatcagtcaaagcctatacaaatttcgatgctgagcgggatgccctaaacattgagactgccattaagacaaagggggtggacgaggtgaccatagtgaacatactgacaaatcggtccaatgcccagcgccaagatatcgcctttgcctatcagcgtaggactaagaaggagctcgcttctgcactgaaatcagcactgtctggacatctggaaaccgtcatcctcgggctgctgaaaacacccgcacagtatgatgcttctgaactaaaggcttccatgaagggcttgggcactgatgaagactcactgattgagatcatttgtagcaggacaaatcaggagctccaggagattaacagggtttacaaggagatgtacaaaaccgatctggaaaaggacattatctcagacacatccggagatttcagaaagctcatggtggcgttggctaaggggaggagggccgaggacgggagcgtgattgactacgaattaatcgaccaagatgcacgcgatttgtatgatgccggcgttaaacggaagggcaccgatgtgccaaagtggattagcatcatgaccgagagaagcgtcccccacctccagaaggtgttcgaccgctataagagctactctccatatgatatgttggaatcaattcggaaagaagtgaagggagacctggaaaatgccttcttgaacctggttcagtgtattcagaacaaacccctgtacttcgccgatagactatatgactccatgaagggcaaaggcacaagagataaagtgttgatcagaattatggtgtcgagaagcgaggtggatatgttgaagatacggtcggagttcaagaggaagtacggcaagtctctgtattattatatccaacaggacacaaaaggagattatcaaaaggccttgctgtacttgtgtggtggcgacgattag

SEQ ID NO: 179139 - DNA, 1020 bp, synthetic construct
  misc_feature 1..1020: note = Description of Artificial Sequence: Synthetic coding sequence
  source 1..1020: mol_type = other DNA
atgagcaccgtgcacgagatcctgtgcaagctgagcctggagggcgaccactcaacaccaccttccgcttacgggagcgttaaagcatatactaatttcgatgccgaaagagatgcactcaatattgagaccgcaattaagactaagggagtggacgaagtaacaatcgtgaacatcctgaccaaccgcagcaatgctcaacggcaagatattgcctttgcctatcaacggcggacaaagaaggaactggccagcgcactaaagtctgcactgagtggtcatctggaaactgtgatacttggattgctgaagaccccagcccagtacgatgctagcgaactgaaagccagtatgaaggggttgggaaccgacgaagactcactcatcgagattatttgctcacgcaccaaccaagaactgcaggagatcaaccgcgtctataaggagatgtacaagaccgacttggagaaagacattatttccgatacaagcggagactttagaaagcttatggtggcactggccaaaggacggagagcggaagatggcagcgtcatagactatgagcttattgatcaggatgctagagacctctacgatgcgggcgtgaaacggaaaggaactgatgtgccgaagtggatcagcatcatgaccgagaggtcagtgccccacttacagaaagttttcgataggtataaatcatactcaccctacgacatgctggaaagcataagaaaggaagtaaagggtgacttggagaacgcttttttgaacctagtgcagtgtatccaaaacaaacccctgtacttcgccgaccgcctgtacgactctatgaagggcaaagggacaagggacaaagtgctgatcaggatcatggtttcacgaagcgaagtcgatatgctcaagatccgcagcgaatttaagaggaaatatggaaagagcttgtattactacatacagcaggacaccaagggcgactatcagaaggccttactgtatctgtgtggaggcgatgattag

SEQ ID NO: 179140 - DNA, 1020 bp, synthetic construct
  misc_feature 1..1020: note = Description of Artificial Sequence: Synthetic coding sequence
  source 1..1020: mol_type = other DNA
atgagcaccgtgcacgagatcctgtgcaagctgagcctggagggcgatcattctacgccaccctcagcctacggatccgttaaggcctacaccaactttgacgccgagcgcgatgccctgaacatcgagaccgctattaaaacaaaaggtgtcgacgaagtgacgattgtcaatattctaacaaatcggagcaacgcacagagacaggatattgcatttgcctaccagagacgaaccaaaaaggaactggctagcgccttgaaatcagcgctctctggccacctggagacagtcattctcggtcttctcaagacccccgcacaatacgatgcatccgagctaaaggcctccatgaaaggattagggactgacgaagattccctgatcgagatcatctgttcacgaacaaaccaggaacttcaagaaatcaatcgtgtctataaagaaatgtacaaaaccgacttggagaaggacattattagtgacacaagtggagatttcagaaagcttatggtggccttagcaaaaggtaggcgggccgaggacggcagcgtgatcgattatgagctgatcgatcaagacgctagggacttgtatgacgcgggggtgaagagaaaaggaaccgatgtgcccaaatggatctccatcatgaccgagcgcagtgtgcctcatcttcaaaaagtgtttgaccgctataaatcctacagtccttatgacatgctggagtctatcagaaaggaagtgaagggcgatttagaaaatgcctttctgaacctcgtgcagtgcatccaaaataagccactgtattttgctgaccggctgtacgactccatgaagggcaagggcactagggataaggtccttatcagaatcatggtgagtcgcagtgaagttgacatgttgaaaatcagatccgagttcaagagaaagtacggaaaaagcctttactactacatccaacaggacactaagggcgactaccagaaggccctgctgtatctgtgtgggggagacgactag

SEQ ID NO: 179141 - DNA, 246 bp, synthetic construct
  misc_feature 1..246: note = Description of Artificial Sequence: Synthetic coding sequence
  source 1..246: mol_type = other DNA
atgagcaccgtgcacgagatcctgtgcaagctgagcctggagggcgatcacagtactccaccttccgcatatgggagcgtaaaggcatacactaacttcgacgcagagagagatgctttaaacatcgaaaccgcaattaagaccaagggcgtcgacgaggtgactatcgtaaatatcctgactaaccgatccaatgcacagcgccaagatatagcattcgcatatcaacgaagaacaaaaaagtag

SEQ ID NO: 179142 - DNA, 531 bp, synthetic construct
  misc_feature 1..531: note = Description of Artificial Sequence: Synthetic coding sequence
  source 1..531: mol_type = other DNA
atgagcaccgtgcacgagatcctgtgcaagctgagcctggagggcgaccactcgactccaccttccgcctacggcagcgttaaagcatacactaactttgacgcagaaagagacgccttgaatatagagactgccatcaagaccaagggagttgacgaggtgactattgtgaacattctgacaaaccgaagtaacgcacagcgccaggatatcgcttttgcctaccagcggcgcacgaagaaggaactggcatctgccctaaagagtgcattgtctggacatctagaaacagtcatcttaggcctgcttaagacgcccgcccagtacgacgcttctgagcttaaggcctcaatgaaaggcttggggactgacgaggattccctgatagaaatcatttgcagtagaacgaatcaggaactgcaggaaatcaatcgggtctataaagagatgtacaagacggacctggaaaaggatatcataagcgacacgtcaggtgatttccggaagttgatggtggccctcgctaagtag

SEQ ID NO: 179143 - DNA, 144 bp, synthetic construct
  misc_feature 1..144: note = Description of Artificial Sequence: Synthetic coding sequence
  source 1..144: mol_type = other DNA
atgagcaccgtgcacgagatcctgtgcaagctgagcctggagggcgaccatagtacacccccatctgcttacgggagcgtcaaggcctataccaacttcgacgccgagcgggatgcattgaacatcgaaaccgccattaaatag

SEQ ID NO: 179144 - DNA, 405 bp, synthetic construct
  misc_feature 1..405: note = Description of Artificial Sequence: Synthetic coding sequence
  source 1..405: mol_type = other DNA
atgagcaccgtgcacgagatcctgtgcaagctgagcctggagggcgatcattccaccccacccagtgcatatgggagcgtgaaggcctatactaactttgatgcagagcgagacgctctaaatatagaaaccgctattaagaccaagggagtggatgaagtgacaattgttaatatcttgacaaaccgttctaatgctcagaggcaggacatagcgtttgcataccagagacgaactaaaaaggaactggctagtgcgctgaagtccgccctgagtggtcatctggagacggtgatcctgggccttttgaagactcccgctcagtatgacgcctcggagctgaaagctagcatgaaggggctcggaaccgatgaagattcactcattgaaattatctgctcctag

SEQ ID NO: 179145 - DNA, 402 bp, synthetic construct
  misc_feature 1..402: note = Description of Artificial Sequence: Synthetic coding sequence
  source 1..402: mol_type = other DNA
atgagcaccgtgcacgagatcctgtgcaagctgagcctggagggcgatcactctaccccccctagcgcctacggcagtgtaaaggcttacaccaactttgacgctgaacgggatgccctgaacatcgagactgcaattaagacaaagggagttgatgaagtgacaatcgtgaacatcctcaccaataggagtaacgcccagagacaagacatagcgtttgcatatcagcgaaggaccaagaaggaactggcatccgcacttaagagcgccttatccgggcatttggaaaccgttatattaggacttcttaaaacgccggcacagtatgacgctagcgaattgaaggcctcaatgaagggactgggcactgacgaagatagcctgattgaaattatttgttag

SEQ ID NO: 179146 - DNA, 450 bp, synthetic construct
  misc_feature 1..450: note = Description of Artificial Sequence: Synthetic coding sequence
  source 1..450: mol_type = other DNA
atgagcaccgtgcacgagatcctgtgcaagctgagcctggagggcgatcacagtacacccccaagcgcctacggtagcgttaaagcgtacactaattttgacgccgaaagagacgcgttaaacatagagaccgcaatcaagaccaaaggcgttgacgaggtgacaatagtgaatattctgaccaatcgttctaatgcgcagcgacaggacatcgctttcgcttaccagcgtcggaccaagaaagagctggcgtccgctctcaagagtgccttatcaggacatctagagacagtcattctcgggctgctcaagactccagcgcaatatgacgcaagtgagctgaaggcttccatgaaagggctgggcaccgacgaggatagtctcatcgaaattatctgctcccgaactaatcaggagcttcaagagataaacagagtgtataaggaatag

SEQ ID NO: 179147 - DNA, 198 bp, synthetic construct
  misc_feature 1..198: note = Description of Artificial Sequence: Synthetic coding sequence
  source 1..198: mol_type = other DNA
atgagcaccgtgcacgagatcctgtgcaagctgagcctggagggcgatcattctacccctcccagtgcgtacggcagcgttaaagcctacaccaattttgatgccgaaagagacgctcttaatattgagactgccattaaaacaaagggagtggatgaagttaccatcgtaaacattctgacaaatcggtccaactag

SEQ ID NO: 179148 - DNA, 360 bp, synthetic construct
  misc_feature 1..360: note = Description of Artificial Sequence: Synthetic coding sequence
  source 1..360: mol_type = other DNA
atgagcaccgtgcacgagatcctgtgcaagctgagcctggagggcgaccactctacgcctccatcggcctacggctcagtgaaagcttatacgaactttgatgcggagcgcgacgcgctcaatatcgagactgcaataaaaaccaaaggcgtggacgaagtgactattgttaatatcctgactaaccgcagcaatgcccagagacaggacatcgcatttgcctatcagcgcaggaccaagaaagagctcgcctctgcacttaagagcgccctttctgggcatttggagacagtgatcctggggcttttaaaaacccccgctcaatatgacgccagtgagctcaaggccagtatgaaatag

SEQ ID NO: 179149 - DNA, 771 bp, synthetic construct
  misc_feature 1..771: note = Description of Artificial Sequence: Synthetic coding sequence
  source 1..771: mol_type = other DNA
atgagcaccgtgcacgagatcctgtgcaagctgagcctggagggcgaccactctaccccaccaagtgcgtacggttccgtaaaggcgtacacaaatttcgatgctgagagggatgctttgaacatcgaaaccgcgataaaaaccaaaggcgtcgatgaagtgacgatcgtaaatatactgacaaaccgttctaacgcacaacggcaggacatcgcctttgcttatcaaaggcgaacgaagaaagaactcgcctccgcattgaagagcgccctgtctggacacttggaaactgttatcctgggcctccttaagacccctgctcagtatgacgctagcgagttgaaggcttcgatgaaagggctggggactgacgaagacagcctcatcgagatcatatgcagtcgcaccaatcaggaacttcaggagatcaaccgcgtctacaaagagatgtacaaaactgacctggagaaagatatcatctcagatacaagtggtgatttccgcaagctgatggtggccctggccaaaggacgcagagctgaggatggcagtgtaatagattatgagctgattgaccaagatgctcgtgatttgtacgatgcgggcgtgaaacgtaagggaactgatgttccaaaatggatctctattatgacagagaggtctgtaccccacctgcaaaaggtgttcgatcgatacaagtcgtatagcccatatgacatgttggaaagtatacgcaaggaggtcaaaggagatttggagaatgcattttag

SEQ ID NO: 179150 - DNA, 360 bp, synthetic construct
  misc_feature 1..360: note = Description of Artificial Sequence: Synthetic coding sequence
  source 1..360: mol_type = other DNA
atgagcaccgtgcacgagatcctgtgcaagctgagcctggagggcgatcactctacccctccaagcgcctatggcagtgtcaaagcgtacaccaacttcgacgctgaacgcgacgcactgaatatagagacagcaattaaaaccaagggtgtcgatgaagtcaccatcgtgaacatactgacaaatcgttccaacgcccagcgtcaagatatagcctttgcctatcagcgtaggactaagaaagagctggcctccgcactgaagtctgccttatcaggacatctggagactgtgatcctaggacttctcaaaacaccggcccagtacgatgccagcgagctgaaagctagtatgaagtag

SEQ ID NO: 179151 - DNA, 531 bp, synthetic construct
  misc_feature 1..531: note = Description of Artificial Sequence: Synthetic coding sequence
  source 1..531: mol_type = other DNA
atgagcaccgtgcacgagatcctgtgcaagctgagcctggagggcgatcattctacaccaccttcggcctacggaagtgtgaaggcctacaccaacttcgacgctgaaagagatgctctgaatatcgaaaccgcaataaagactaagggagtggatgaggtgactatcgtgaacatcttaacgaatcgttccaatgcgcagcgacaggatattgcatttgcatatcagagaagaacgaagaaggaactggcttctgccctcaagagtgctctttcaggacatcttgaaaccgtcatcctgggtttgcttaagacacccgcccagtacgacgcgagcgagttaaaagcgtctatgaagggtctgggcactgatgaggacagcctgattgagatcatctgcagcaggactaaccaggagcttcaggaaattaatagggtgtacaaggagatgtataaaactgacctggaaaaagatattattagcgacacatctggggatttccgcaaactgatggttgccctggctaagtag

SEQ ID NO: 179152 - DNA, 684 bp, synthetic construct
  misc_feature 1..684: note = Description of Artificial Sequence: Synthetic coding sequence
  source 1..684: mol_type = other DNA
atgagcaccgtgcacgagatcctgtgcaagctgagcctggagggcgaccactccacacctccctctgcttatggcagcgtaaaggcatacacaaacttcgatgccgaaagagatgccctcaatatcgagacagccattaaaaccaagggagtggacgaggtcaccatagttaacatccttacgaatcgctcaaacgcccagcgacaagacatcgcatttgcgtatcaacgcagaacaaagaaggagctggcctccgcccttaaatccgccctaagcggccatctggaaactgtgattcttggtcttctgaagacccccgctcagtatgacgcatccgaacttaaggccagcatgaaaggcctcggcacggatgaggactcactcattgagatcatatgcagtcggaccaatcaagagctacaggagatcaatcgggtttacaaagaaatgtataaaaccgatctggaaaaggatattatttctgatacctccggtgactttagaaagctcatggtggccttggcgaaaggccgcagagccgaagacggatctgtgattgactatgaactcatcgatcaggacgcacgagatctgtacgacgcgggggtgaaacggaaggggacagatgtacctaagtggatctccatcatgaccgagcggtctgtgccacatctgcagaagtag

SEQ ID NO: 179153 - DNA, 531 bp, synthetic construct
  misc_feature 1..531: note = Description of Artificial Sequence: Synthetic coding sequence
  source 1..531: mol_type = other DNA
atgagcaccgtgcacgagatcctgtgcaagctgagcctggagggcgaccacagcacccccccatctgcctacgggagtgtcaaggcctataccaattttgacgctgaacgtgacgccttaaatatcgaaacagccataaagacaaagggagtggacgaagtgacgatagtgaatatcctgacgaacagatccaatgcccaaaggcaggacattgcattcgcgtaccagagacggaccaagaaagagctagcctcagccctgaagagcgcactttcagggcacctggagacagtgattctgggactgctgaagacacctgcccaatatgatgcatctgagttaaaagcatcaatgaaggggctcgggactgatgaggactccctgattgagatcatttgctccaggacaaatcaagagctgcaagagattaatcgggtgtataaagagatgtataagacggatctggagaaggacattatcagtgacacttccggcgatttccggaagcttatggtggcacttgccaagtag

SEQ ID NO: 179154 - DNA, 333 bp, synthetic construct
  misc_feature 1..333: note = Description of Artificial Sequence: Synthetic coding sequence
  source 1..333: mol_type = other DNA
atgagcaccgtgcacgagatcctgtgcaagctgagcctggagggcgaccactctaccccgccaagcgcctacggcagcgtcaaggcatatactaatttcgatgccgagagagatgccctcaatatcgagaccgcgattaagaccaagggagtggatgaggttacgattgtgaatatcctgacgaatcggtcaaatgcccagcgccaggatattgccttcgcctatcagcggcggactaagaaggaattggcatcggccctgaagtcggctctgagcggacatctcgaaaccgtgatcttaggcttgctgaagacacctgctcagtacgattag

SEQ ID NO: 179155 - DNA, 972 bp, synthetic construct
  misc_feature 1..972: note = Description of Artificial Sequence: Synthetic coding sequence
  source 1..972: mol_type = other DNA
atggccagcatctgggtgggccaccggggcaccgtgcgggactaccctgacttttcgcccagtgtcgatgccgaggcaattcagaaagcaatcagaggaattggcacagacgaaaaaatgctcatatcaatcctgacggagaggtctaacgcacagcgccagctgatcgtcaaggaatatcaagccgcatacggaaaagagctgaaggacgatttgaagggcgacctatcgggccacttcgaacacttaatggtggccctggtaaccccacccgcagtgttcgacgctaagcaactgaaaaagagcatgaagggcgccggcaccaacgaagacgccctcatcgagatcctgacgactaggacttcacgccagatgaaggacatctctcaggcctattatacagtgtacaagaagagcctgggggatgacatttcatcagagacatctggcgatttccggaaagccctcctgaccctggctgacggacgacgcgatgagagtctaaaggttgacgaacacctggctaagcaggacgctcaaatcctgtacaaagcaggggagaaccgctgggggaccgatgaggataagttcacagaaatattgtgtctaaggtcattccctcagcttaaactgacctttgacgaatatcgtaatatctcacagaaagacattgtggacagcatcaaaggagaactgtcagggcacttcgaggacctcctgttggccatcgtgaactgcgtaaggaacactccagctttcttggctgagaggttgcaccgtgccctgaaggggatcgggactgacgagttcaccctaaatcgcatcatggtctcccgctcggagattgatttgttggatattcgcacagaatttaaaaagcattatggctattcgctttattccgccatcaagtctgatacctccggcgactacgaaattactctcctcaaaatatgcggaggtgacgattag

SEQ ID NO: 179156 - DNA, 405 bp, synthetic construct
  misc_feature 1..405: note = Description of Artificial Sequence: Synthetic coding sequence
  source 1..405: mol_type = other DNA
atggccagcatctgggtgggccaccggggcaccgtgcgggactacccagactttagcccctcagttgacgccgaggctatccagaaagcaatccgcggaatcggaaccgatgagaagatgttgatttccatactgacagaaagaagcaatgcccagaggcagctgatcgtcaaggaataccaggcagcctacggcaaggagctcaaggatgatctgaagggcgaccttagcggccactttgaacacctcatggtggctctcgtcaccccgcctgccgtgttcgacgcgaaacaattaaagaagtccatgaagggggcagggacgaacgaggacgccttaatagaaattttgaccacacgcacaagtcggcagatgaaagacatcagccaggcctattacacgtag

SEQ ID NO: 179157 - DNA, 315 bp, synthetic construct
  misc_feature 1..315: note = Description of Artificial Sequence: Synthetic coding sequence
  source 1..315: mol_type = other DNA
atggccagcatctgggtgggccaccggggcaccgtgcgggactaccctgattttagtcccagcgtagacgcagaggctattcagaaggccatccgaggtattgggacggacgaaaagatgcttatttccattctgaccgaaaggagcaacgctcagagacaacttatcgtcaaagagtaccaggcagcgtacggtaaagaattgaaggacgatctcaagggcgacctgtcaggacacttcgagcacttgatggtggccctggtgaccccccctgcagtctttgacgccaagcagctcaagaagtccatgaaatag

SEQ ID NO: 179158 - DNA, 465 bp, synthetic construct
  misc_feature 1..465: note = Description of Artificial Sequence: Synthetic coding sequence
  source 1..465: mol_type = other DNA
atggccagcatctgggtgggccaccggggcaccgtgcgggactacccggatttcagtcctagcgtggatgcagaagccatccaaaaggccattcgcgggatcggtactgacgagaagatgctgatttccatactgactgaacgtagcaatgcacagaggcagttaatagtgaaagaataccaagctgcgtatggaaaagagctgaaagacgatctgaaaggtgatctatccggccacttcgaacacctcatggtagctcttgttactccccccgccgtctttgatgctaaacagctcaaaaaatccatgaaaggtgccggcactaatgaagacgccctgatcgagattctgaccacaagaaccagtaggcagatgaaagatatcagtcaggcatattatacagtctacaagaaaagcctcggtgacgacatctcttccgagacttcaggcgacttccggaagtag

SEQ ID NO: 179159 - DNA, 966 bp, synthetic construct
  misc_feature 1..966: note = Description of Artificial Sequence: Synthetic coding sequence
  source 1..966: mol_type = other DNA
atggccatggccaccaagggcggcaccgtgaaggccgccagcggctttaacgccatggaagatgctcagaccctccggaaagccatgaagggtctgggaaccgacgaggatgccataatctctgtgctggcataccgcaatacggcccagagacaggagatccggacagcgtacaaatccaccataggccgagacctgatagacgacctcaagtctgaattaagcgggaacttcgagcaggtgatcgtgggcatgatgacgcctactgtcctgtacgacgtgcaggagttaaggcgggccatgaagggagccgggactgatgagggatgcctgattgagatcctagcaagcaggaccccagaagagatcagaaggattagccagacctatcagcagcaatatggtcgctccctggaagatgacataaggagcgatacgtcttttatgttccagcgagtgttggtctcgctgagtgctggaggcagagacgaaggcaattatctggatgacgcactcgtgcggcaggatgctcaggacctttacgaggctggggaaaagaagtggggcaccgacgaggtgaagtttctgacagtcctgtgctctcggaaccgaaatcatctgctgcatgtgtttgatgagtacaagcgtatttcgcaaaaggatattgagcagtcgattaagtcagagacatccggctcatttgaggacgccctgctagctattgtcaagtgtatgcggaataaaagcgcgtactttgctgagaaactgtataagtcaatgaagggcctgggaactgacgataacacattaatccgtgtcatggtctcccgcgctgagattgatatgttagatatcagggctcactttaagcgcctttatgggaagtccttgtactctttcattaagggagacacctctggagactatcgaaaggttttactggttctgtgcggaggtgatgattag

SEQ ID NO: 179160 - DNA, 900 bp, synthetic construct
  misc_feature 1..900: note = Description of Artificial Sequence: Synthetic coding sequence
  source 1..900: mol_type = other DNA
atggccatggccaccaagggcggcaccgtgaaggccgccagcggctttaacgccatggaagatgcccaaacacttcggaaagcaatgaaagggcttgggacagacgaagacgcgattatctctgtgctcgcataccgtaacactgcacaacggcaggaaattagaacagcctacaagtctacaattggccgggatctgattgacgacttgaagagtgagctgagtggaaacttcgagcaaggtgccggcactgatgagggttgcctaattgagatactggcgtctagaacgcccgaggaaattcgaaggatctctcagacatatcagcaacagtacggacgaagcctggaggacgacatccggtctgacacctcttttatgttccagagagtattggtcagcctgagcgccggcgggagagatgagggcaattacctggacgacgccctggttcgacaagatgcccaagacctctatgaggcgggtgaaaagaagtgggggactgacgaggtgaagtttctgacagtgctatgctcccggaacagaaatcacctactccacgttttcgacgagtataagaggatatcgcagaaagacatcgagcagtccatcaagagcgaaactagcgggtcttttgaagacgccctcttggctatcgtgaagtgcatgcgcaataaaagcgcatacttcgccgagaaactgtacaagtccatgaagggacttggcaccgatgacaatacactgatcagggtgatggtgagccgcgccgagatcgacatgctcgatatccgggcccactttaaacgtctgtacgggaaaagcctctattcttttattaagggcgatacaagtggtgattatcgcaaagtgctgttagttctctgcgggggtgacgactag

SEQ ID NO: 179161 - DNA, 714 bp, synthetic construct
  misc_feature 1..714: note = Description of Artificial Sequence: Synthetic coding sequence
  source 1..714: mol_type = other DNA
atgatgacccccaccgtgctgtacgacgtgcaggagctgcggcgggcaatgaagggggcgggcaccgatgagggatgcctcatcgagattctggctagccgaactccagaggagatcagaaggatttctcagacataccaacagcagtacgggagatcactagaagacgatatcagatccgatacctcctttatgtttcagcgagttcttgtttctctgtcagctgggggtcgagatgaaggaaactacctcgatgacgctctagttagacaagacgcacaggacctctatgaggctggagagaagaaatggggcacggacgaggtgaagtttctgactgtactgtgttcacgcaacagaaatcatctgttgcacgtattcgacgaatacaagaggattagtcagaaagatatcgagcagagcataaaatctgagacgagtgggtcctttgaggatgccttactagccatagtcaaatgtatgaggaacaaatctgcatacttcgcggagaagttgtacaaatcaatgaaggggctggggaccgatgataatactctgattcgcgtcatggtctcccgggcggaaattgacatgcttgatatccgagctcattttaaaagactctacggaaaatctctctatagttttatcaaaggcgacacaagcggcgactatcggaaggtgctcctggtgctctgcggcggggatgattag

SEQ ID NO: 179162 - DNA, 963 bp, synthetic construct
  misc_feature 1..963: note = Description of Artificial Sequence: Synthetic coding sequence
  source 1..963: mol_type = other DNA
atggcccaggtgctgcggggcaccgtgaccgacttccccggcttcgacgaacgcgctgacgcagaaacacttcggaaggccatgaagggtctgggaaccgatgaagagtccatcttaaccctgctcaccagtaggtccaacgcccagagacaagagatttcagcagccttcaagacgttgtttgggcgggacctgctcgacgacctcaaatccgagctcacggggaagttcgagaagcttattgttgctctgatgaagccttcaagactgtacgatgcctacgagctgaaacatgctctcaaaggggctggcacaaacgagaaagtactgacggaaatcatagccagcaggaccccagaagaactccgcgctattaagcaggtttacgaggaggaatatggcagttcacttgaagatgacgtggttggggacacatcagggtactatcagcggatgctggtggtgcttctgcaggccaacagggaccccgatgcgggcatcgacgaagcacaggtggagcaggacgcccaggcactatttcaggctggtgaactgaagtgggggactgacgaagaaaagttcattaccatcttcggaacccgctctgtaagtcacctccggaaagtgtttgataagtatatgacaatctcagggtttcaaatcgaggaaaccattgatcgtgagaccagtggaaacttggagcaactcttgctggctgtggtcaaatcaattagaagcatacctgcttatctggcagagacactgtactatgcaatgaagggcgcgggtacagatgatcacacactgattcgggtgatggtgtcccgatccgagatcgatctgttcaatattcggaaggagttcagaaaaaatttcgctacaagcttgtacagcatgatcaagggggacacttctggcgattacaagaaggccctcctgttactgtgtggtgaggatgattag

SEQ ID NO: 179163 - DNA, 2022 bp, synthetic construct
  misc_feature 1..2022: note = Description of Artificial Sequence: Synthetic coding sequence
  source 1..2022: mol_type = other DNA
atggccaagcccgcccagggcgccaagtaccggggcagcatccacgacttccccgggttcgaccccaaccaggacgcggaggccctgtataccgctatgaaaggattcggcagcgataaggaggcaatcctggacataattacctcccggagtaatagacagcgccaggaggtgtgtcagagttataagagcctgtatggcaaagacctcatcgcagatttaaaatacgaactgaccggcaagtttgagagactgattgtgggactgatgaggccacctgcttactgtgatgccaaggagatcaaggacgctatttcaggaattggcactgacgagaagtgccttatcgagatcctcgcctcacgtacaaatgaacagatgcaccaactggtggcggcctataaggacgcttacgagcgggatcttgaggctgatataattggagacacctctggccattttcagaagatgctggtggtactgctgcaaggtaccagagaggaagatgacgttgtgtcagaagacctcgttcagcaagatgtgcaggatctctatgaggctggagaactcaagtggggcactgacgaagctcagttcatatatattcttggcaaccgctcgaaacagcacctgaggctcgtgttcgatgaatatttaaagacgacaggtaaacctatcgaagccagtattagaggagagctgtcgggggatttcgagaagttaatgcttgccgtggtcaagtgcatccggagtacaccagaatacttcgcagagaggctcttcaaggcaatgaagggactgggcacccgggataacacactgatccgcatcatggtaagcaggagcgaactagacatgctagatatccgagagatttttcgcaccaaatacgaaaagagcttgtatagtatgattaagaatgatacatctggagaatacaagaagaccctgctgaaactatcaggcggagatgacgatgccgctggccagttttttcccgaggcagcccaggtggcttaccaaatgtgggaactctccgctgtggctcgggtggagttaaaaggaaccgtcaggcctgccaacgacttcaaccctgatgccgatgcaaaggccctgaggaaggccatgaaagggctgggtactgatgaagataccataatcgacattatcactcatagatctaacgtgcagcggcagcagatccgccagacattcaaatcacattttggacgggacttaatgacggatttaaaaagtgaaatttccggggacctagcccggttgatacttgggctaatgatgccgccagcgcactatgacgccaagcagcttaagaaagctatggagggcgcgggcaccgacgaaaaggcccttattgaaatcctagccacccgaacgaatgccgagattagggccataaacgaggcctacaaggaggactatcacaagagcctcgaggatgccctgagtagtgatacgagcggacactttagacggatactgattagcttggctaccggtcatagagaagagggaggggaaaatctagatcaagcccgtgaggatgcgcaggtggccgcagagatacttgagattgctgatactccgagcggtgacaaaacctccttagaaactaggttcatgactatcttatgcaccaggtcgtatccacacctgaggcgtgtattccaggagttcattaaaatgacaaactatgacgtagagcacacgattaaaaaggagatgtctggggatgttagagatgcctttgtggcgatcgtgcagtccgtcaaaaacaaacctctgttcttcgccgacaagctgtacaaatccatgaagggagctgggactgacgagaagacactcacacgcattatggtgagcagaagcgaaattgacttgttgaatattcggagggagttcattgagaagtacgacaaatcactacatcaagccatagagggcgacacttcaggcgactttctcaaagcgctcctggccctgtgcggtggtgaggattag

SEQ ID NO: 179164 - DNA, 2004 bp, synthetic construct
  misc_feature 1..2004: note = Description of Artificial Sequence: Synthetic coding sequence
  source 1..2004: mol_type = other DNA
atggccaagcccgcccagggcgccaagtaccggggcagcatccacgattttcccgggttcgaccctaaccaggatgctgaggctctgtatacagctatgaaaggattcggctcagacaaggaagctatactcgatatcataacatcgagaagtaatcgtcagcggcaggaggtttgccagtcttataaaagtctgtacgggaaggacttaatagctgatctcaaatacgaacttactggcaagttcgagcggctgattgttgggctgatgagacctccagcctattgcgacgcaaaagaaataaaggacgcaatatctggtatcggcaccgatgagaaatgcctgattgagattcttgctagtcgcactaacgaacaaatgcaccagctggtcgccgcctataaggatgcttatgagagggatctagaggccgacatcatcggtgacacctccggccacttccagaaaatgctggtagtgctcctgcagggaacacgtgaagaagacgacgtggttagcgaggatctggtccagcaggacgtccaggatctgtatgaagccggcgaactgaaatggggtaccgatgaggctcagtttatttatatcctgggcaacaggtcgaagcagcacctgaggttggtgttcgacgagtatctcaagactaccggcaaaccaattgaggccagcataaggggagagctctcaggcgactttgaaaaattgatgcttgctgttgtgaaatgtattcggtcaacccctgaatactttgcggaacgcctatttaaggctatgaaaggtctcgggacacgcgacaacacactaatcaggatcatggtatctcggtcagaactcgacatgctggatattcgcgagatttttcgaaccaaatacgagaaatctctctactctatgatcaaaaatgatacatccggtgagtataagaagacactacttaagctgagcgggggcgacgatgatgctgccgggcagttctttccagaggccgcacaagtcgcatatcaaatgtgggagctgagcgcagtggcccgagtggaactgaaggggactgtacgccctgcaaacgatttcaacccagacgctgacgcaaaggccctccgaaaggcaatgaaggggctcggtaccgatgaagacaccatcatcgacatcataactcatagaagcaatgtgcaacggcagcagatccgtcaaacgtttaagtctcacttcggccgtgatctgatgactgatctgaaatccgagatcagcggagatctggctaggctaatcttgggcctcatgatgcctcccgctcattacgatgccaagcagcttaaaaaggcaatggaaggagcgggaaccgacgagaaggcgctcatcgaaatactggccacgcgcaccaatgctgagatccgcgcgattaatgaggcctacaaggaggattatcacaagtctctggaggacgcactctcaagcgacacttctggccacttccgccgcatattgatttctctggcgacaggccatcgggaggaaggtggagaaaatttggaccaggcccgcgaggatgctcaggaaatagccgatacacccagtggggacaagactagcctggagacccgattcatgacgatcctctgcacccgatcttacccacacctcaggcgcgtattccaagaatttattaaaatgacgaattacgatgtggaacatacgattaagaaggaaatgtcaggagacgtgagggatgcctttgtggctatcgtgcagagtgtgaagaacaagcctctgtttttcgcagacaaattgtataaaagcatgaaaggcgcaggcaccgatgagaaaaccctcactcgtatcatggtctctcggagtgagatcgatttgcttaatatcaggagagaatttatcgagaaatatgataagtccctccatcaagccatcgaaggtgatacaagcggagatttcttgaaagccctgctagccctatgtggaggagaggattag

SEQ ID NO: 179165 - DNA, 333 bp, synthetic construct
  misc_feature 1..333: note = Description of Artificial Sequence: Synthetic coding sequence
  source 1..333: mol_type = other DNA
atggccaagcccgcccagggcgccaagtaccggggcagcatccacgacttcccgggttttgatcccaaccaagatgccgaagctttatacacggctatgaagggcttcggctctgataaagaagccatcctcgatataatcacctccagaagcaaccggcagagacaggaggtgtgtcagtcatacaagtcgttgtacggaaaggatctaatagcagacctcaagtatgaactgactgggaagtttgagcgtttgatcgtaggcctgatgcgtcctccagcctactgtgacgcaaaggagatcaaagatgctatatccggtattggcacatag

SEQ ID NO: 179166 - DNA, 1926 bp, synthetic construct
  misc_feature 1..1926: note = Description of Artificial Sequence: Synthetic coding sequence
  source 1..1926: mol_type = other DNA
atgaagggcttcggcagcgacaaggaggccatcctggacatcatcacatcccggagcaacaggcagagacaggaagtgtgtcaatcctacaagagtctctacggcaaagacctgatcgccgatctgaagtatgagctgaccggtaagttcgaacgactgattgtcggcttgatgaggcccccggcttactgtgatgccaaggaaatcaaggacgctatcagcggaatcggaaccgatgaaaagtgtctgatcgagatcctcgccagcagaactaatgagcagatgcatcagctggtcgccgcatacaaggacgcctacgaaagggacttagaggccgacattatcggagatactagtggtcattttcagaagatgctggttgttctgctgcaaggaacaagagaagaggacgacgtggtctcagaagaccttgtccagcaggacgtgcaggacttatatgaagccggtgagctgaagtggggaacggacgaagcccagttcatctatatcctcggaaacaggtccaaacagcatctgcggttggtcttcgacgaatatctgaaaacgacagggaaacccatcgaggcctcaatccggggagaattatctggggacttcgagaaacttatgctggcagtggtcaaatgtatcagatccactccggaatacttcgctgaacggctcttcaaggccatgaagggactcggcacccgagacaacactctgatacggatcatggttagccggtcagaacttgacatgctcgacattagggagatctttcgtaccaagtatgagaagagtctgtatagcatgatcaagaacgacacgagtggagagtataagaagacattgctaaaacttagcggcggggacgatgatgccgcaggacagtttttccccgaggccgcacaggtagcctatcaaatgtgggaactcagtgctgtcgcgcgcgtggagctgaaagggaccgtgcggcccgcaaatgatttcaatccagacgctgacgcaaaagcattgcgcaaagcgatgaagggcctaggaacagacgaggacaccatcatcgacatcattacacatcgttccaacgtccagagacagcagatccgccagacctttaaaagtcattttgggagggacctgatgacagaccttaaaagcgagattagcggggatctggcgcgactcattctcggccttatgatgccccccgcccactatgatgctaagcagctgaagaaagccatggagggtgcaggcactgacgaaaaagctctgatcgagatccttgccacccggactaacgctgagattcgggccatcaacgaagcctataaggaagactatcataaatccctggaagatgctctgagtagcgacacctcaggtcatttcagacgtattttgatttcactcgcaaccgggcaccgtgaagaagggggagagaatcttgaccaggccagggaagatgcacaggttgctgccgagatactcgagattgccgatacccccagcggagacaaaaccagcttagaaacacggtttatgaccatcttatgcacgaggagttatccgcatctgagacgggtgttccaggagttcattaaaatgactaattacgatgtggaacacactatcaaaaaggagatgtccggggatgttcgcgatgccttcgtggccattgtgcagtccgtgaaaaataagccactcttctttgctgataaactgtataagtccatgaaaggcgcaggaactgacgaaaaaactctgacacggattatggtaagtaggtccgagatcgacctattaaacataagaagggaattcatcgaaaaatatgacaaaagcctgcaccaggcaattgagggtgacacttctggagatttcctaaaggcgctgctggccttatgcggcggagaggattag

SEQ ID NO: 179167 - DNA, 1644 bp, synthetic construct
  misc_feature 1..1644: note = Description of Artificial Sequence: Synthetic coding sequence
  source 1..1644: mol_type = other DNA
atgcaccagctggtggccgcctacaaggacgcctacgagcgggacctcgaagctgacatcatcggggatacttccggtcacttccagaaaatgcttgtcgtcctgctgcagggaacacgcgaagaggacgatgtcgtgtccgaggatttagttcagcaggacgtccaggacttgtacgaggctggggaactgaagtggggcaccgacgaggctcaatttatttatatcttaggaaaccggtccaagcagcacctgcgacttgttttcgatgaatacctgaagaccacagggaagccaatcgaggctagcattcgcggcgagctcagtggggactttgagaagctgatgttggctgtcgtcaagtgtattaggtccacccccgaatatttcgccgagcggttgtttaaggcgatgaaaggcttgggcactagggataatacactgattagaataatggttagtaggtcagaattagatatgctggatattcgagagattttccgcaccaaatacgagaagtcactgtattctatgatcaagaacgacacctccggagaatacaagaaaacactcctcaaactgtctggtggcgatgacgacgccgctggacagttttttccagaagccgctcaggtcgcctaccagatgtgggaactcagcgcagtggcccgggtggaattaaagggcactgtgcggccagctaatgatttcaacccagatgccgatgcgaaggccctgcggaaagccatgaagggattagggaccgacgaggataccatcattgacattatcacgcacagatccaatgtacagcgtcagcagatccgtcagactttcaagagccacttcggacgtgatctgatgaccgatctcaagtccgaaattagtggagaccttgcacggctcattctaggcttaatgatgcctccggctcattacgatgctaagcaactgaagaaagcgatggagggagccggcacagacgaaaaggccctcatcgagatactcgctacaagaactaatgcggaaattcgagccatcaacgaggcatataaggaagactaccacaaatcactggaagacgctctgagcagtgatacgagtggacacttccggagaatcctgatttcattggcgaccggccatcgcgaggaaggaggggaaaacctagatcaggcgcgggaagatgctcaggtagcagctgagattttggaaatcgctgacaccccaagcggcgataaaacatcactggagactcggttcatgacaattctgtgcacacgctcttacccacatttgaggcgagtgttccaggagtttatcaaaatgaccaattacgatgtggagcacactattaagaaggagatgagtggtgatgtccgcgacgcctttgtcgctatcgtgcaatccgtcaaaaacaagccgctattctttgccgataaactatataaaagtatgaaaggtgcgggtactgacgagaaaaccctaactcgcatcatggtgtccagatctgaaatcgatttgcttaatatcaggagggaatttatcgagaaatacgacaagtccctccatcaggcgattgagggggacacaagcggcgatttcctaaaggcattgcttgctctgtgcggtggtgaagactag

SEQ ID NO: 179168 - DNA, 1467 bp, synthetic construct
  misc_feature 1..1467: note = Description of Artificial Sequence: Synthetic coding sequence
  source 1..1467: mol_type = other DNA
atgagctaccccggctacccccccaccggctacccccccttccccggctatccccccgcagggcaggagtcaagctttcccccctctggacagtatccttatccaagtgggtttcctcccatgggaggcggcgcatatcctcaggtaccatcctcagggtaccctggagccggaggctaccctgccccgggggggtaccctgcgcccggcggctatcctggggcaccacagcctggcggagctccatcatatcctggcgtcccgccaggacagggctttggagtaccaccgggaggcgccggcttttccggttacccacaaccgccttcgcaatcctacggaggtggtccagctcaggtacccttacctggtggcttcccgggcggccagatgccatcccagtacccaggaggacagcctacctacccatcccagataaacaccgactctttttcaagctatcccgtgttctctcctgtgagcctggactatagtagcgaaccagctaccgtaacacaggtcacacaggggacaatccgcccagctgctaactttgatgcaatcagagacgcggaaatcctgagaaaggctatgaaaggatttggcacagatgagcaggctattgtagacgttgtcgcaaaccggagtaacgatcagaggcaaaaaatcaaggccgccttcaaaacgagctacggtaaggatctaattaaagatctgaagtccgagctgtccggaaacatggaggagctcatccttgccctttttatgccacccacatactatgacgcctggtccctccgtaaggctatgcagggcgctggtacgcaggaacgcgtgttgatcgagatcttgtgcaccagaactaatcaagagattagagaaattgtgcggtgctatcagtctgagttcgggagggatctggagaaagacatccggtcagacactagcgggcattttgaacgactcctggtgagcatgtgccaggggaaccgagacgaaaaccaaagtattaatcatcagatggcacaggaggatgcacagcgtctgtaccaggccggggaaggacgcctgggcactgatgaaagttgttttaatatgatcctggctactcgatcttttccacagctaagggctacaatggaggcatacagcaggatggctaaccgtgacctcctttccagcgtgagtagggagtttagcgggtacgttgaaagcggcctgaagaccattctgcagtgcgctctgaacagacccgccttctttgccgaaaggttatactatgccatgaagggggcgggaacggatgacagcactcttgtacgtattgtggttacccgctctgaaatcgatcttgtgcagatcaagcagatgttcgcccagatgtatcagaagaccctaggcactatgattgctggcgacacttcaggcgattaccgacgacttctactcgccatcgtgggccaatag

SEQ ID NO: 179169 - DNA, 1401 bp, synthetic construct
  misc_feature 1..1401: note = Description of Artificial Sequence: Synthetic coding sequence
  source 1..1401: mol_type = other DNA
atgagctaccccggctacccccccaccggctacccccccttccccggatacccacccgccgggcaggagtcctcattccctccctccgggcagtatccatacccctcaggatttcctcctatgggagggggcgcttacccgcaggtgcccagttccggttaccctggtgcagggggatatcctgccccaggcggttatcctgcacctggaggatatccgggggctccccagcccggcggcgctccgtcctaccccggtgtgccccccgggcaggggttcggagtgcccccagggggtgccggttttagcggatatccacagccaccaagtcagagctatggaggcggacccgcccaagttcccctgcccggcggtttcccgggaggtcagatgcctagccaatatccagggggccagcctacgtatcccagccagcccgctaccgttactcaggtcacacagggcactataagacccgcagccaattttgacgccatccgcgatgcagaaatcctcagaaaagcaatgaaaggatttggcacggatgaacaggctatagtagacgtagtagctaataggagtaatgaccagaggcagaagatcaaagcagcattcaaaacttcctatgggaaagatctcatcaaagatctcaagagcgaattgtctggcaatatggaagagcttattctggctttgttcatgcctcctacttattacgacgcgtggtccttgcggaaagcaatgcaaggagcaggtacgcaagaacgcgtgctgattgaaattctttgcacacgcaccaaccaggagatccgcgaaattgtgcgatgctaccagtccgaattcggccgagatttagagaaagacatcagatccgacacaagcgggcattttgagcgccttctggtatctatgtgtcaaggaaaccgcgacgagaatcagtcgataaatcaccaaatggcccaggaggacgcacagagattgtaccaggcaggtgaaggacgactggggacagatgaatcttgtttcaacatgatcctggctaccaggtccttcccccaactaagggccactatggaagcttattcccggatggcaaatagagacctcctgtcatcggtgtcgcgcgagttctccggatacgttgaatctggactgaaaaccatactgcagtgcgcacttaaccgacccgccttcttcgcagagcgcctgtactatgccatgaagggtgccggcactgatgatagtaccctggtgaggatcgtcgtgacacgaagcgagattgacctcgttcaaatcaaacagatgtttgcccagatgtaccagaagaccttggggacgatgattgctggtgacacctccggagactaccggaggctcctactggctatcgtaggccagtag

SEQ ID NO: 179170 - DNA, 435 bp, synthetic construct
  misc_feature 1..435: note = Description of Artificial Sequence: Synthetic coding sequence
  source 1..435: mol_type = other DNA
atgagctaccccggctacccccccaccggctacccccccttccccggctatcctccagccggacaagaatcgtcgtttccaccatccgggcagtatccataccccagtggctttcccccaatgggtggcggcgcatatccccaagtaccctctagtggctacccgggggccggcggctatcccgcccctggcggctacccggcccctgggggctaccctggcgccccccaacccggaggcgctccctcctatccgggcgtgccaccaggccagggctttggcgtgcctcccggcggggccggcttctcaggttatccacagcctccaagccagagctacggtggtggacctgcacaggtccctctcccaggaggatttcccggagggcagatgcctagccaataccctggtgggcagcctacctaccccagttag

SEQ ID NO: 179171 - DNA, 1011 bp, synthetic construct
  misc_feature 1..1011: note = Description of Artificial Sequence: Synthetic coding sequence
  source 1..1011: mol_type = other DNA
atgcccagccagtaccccggcggccagcccacctaccccagccagccagctacagtcacccaggtgacacaggggacaattcggccagcagcaaacttcgacgccattcgtgacgccgagattttgagaaaagccatgaaaggctttgggactgatgagcaagcaattgtcgatgtcgtagcaaaccgcagcaatgatcagagacagaagataaaggcagcattcaagaccagttacggaaaggacctgatcaaagacttgaaatccgaactgagcggcaatatggaggagctcatcctggccttgtttatgcccccaacgtattacgacgcttggtccctacggaaggccatgcaaggggctgggacgcaagagagggttttgatagaaatcctgtgcacccgaacaaaccaagagattcgagaaatagtgagatgttatcagtctgaattcggcagggacctggagaaggatatccggtccgacacaagtgggcactttgaacgactgttagtaagcatgtgccagggaaaccgagatgagaatcagagtattaatcaccagatggcccaggaggacgcccagaggctctaccaggccggggagggtaggctgggcaccgatgaaagctgtttcaacatgatcctcgcgacacggtcatttccgcagttgcgagcaactatggaggcttatagccgcatggcaaatcgagacctgctgtcttctgtatcacgggagttcagcggctatgtggagagcgggctgaaaaccattctgcagtgtgcgcttaaccgtcccgcattcttcgccgagcgcctgtactacgctatgaagggtgccggcacagacgatagcacactggtacgcattgtggtcacgcggagcgaaattgacctggtacagattaagcagatgtttgctcaaatgtaccagaaaacactgggaacaatgattgcaggagatacaagtggtgattaccggcggctcctcctagcaattgttgggcagtag

SEQ ID NO: 179172 - DNA, 984 bp, synthetic construct
  misc_feature 1..984: note = Description of Artificial Sequence: Synthetic coding sequence
  source 1..984: mol_type = other DNA
atggcctggtggaagagctggatcgagcaggagggcgtgaccgtgaagagctccagccatttcaatccagacccagatgccgagacactctacaaggccatgaaaggtatcgggacaaatgagcaggcgatcattgacgtactgacaaagcggtcaaatactcaaagacagcaaatcgcaaagtcctttaaggcccaatttggcaaagatctgactgagacactcaaatccgagctcagcgggaagttcgagcgtctcatcgtcgcactcatgtaccccccctaccgctatgaggcaaaggagctccatgacgccatgaagggactgggcaccaaggaaggggtgatcatcgaaatactggctagccggaccaaaaaccagctaagagaaatcatgaaggcgtatgaggaagactatggcagttccctggaagaagatatacaggccgacacctcagggtacctggaacggattctggtctgtctactgcaaggcagtcgagacgacgtgtcatcgtttgtagatcccggcctcgccctccaggacgctcaggacctctatgcagcgggtgagaagattcgtggaaccgatgagatgaagtttataactatcctgtgtaccaggagtgcaacacatctgctacgcgtcttcgaagaatacgaaaaaatagcaaataaatccatagaagatagtatcaaaagcgagacgcacggcagcctcgaggaagctatgctgaccgtcgtgaagtgcactcaaaacctgcatagctattttgcggagagactctactatgccatgaaaggggcgggtacaagagacggaaccctcattcggaacatcgtgtcaaggtctgagatcgacctgaacctcattaaatgtcactttaagaagatgtatgggaaaacattgtcctctatgataatggaagacacgtcaggggattacaagaacgcattactctcccttgttggttccgacccctag

SEQ ID NO: 179173 - DNA, 831 bp, synthetic construct
  misc_feature 1..831: note = Description of Artificial Sequence: Synthetic coding sequence
  source 1..831: mol_type = other DNA
atggcctggtggaagagctggatcgagcaggagggcgtgaccgtgaagagcagctcgcacttcaaccccgaccctgacgccgaaaccctttacaaagctatgaaagggataggagtgggcagtcagttgcttagtcatcaggcagccgcctttgcgttccccagctctgccctgacatccgtatctccatgggggcagcaggggcatctgtgctgtaatcctgccggcactaacgagcaggcaattattgacgttctgactaagcggtctaatacacagagacagcagattgcgaaatctttcaaagcacagtttggaaaggacttgaccgagaccctgaagtccgaactaagcggcaaattcgaaaggctcattgttgcactaatgtaccctccataccgatacgaggcgaaagagctgcatgatgccatgaagggatccagagatgatgtctccagctttgtggaccctggactcgccctccaggacgctcaagatctgtacgccgccggcgaaaaaataagaggcacagacgagatgaaattcatcacaatcctgtgcactaggagtgcaacacacctgctgagagttaagtgcacacagaacctgcattcatatttcgcagagcgactgtactacgccatgaaaggcgcagggactcgagatggtactctgattcggaatatagtgtcccgcagtgagattgacttgaacttaataaagtgccacttcaagaaaatgtacgggaaaactctgtcctccatgattatggaggacacgagtggagactacaagaacgctctcttgagtcttgtgggaagcgacccttag

SEQ ID NO: 179174 - DNA, 798 bp, synthetic construct
  misc_feature 1..798: note = Description of Artificial Sequence: Synthetic coding sequence
  source 1..798: mol_type = other DNA
atggcctggtggaagagctgggacctgaccgagaccctgaagagcgaactttcgggaaaattcgaacggctcattgttgccctgatgtacccgccatatcggtacgaggcaaaggagcttcacgacgctatgaaaggcctggggacaaaagagggggttatcatcgaaatactggcttctcgaaccaagaatcagctgagagaaataatgaaagcctatgaagaggactacggctccagcctggaggaagatattcaagccgacacttccggctacctcgagcgcattctggtgtgtctgcttcaggggagtagggatgacgtgtccagctttgttgatcccggcctcgccttacaggatgcccaggacttgtatgcagctggagaaaaaattcgagggaccgacgaaatgaagtttattactatactctgcacaaggtctgctacgcacctcctgcgggtgttcgaggagtacgagaagattgcgaacaagtccatcgaagattcaatcaaaagcgaaacccacggatctctagaggaagccatgcttactgtagtcaaatgtacgcagaatcttcattcttactttgccgaacggctttattacgccatgaagggggcagggacccgagatggaacccttatacggaacattgtttcccggtccgagattgacttgaacctgattaaatgtcattttaaaaaaatgtacgggaaaactcttagctcaatgattatggaggacacttctggcgactataagaatgctctgctctctctggtgggttctgacccctag

SEQ ID NO: 179175 - DNA, 426 bp, synthetic construct
  misc_feature 1..426: note = Description of Artificial Sequence: Synthetic coding sequence
  source 1..426: mol_type = other DNA
atggcctggtggaagagctggatcgagcaggagggcgtgaccgtgaaaagctcttcccatttcaatcccgatcctgacgcagagaccctgtacaaagcaatgaaaggaattgggaccaacgagcaagcgattattgatgtcctgactaagagatccaacactcaacgacagcaaatcgcaaagtcgtttaaggctcaattcggtaaggacctcacagagactcttaaaagcgagttaagcggaaaatttgaaaggctgatagtggctttgatgtacccaccctataggtatgaggctaaagagctgcacgacgccatgaaaggactcggtacgaaggagggcgtgatcatcgagatactggctagccggacaaagaaccagctgcgagaaatcatgaaggcgtatgaagaaggccagcagggctag

SEQ ID NO: 179176 - DNA, 1038 bp, synthetic construct
  misc_feature 1..1038: note = Description of Artificial Sequence: Synthetic coding sequence
  source 1..1038: mol_type = other DNA
atgagcgtgaccggcggcaagatggcccccagcctgacccaggagatcttaagccacctgggcctagcaagtaagacggcagcctggggcactctgggtacgcttagaacattccttaatttctctgtggacaaagacgcacaacgcttgctgagagcgattaccggacagggcgtcgaccgctcagccatagttgacgtgttaactaacaggtcaagggagcagagacagctgatcagccggaacttccaagagcggacccagcaggatctcatgaaaagcctccaggcagcactctcgggcaaccttgaacgcatagtgatggcactgctgcagccgactgcacagttcgacgcgcaggagttgcgaacagcattgaaagcctccgacagcgccgtggatgtcgcaattgaaatcctggctaccagaacacctccccagttacaggagtgcctcgctgtctataaacataactttcaggtcgaagccgtggatgacattacatctgaaaccagcgggatcttgcaggatctgctgcttgctttggccaaaggaggaagagatagctatagcggcattatcgactacaacctggccgaacaggacgtccaggccctccagagggctgaaggcccttcacgcgaggaaacatgggttccggtcttcacacagcggaacccagagcacctgattcgggttttcgaccagtatcagcgatccacaggacaggaactggaggaagcagtacagaacaggttccacggagatgcccaggtcgcactgctgggactggcttcagtaattaagaatactccactgtacttcgccgacaagttgcaccaggctttgcaggagacagaacctaattatcaagttctgattaggattttaatctctagatgcgagacagaccttctctcaattagggccgaatttcgcaagaaattcggcaaaagtctctactcatctctgcaggatgctgtgaaaggagattgtcagtcagctctgctggcattatgccgtgccgaagacatgtag

SEQ ID NO: 179177 - DNA, 1929 bp, synthetic construct
  misc_feature 1..1929: note = Description of Artificial Sequence: Synthetic coding sequence
  source 1..1929: mol_type = other DNA
atgctgacccggcccagccaggtgctgctgaacagcctgagcgtggaccccgatgctgagtgtaagtatggcctctacttccgtgacggacgacggaaggtggactacatcctcgtgtaccatcacaagaggccttcaggcaatcggacccttgtgcgtcgggttcagcactctgataccccatcaggggcccgtagtgtgaagcaagaccaccccctgcctggaaaaggcgcatcactggacgccggctcgggcgaacctcccatggattaccacgaagacgataagagatttcgcagagaggagtacgaaggcaatctgctggaggcaggtctggagctagaacgagacgaggataccaagatacacggagtcgggtttgttaaaatccatgcaccatggaacgtgctgtgtcgagaagcggaattcctgaaactgaaaatgcccaccaagaaaatgtatcacatcaatgagacccggggccttctgaaaaagatcaactcagtccttcagaagattacggatcccatacagcctaaggtggccgagcacaggccccagacaatgaaacgattgagttatccattttctagggaaaagcaacacctgtttgacttgagcgataaggacagcttcttcgatagcaaaacaagatcaactatcgtgtatgagatcctaaagaggactacttgcacaaaagccaaatatagtatggggattacctctctcctcgctaacggcgtatacgcggccgcttacccactgcacgacggtgactacaacggggaaaatgtggaattcaatgaccgcaaactgctctacgaagaatgggctcgttacggagttttttataagtaccagccgattgatctcgtcagaaagtacttcggcgagaagattggcttatattttgcatggctgggcgtgtatacacagatgctcatccccgccagcatcgtgggtattatcgtgttcctgtatggatgcgctactatggatgaaaacattccatccatggagatgtgtgatcagcgccataatatcactatgtgtcctctgtgcgacaaaacatgcagctattggaaaatgagtagcgcttgtgcgacagccagggcctcgcacctcttcgacaaccctgccacggttttcttctccgtcttcatggccttatgggccgcgacattcatggagcattggaagcgcaaacaaatgcgcctgaattatcgatgggacttgaccgggttcgaggaggaggaggaccaccccagagccgagtacgaggcgagggttcttgagaagagcttgaagaaggagtcaagaaacaaggaaacagataaagtgaaactaacctggcgagatagatttcctgcatacctcacaaatctagtttccattatttttatgattgctgtgactttcgctatcgtgttaggggtgataatctatagaatttctatggcggcggcactggccatgaactcttcgccatcggtgcgaagtaacatccgcgttactgtgactgcaacggctgtcattatcaatctggtagtcattatcctactggacgaagtttatgggtgcattgccagatggctaaccaaaatcgaggttccaaagacagagaaatctttcgaggagagactaatttttaaagctttcctcctaaagttcgtgaacagttacacaccgatattctatgtagccttctttaaaggtcgattcgtgggacgccctggcgattacgtgtacatttttcggagttttaggatggaagaagtcaccgagatcctgtttatcagcggctcccctttctgtttggcgtacgacctctcaacaccctgcacctgggagaagcaactgcagcacatatgctccgctaagagctctcgcttcttgtcttttctgctggaaacgtttctattcccttag

SEQ ID NO: 179178 - DNA, 2961 bp, synthetic construct
  misc_feature 1..2961: note = Description of Artificial Sequence: Synthetic coding sequence
  source 1..2961: mol_type = other DNA
atgcgggtgaacgagaagtacagcaccctgcccgccgaggaccggagtgttcacatcatcaacatctgcgctatagaagacattggctaccttccttccgagggcactctcttgaattcactaagtgtggacccagacgccgaatgcaagtacggattgtatttccgggacggcaggaggaaagtggattatattctcgtctaccatcacaagcgacccagcgggaaccgaaccctggttcgccgtgtgcagcactcggatacaccttctggcgcccgcagcgtgaaacaggatcatcccctgcccggaaagggagcgagtctcgacgcaggtagcggagaaccccccatggactaccacgaagacgacaaaaggttcaggcgcgaggaatacgagggcaacctgctggaggccgggcttgaattggagcgagatgaagacacaaagatccacggagtggggttcgtaaagattcatgccccctggaacgttctgtgtagggaggcagagttcctgaaactgaagatgcctacaaagaagatgtatcatataaacgagactaggggcctgttaaaaaagataaacagtgttctgcaaaagattaccgatcctatccaacctaaagtggctgagcatagaccacagacaatgaagcgtctctcatatcccttttcccgggagaagcaacatctctttgatctctctgacaaggatagcttcttcgattcaaagacacgttccacgatagtgtacgagatacttaagcggacaacttgcactaaagctaaatactctatgggtatcactagtctgttggccaatggagtctatgccgccgcctaccccctgcacgacggagattataatggggagaacgtggagtttaacgataggaagttgctctatgaggagtgggccagatacggcgtattttacaaatatcaaccgatcgacttggtgcgaaagtactttggggagaagatcgggttgtatttcgcatggctgggagtgtacacccaaatgctgatcccagctagcattgtggggatcattgtgttcctctacgggtgtgcaacaatggatgaaaatatcccaagcatggaaatgtgtgaccagaggcataacatcactatgtgtccactgtgtgacaagacatgtagctactggaaaatgtcttcagcgtgtgctaccgcaagagcatcccacctgttcgataatccagccacggtgttctttagcgtgtttatggctctgtgggcagctacattcatggagcattggaagcgaaaacagatgcgcttgaactacagatgggacctgaccggcttcgaagaagaagaggaggctgttaaggaccacccccgggccgaatacgaggcccgagtcctggaaaagagtcttaaaaaggaaagccggaataaagagaagcgacggcacattcctgaggaatctactaacaaatggaagcagcgcgtcaaaacggccatggccggggtgaagctgaccgataaagttaaactgacctggcgggacagattccccgcttatctgactaacttggtgagcattattttcatgattgccgtgaccttcgcaattgtactgggggtgattatctaccgcatctctatggcagctgctctggccatgaattccagtcccagtgtacgtagcaatatcagggttaccgtcacagccaccgcggtgatcattaaccttgtggtgattatattacttgatgaagtgtatggttgcatcgctcgctggctgacaaagattgaagttccgaaaacagagaagtccttcgaggagcgacttatattcaaagcattcctcctgaagttcgtaaactcttatactcccattttttatgtggctttcttcaaaggacgctttgtggggagacctggggattatgtctatatatttcgatcatttcgaatggaggagtgcgcaccagggggttgtctcatggagttatgtatccaactctcaattatcatgttggggaagcagctgatccaaaataatttgtttgagattggcattccaaagatgaagaaattgattcgctaccttaagctgaaacagcagagcccccccgaccacgaggaatgcgtcaaacggaagcagagatacgaggtggattacaatctggagccgtttgctggcctaactccagagtacatggagatgattattcagtttgggttcgtgacgctttttgtggcctccttccctctagcacctctctttgctctgcttaataatatcattgagattaggttggacgctaaaaagttcgtgacagaactgcgccgcccggtcgcagtccgggctaaggacatcggtatttggtataacattttacgggggatcggcaaactcgctgtcattattaacgcattcgtgatttcatttaccagtgatttcattccaagactcgtgtatttgtatatgtatagcaaaaatggaactatgcatggctttgtgaaccacacactgtccagtttcaacgtgtctgatttccagaacggtaccgcacctaacgatcccctggatctggggtatgaagttcaaatctgccgatacaaagattatagagaaccaccttggtccgaaaataaatacgatatcagcaaggatttctgggccgttctcgctgctaggcttgcctttgtaatagttttccaaaatctggtgatgttcatgagtgacttcgttgactgggtgatccccgacataccaaaagacatcagccagcagattcataaagagaaagtgcttatggtggagctgtttatgagggaggagcaggacaagcagcagttgcttgaaacatggatggaaaaggagcgccagaaggatgagccgccctgcaaccaccacaacacgaaggcgtgtcccgactctctggggtcaccagcaccttcccatgcttatcatggaggtgtgctgtag

SEQ ID NO: 179179 - DNA, 2523 bp, synthetic construct
  misc_feature 1..2523: note = Description of Artificial Sequence: Synthetic coding sequence
  source 1..2523: mol_type = other DNA
atggactaccacgaggacgacaagcggttccggcgggaggagtacgaaggcaacctgctcgaagctggcttggaattagaaagagacgaagacacaaagattcatggggtgggttttgtgaagattcatgccccctggaacgttctgtgtcgagaggctgagttcctgaagcttaaaatgccaaccaaaaagatgtatcacatcaacgaaacacgcgggcttcttaagaagatcaattctgtcctccagaagatcaccgaccccatccagcctaaagtcgcggagcaccggccccaaactatgaaacggctgtcctacccctttagccgggagaagcagcatttattcgatctcagtgacaaggactccttcttcgactccaagactcggtctaccattgtgtatgaaatcctcaagcggacaacatgcacgaaagcaaagtactctatgggcatcacaagcctgttggcaaatggagtatacgctgctgcatatcctctccatgacggtgattataacggcgagaacgtagagtttaacgatcgtaagctactgtacgaagagtgggctcgatatggcgtgttctacaagtaccagcctattgacctcgtacggaagtactttggagaaaagattggtctgtatttcgcttggctgggagtgtacacacagatgctaattccggcctcaatcgtgggaatcattgtcttcttgtatggctgcgccactatggacgagaatattccttctatggagatgtgcgaccaaaggcacaacattactatgtgccctctgtgtgacaaaacatgcagctattggaaaatgagttccgcctgtgcaacggccagggccagtcacttgttcgacaatcctgcaaccgtgttcttcagtgtgttcatggctctgtgggctgccacatttatggaacactggaagcgcaagcagatgcgcctcaactaccgatgggacttaaccggtttcgaagaggaggaggatcatccccgtgctgagtacgaagcccgtgtgttggaaaagtcacttaagaaggaaagccgcaataaagaaacagataaagtcaagcttacatggagggataggttcccagcgtacttgacaaatctggtgtccattattttcatgattgcggtcacatttgctatagtgcttggagtgatcatttaccgcattagtatggccgccgctctggctatgaactcttctccaagcgtcaggtccaacattagagttactgtcactgcaacagccgtgataatcaatcttgtggttatcatcctgctcgacgaagtgtatggatgtattgcaaggtggctgaccaagatcgaggtacccaagacagaaaagagcttcgaggaaagactcatttttaaagcgttcctcctgaaatttgtgaacagttatacccccatcttttacgtggcgttcttcaaaggtaggttcgtgggaagaccaggagactatgtgtacatctttaggtcgttccggatggaggagtgcgccccaggggggtgtttgatggagctatgcatccaactctccattatcatgctcgggaaacagctgatccaaaacaatctctttgagatcggaatccctaaaatgaagaagctcatcaggtacctcaaactgaaacagcagtcaccacctgaccatgaggaatgcgtcaagaggaaacagaggtatgaagttgattataacctggagccgtttgccggtctgacgcccgagtatatggaaatgatcatccagttcggattcgtgacgttgttcgtcgcctccttccctctggccccattatttgctcttctaaacaacataatcgagataagactggatgccaagaagtttgtgacagagttgagacgtcccgttgccgtcagggcaaaggatatcggaatttggtataacatccttcggggcattggcaagcttgccgtgatcattaatgccttcgtgatcagcttcacaagcgattttatcccgcggctggtgtatctttatatgtattccaaaaatggcacaatgcacggctttgttaaccatacattgagttcctttaatgtcagcgatttccagaatggcactgctcccaatgatccacttgatctcggctacgaggttcagatctgcagatataaggattacagggaaccaccatggtccgaaaacaaatatgacatctctaaggatttttgggccgtgctcgccgcacgactggcattcgttatcgtcttccagaatctggtgatgttcatgtcagactttgttgactgggtcataccagacatacccaaggacatctcacaacagatccataaggagaaggtactgatggtcgagctgttcatgagagaagaacaagacaaacaacagctgctggagacttggatggagaaagaaagacagaaagatgaaccaccgtgtaatcatcacaacaccaaggcgtgcccagacagcctcgggtcacctgcgccatcgcatgcctatcatggcggcgtgctctag

SEQ ID NO: 179180 - DNA, 2523 bp, synthetic construct
  misc_feature 1..2523: note = Description of Artificial Sequence: Synthetic coding sequence
  source 1..2523: mol_type = other DNA
atggactaccacgaggacgacaagcggttccggcgggaggagtacgaagggaatctcttggaagcaggcctagaactcgaacgcgatgaggatactaaaatacacggggtgggattcgtgaaaatccacgccccctggaatgtcctgtgtcgggaagctgagtttttgaagctgaaaatgcctacgaaaaagatgtatcatattaacgagacacgcggactgctgaaaaagattaatagcgtcctccagaagattactgaccccatccagccgaaggtggccgaacacagaccccaaaccatgaagcggctgagttaccctttcagccgcgaaaagcagcacctgtttgacctgagcgacaaggactctttctttgattccaagacgagatctactatcgtatatgagatcctcaaacgcacaacgtgcaccaaagctaagtacagcatgggcatcacgtctctcttggccaatggggtctacgctgcagcttaccctctgcatgacggcgactataacggcgagaacgtcgaattcaatgatagaaagctcctgtatgaggagtgggctaggtatggagtcttctataagtatcagcctattgacctggtgcgtaagtattttggcgagaaaattggactatactttgcttggctgggcgtatacactcagatgctcatcccagcgtcgatcgttggcataatagtgtttctctatggatgcgcaactatggatgagaacattccttccatggagatgtgcgatcagcggcataatatcacaatgtgtcctctttgcgacaagacctgcagctattggaaaatgagcagcgcctgcgcgacggcccgggcttcccacctcttcgataacccagccaccgtgttcttctccgtatttatggcactctgggcggccaccttcatggaacattggaagcggaaacagatgcgcctcaactataggtgggacctgacaggcttcgaggaagaagaagaccatccccgtgccgaatacgaggcccgcgtcttggaaaagagtctgaaaaaggaatctaggaataaggagaccgacaaagtgaagctaacttggagagaccggtttccagcatacctaacgaatctagtgtccattattttcatgattgcagtgacatttgccatcgttctcggggtcatcatctacaggatttccatggctgcggctctggctatgaactcgtcaccgtcagttcgctccaacatcagggtcactgtcaccgctacagccgtgatcataaacctggtggtcatcatcctgctggatgaggtttacggttgcattgcccggtggctaacgaaaatcgaggtgcctaagaccgaaaagagcttcgaggaaagattgattttcaaggccttcctgctgaaatttgttaatagctataccccaatcttttatgtggccttttttaagggccgatttgtgggccgacctggagattatgtttatatcttcaggtccttccgtatggaagaatgcgcgccgggaggctgtttgatggaactttgtatccagttgtcaattattatgttaggaaaacagctgattcagaacaatctgttcgagataggcattcctaagatgaagaagctgataaggtatctcaaactaaaacagcaatctccacctgaccacgaggaatgtgtcaagcgaaagcagcgctacgaggtggattataaccttgaacctttcgccgggttaacccctgagtatatggagatgattatccagttcggtttcgtaaccctcttcgtcgcgtcttttcctttggcacctttgtttgcactgctgaataacataatagagattagacttgacgcaaagaaattcgtgacagaacttcggaggccggtcgctgtccgagcgaaggacatcgggatatggtacaatatcctccgaggcattggaaaactagctgtcataattaatgcctttgtgatctcctttacatctgatttcatacccagactagtatacttgtacatgtattccaagaacggaactatgcatgggtttgtgaaccataccctgagttctttcaacgtgagtgatttccagaacggaactgcccccaacgaccccctggacctcggatacgaagttcagatctgccggtacaaagactatagggagccaccctggagcgaaaataagtatgatattagtaaggatttttgggccgtgctggccgctcgcctggcattcgtcatcgtctttcagaacctcgtgatgttcatgagcgacttcgtggattgggtaatccccgacataccaaaagacatctcacaacaaattcacaaggagaaagttctgatggtcgaattgtttatgcgggaagagcaagacaagcaacaactgttggagacctggatggaaaaggagagacagaaggacgagccaccttgcaaccaccataacacaaaggcctgccctgattcattaggaagccctgccccatcccacgcataccacggaggcgtgctgtag

SEQ ID NO: 179181 - DNA, 2961 bp, synthetic construct
  misc_feature 1..2961: note = Description of Artificial Sequence: Synthetic coding sequence
  source 1..2961: mol_type = other DNA
atgcgggtgaacgagaagtacagcaccctgcccgccgaggaccggtccgtgcacattatcaatatctgcgccattgaggatatcgggtaccttccctcagaggggacactcctgaactctctgtcagtggatcctgacgccgagtgtaagtacggtttgtactttcgggacggcagacggaaggtggactacatacttgtataccatcacaagagacccagcggcaacagaactcttgtgagaagggtgcagcattccgacactcccagcggagctcgttccgttaagcaggaccaccccttgccaggcaaaggggccagcttggatgcgggaagcggcgaacccccgatggactatcacgaggatgacaaacggttcaggagagaagaatatgaggggaatctgctcgaagctggattggaactggagcgcgacgaggacaccaagattcatggggttggctttgtcaaaatccacgccccgtggaatgtgttgtgcagagaggccgagttcctcaagctcaagatgcccaccaaaaagatgtatcacataaatgaaaccagaggcctactaaagaagattaattccgtattacagaaaatcaccgacccaatccagcccaaagtagctgagcaccggcctcagactatgaagcggctgtcttatccatttagcagagaaaagcagcaccttttcgaccttagcgacaaagattcttttttcgactccaagacgcgaagtactattgtatacgaaattctgaagcgaaccacttgcactaaagctaagtacagcatgggcatcacttcactgctggccaacggagtctatgcagccgcttatcctcttcacgacggggactacaatggggagaatgtcgaattcaatgaccggaaactcctatacgaggagtgggcccgatacggggtcttttacaagtaccagcctatcgacctggtcaggaagtatttcggagaaaagattggtctatactttgcttggctcggcgtgtacacccaaatgcttattccagcttctatcgtgggcatcattgtgtttctgtatggttgcgccaccatggacgaaaatattcctagtatggaaatgtgcgatcaacgacacaacattacgatgtgcccattatgtgataagacctgttcctactggaagatgagttcagcctgtgccacagctcgcgcgtcccatctttttgacaaccctgccacagtgttttttagcgtgttcatggcattatgggccgcgacattcatggaacattggaagagaaagcaaatgcgactgaattataggtgggatctgacaggatttgaggaagaagaaaaagcccttcttgatcacccaagagcagaatacgaggctcgggttctcgagaagtcacttaaaaaagagagcaggaataaggagaagagaaggcatatccctgaggagagtactaataagtggaaacaaagagttaagaccgcaatggcaggagtgaaactcacggacaaagtgaaattgacgtggcgagatagattcccagcttacctgacaaatctggtatccataatcttcatgatcgcagtgacgttcgctatcgtcctgggcgtaatcatttaccgcatctcaatggcagctgcactggctatgaacagtagccctagtgtgaggagcaacattcgtgtgacagtgactgctaccgccgttatcatcaacttagttgttataatattactggacgaagtgtacgggtgtatagcacggtggctgaccaagatcgaagtacccaagacagagaagagttttgaagagcggcttatatttaaggcatttctgctaaagtttgttaattcctatacacctatcttctacgtggccttttttaaaggtaggttcgtgggtcggccaggcgactatgtttacatattccggagctttcggatggaggagtgcgctcctggcgggtgtctgatggaactctgcatccaattatctatcattatgttagggaaacagcttattcagaacaatttatttgagattggcataccaaagatgaagaagctcatccgatacctcaagttgaagcaacagtctccacccgaccacgaggagtgcgtgaaacgaaagcagcgctatgaggtggactataacctggagcccttcgccggacttacaccggaatacatggaaatgatcatccagttcggctttgtaactttgttcgttgcaagcttcccattggctcctctgttcgccttactcaacaatatcatagaaatacgcctcgatgctaaaaagttcgtgacagaactaaggcgccccgtggctgttagagcaaaggacattggcatctggtacaacattctgagagggattggcaaactcgctgtaatcattaatgcttttgtcatttccttcacatccgattttattccaagattggtgtacctctacatgtatagcaagaacggaaccatgcatggatttgtgaatcatacccttagcagcttcaatgtgtccgactttcagaacgggaccgcccctaatgatcccctggacctgggctacgaggtgcaaatttgtaggtacaaggactaccgtgagcctccttggtccgagaacaagtatgacataagcaaggatttctgggcggtcctcgccgcaaggttggcctttgttatcgtcttccagaacttagttatgtttatgtcagactttgtggattgggtgattccagatattcctaaagacatatctcaacagatccacaaggaaaaggtcctgatggtcgagctttttatgcgggaagaacaggacaaacagcagctgctggagacctggatggagaaggagcgccagaaagatgagccaccgtgcaaccaccataacacgaaggcttgtcccgactccttaggcagtcctgcccccagccacgcttatcatgggggtgtcctttag

SEQ ID NO: 179182 - DNA, 942 bp, synthetic construct
  misc_feature 1..942: note = Description of Artificial Sequence: Synthetic coding sequence
  source 1..942: mol_type = other DNA
atgctggacgccgccagcaaggcccgggaggcccccgaggccgccccaggttgggacgaccctcaaggggaggggcgacgggggagaggagaaggtctcagttgggcagtgggaccccaccccgatccaggcgttcttatgcagggcgaagtctggagtggcagattctcacatgccgttatccagttcgggttcgtaacattgtttgttgcgagttttcccctcgctccccttttcgccttactcaataacatcattgagatccgactggacgctaagaaatttgtgacagagctcagacgcccagtagccgtccgtgctaaagacattgggatctggtacaacatcctgcggggcatcggcaagctcgcagttattattaatgcgtttgtgatcagcttcacatctgacttcattccacgcttagtgtacctgtatatgtacagcaagaacggcactatgcatggctttgttaaccatactctttcctctttcaatgtgagtgacttccaaaatggcaccgctccaaacgatcccctggacttgggatacgaagtccagatatgtagatataaagactacagggagcccccttggagcgagaacaaatacgacatttccaaagacttctgggctgtcctggcagcaaggctggcctttgtgattgtgtttcagaacctggtgatgttcatgagtgatttcgtagattgggtgataccagatattccaaaggatattagtcagcagattcataaggaaaaggtactgatggtcgaactgttcatgagggaggaacaagataagcaacagttgctggaaacttggatggagaaagagagacagaaagacgagcccccctgtaatcaccacaacaccaaggcatgtcccgattccctgggctcgcctgccccatcccacgcctatcatgggggcgtgctgtag

SEQ ID NO: 179183 - DNA, 2235 bp, synthetic construct
  misc_feature 1..2235: note = Description of Artificial Sequence: Synthetic coding sequence
  source 1..2235: mol_type = other DNA
atgaagcggctgagctaccccttcagccgggagaagcagcacctgtttgatctgtccgacaaagattcttttttcgattccaagacacgctctaccattgtgtatgagatcctgaagcgtactacctgcactaaggctaaatatagcatgggtatcacctctctgctcgccaacggcgtgtatgccgctgcctaccccctgcacgatggtgattataacggtgagaacgtggaattcaatgatagaaagttgctgtacgaagagtgggccagatatggcgtgttttataagtaccagcccatcgatctcgtgcggaaatacttcggcgaaaaaatagggctgtattttgcttggttgggcgtatatacccagatgctcatccccgcatccatcgtcggcataatcgtatttttgtacggctgcgccacaatggatgaaaatatccctagtatggaaatgtgcgaccagcgtcataatatcactatgtgccctctgtgcgacaagacatgctcgtactggaagatgtcaagtgcttgcgctaccgctagagctagtcacttattcgacaaccccgccaccgtctttttcagtgtgtttatggccctgtgggctgccacctttatggagcactggaagcgaaaacaaatgcgtctgaactacaggtgggatttgacgggtttcgaagaggaagaaaaggccctgttagatcatccccgtgcagagtatgaagcccgcgtactggagaagagtcttaagaaagagagccgcaacaaagagacagacaaggtgaagctgacctggagggataggttccccgcttatctaactaacctggtcagcatcattttcatgattgcagttacctttgctatcgttctgggagttattatctacagaatctcgatggcagctgctctggctatgaatagcagcccaagcgtgcgttccaatattagagtcacggttactgcgacagcagtgatcatcaatcttgtggttatcatccttctagatgaagtatacggctgtatcgcccgctggctaaccaagattgaagtgcccaagaccgagaagtcattcgaggagcgcctgatattcaaggctttcctactgaaattcgtcaactcatacactcctatcttttacgtggcattctttaaaggcaggttcgtgggacgcccgggcgactatgtctatatcttcaggagctttaggatggaggagtgtgcaccaggcgggtgcctgatggagctctgcatccagctttccattattatgttaggcaagcagttgattcagaataacctgtttgaaattggaatccccaagatgaagaagcttattagatatctgaaattgaaacagcaatctccccccgatcacgaagagtgtgttaagcgaaaacagcggtacgaggttgactacaatctagaaccattcgcgggcctgacacctgagtacatggaaatgatcatccaatttggtttcgtgactctgttcgttgcgagctttcccctggccccccttttcgctctgctgaataatatcatagaaatacgactcgacgctaaaaaatttgtgactgaactcaggagaccggtggcagtgcgggcaaaagacattgggatttggtataatattctgcggggcattgggaagctggccgttatcatcaacgccttcgtaataagtttcacatccgatttcatcccccggctggtttatctctacatgtactcaaaaaatggaaccatgcacggtttcgtgaaccacacgctctcctcatttaacgtatcagacttccagaatggtaccgctcccaatgaccccctagacttgggatacgaagtgcaaatttgtagatacaaggattaccgggagccaccctggtcggagaacaagtacgatatctcgaaggatttttgggccgttctcgcggctcgtttggcttttgtgatagttttccagaacctggtgatgttcatgtccgacttcgttgattgggtgattcctgacatcccaaaggatatctcgcagcagatccataaagaaaaggtgctgatggtggaactatttatgcgtgaagagcaagataaacagcaactcctggagacttggatggagaaggaacgccagaaggatgaacctccctgtaatcatcacaataccaaggcgtgccctgatagcttggggagtcctgccccttcccatgcctatcacggaggcgtgctgtag

SEQ ID NO: 179184 - DNA, 1983 bp, synthetic construct
  misc_feature 1..1983: note = Description of Artificial Sequence: Synthetic coding sequence
  source 1..1983: mol_type = other DNA
atgaaggtgaccctgagcgccctggacaccagcgagagcagcttcacacctctcgtggtcatcgagctggcccaggatgtgaaagaagagaccaaagagtggttgaagaatcgtatcatcgccaaaaagaaggatgggggggctcaactgctttttaggcccctgcttaataaatacgagcaggagacccttgaaaaccagaacctttaccttgttggcgcctctaagattcgaatgcttctgggggctgaagccgtaggcctggttaaagagtgcaacgacaataccatgcgggccttcacctacagaacgcggcaaaattttaagggattcgatgacaataacgatgatttcctcacgatggctgaatgtcaatttatcattaaacacgaacttgaaaacctgagagcaaaggatgaaaaaatgatccctggctatccgcaggcaaaactttacccaggtaaatcccttctccggcgattgctgacaagcggaatcgttatacaagttttccccttgcacgacagcgaagcactcaagaaattagaggatacctggtacaccaggttcgccttgaagtatcaacccatcgattcgatccggggatactttggcgagacgattgcactgtattttggatttctggaatatttcacctttgcgttgatccccatggctgttattgggctgccctactatctcttcgtttgggaagactacgataagtacgtgatcttcgcgtcttttaacctgatttggtctaccgtgatactggagctctggaagaggggctgtgccaatatgacgtacagatggggaactttactgatgaaaagaaaattcgaggagcctaggccagggttccacggtgtgctgggtattaacagcatcacagggaaagaggaacccctctacccttcgtacaagagacaacttcggatttacttagtgtctctgcctttcgtgtgcctttgcctgtattttagcctttacgtcatgatgatctattttgacatggaggtgtgggcgctgggactgcacgaaaattctggaagcgagtggacgtcagtgctcttgtatgtgccttcgattatttatgccattgttatcgagataatgaacaggctgtatagatatgcagctgaatttctgacgagttgggagaatcacagattagagtctgcatatcagaatcacctgatcctgaaagttctggtgttcaatttcctgaattgcttcgcatccctcttttatattgcctttgtcttgaaagatatgaaacttctgagacaaagccttgctacacttctgattacatcacagatactcaatcaaataatggaatcctttctgccctactggctgcagagaaagcacggagtgagagtcaagaggaaagttcaggccctgaaagccgacattgatgccactttatatgagcaggtgatcctggaaaaggagatggggacgtacctgggcacctttgacgactacttggagctgtttctgcagttcgggtatgtcagcctgttctcctgcgtgtaccctctcgccgcagcgtttgccgttctcaacaacttcaccgaagttaatagcgatgctttgaagatgtgcagagtcttcaagagaccattttccgagccctctgcaaacattggcgtgtggcaactggcattcgaaaccatgtcagtcatctctgtggttaccaattgcgccctgatcggtatgagcccgcaggttaatgcagtgttcccagagtctaaggccgatcttattttaattgtggttgcggtagagcacgccttgctggctctgaagttcatattggctttcgccattcctgataagccaagacatatccagatgaaactggcgaggctagagttcgaatccctggaagccctgaagcagcagcagatgaagttagtgaccgagaacctgaaggaggagccaatggagtcaggcaaagagaaggcgacatag

SEQ ID NO: 179185 - DNA, 1413 bp, synthetic construct
  misc_feature 1..1413: note = Description of Artificial Sequence: Synthetic coding sequence
  source 1..1413: mol_type = other DNA
atgaaggtgaccctgagcgccctggacaccagcgagagcagcttcacccctctggttgtgattgaacttgcccaggacgtgaaagaagagactaaagaatggcttaagaaccgcataatagccaaaaagaaagacgggggcgcccagctgctattccgtcccctcctcaacaagtacgagcaagagaccctggagaatcagaacctgtacctggttggcgcttcaaaaatcaggatgttactgggcgccgaagctgttggcctggttaaggagtgcaacgacaatacaatgcgggccttcacctataggacccgtcagaacttcaagggctttgacgacaataatgatgattttctgaccatggccgaatgccagttcattattaaacatgagttagagaatttgagggccaaggatgagaagatgatccctggataccctcaggcaaagttgtaccccggaaagtcattgcttagaaggctcttaaccagtggcattgtgattcaggtctttccactgcacgactctgaggccctgaagaagctggaagatacatggtatacacgttttgcacttaaatatcagccaatcgaaaatcaccggcttgaaagcgcctatcagaaccatctgatcttaaaggtattagttttcaacttcttgaactgtttcgcctctctgttctacattgccttcgtcctgaaagacatgaagctgttgcgccagtccctcgcaacacttctaataacatctcaaattctcaatcagattatggaatctttcttgccgtattggcttcagcgcaaacatggtgtgagagtgaagaggaaagtgcaggctctgaaggctgacatagatgctaccctgtacgaacaggtaatcttggaaaaggagatgggcacctacctgggaaccttcgacgattacctcgagttattcttgcagttcggatacgtgtccttgttcagttgtgtgtaccctctcgcagcagcctttgccgtactcaataactttacagaggtaaactcggacgccctcaagatgtgtcgtgtgttcaaacgaccgttttcagaaccaagcgcgaatattggggtgtggcagctggcctttgagacaatgagtgtgatctctgtcgtcaccaattgcgccctgattgggatgtcaccgcaggtgaacgccgtcttcccggaatctaaagccgatttaatcctgatagtagtagctgtagagcatgcattgctggctctgaagttcatccttgctttcgccatacccgataagccaagacatatccagatgaagctggctcgactggagtttgagtcattagaagctctaaaacagcagcagatgaaactggtcacagaaaatctaaaagaggagccaatggaatctggaaaagagaaggccacttag

SEQ ID NO: 179186 - DNA, 423 bp, synthetic construct
  misc_feature 1..423: note = Description of Artificial Sequence: Synthetic coding sequence
  source 1..423: mol_type = other DNA
atgaaggtgaccctgagcgccctggacaccagcgagagcagcttcacaccactagtagtcattgagctcgcgcaggacgtgaaggaagaaactaaagaatggctgaaaaatcgtatcatcgccaagaagaaagatgggggcgcccagctgctgttccgacccctactaaataaatatgagcaagaaaccctggaaaatcagaatttgtacctggtcggggcctcaaagatcagaatgctactcggcgccgaggctgtaggcctcgtgaaagaatgcaacgataacaccatgcgcgcttttacctacagaactagacagaattttaagggtttcgatgacaataacgatgacttcctgaccatggccgagtgccagtttatcataaaacatgagctggaaaacttgcgggcaaaagatgaatag

SEQ ID NO: 179187 - DNA, 339 bp, synthetic construct
  misc_feature 1..339: note = Description of Artificial Sequence: Synthetic coding sequence
  source 1..339: mol_type = other DNA
atgaaggtgaccctgagcgccctggacaccagcgagagcagcttcacccccctggtggtgatcgaactggctcaggatgtgaaagaggaaaccaaagagtggctgaaaaaccgcatcattgctaaaaagaaggatggtggtgcccaacttctgttccggcctctgctgaataagtacgaacaggagacactggaaaatcagaatttatacttggttggtgcttctaagattaggatgttacttggcgctgaggcagtgggccttgtcaaagagtgcaacgataataccatgcgagcatttacgtaccggacccggcaaaacttcaaggggtttgactag

SEQ ID NO: 179188 - DNA, 117 bp, synthetic construct
  misc_feature 1..117: note = Description of Artificial Sequence: Synthetic coding sequence
  source 1..117: mol_type = other DNA
atgaaggtgaccctgagcgccctggacaccagcgagagcagcttcacgcccttagttgtcatcgaattggcccaggacgtgaaggaggagacaaaagagtggctgaagaacagatag

SEQ ID NO: 179189 - DNA, 405 bp, synthetic construct
  misc_feature 1..405: note = Description of Artificial Sequence: Synthetic coding sequence
  source 1..405: mol_type = other DNA
atgaaggtgaccctgagcgccctggacaccagcgagagcagcttcactcccctcgtggtgattgaactggcccaagatgtgaaagaagagacaaaggaatggcttaagaaccgcataatcgccaaaaagaaggatggaggggctcaactactgtttaggcccctgttaaataagtatgagcaagaaactctggagaatcaaaatctctacctggtaggtgcttccaagatacggatgctgctgggagctgaggccgttgggctggtgaaggaatgtaatgacaatactatgagagcctttacgtacaggacaaggcagaattttaagggcttcgacgataacaatgatgacttcctgacgatggcagagtgtcaatttatcatcaaacacgaactggaaaattag

SEQ ID NO: 179190 - DNA, 441 bp, synthetic construct
  misc_feature 1..441: note = Description of Artificial Sequence: Synthetic coding sequence
  source 1..441: mol_type = other DNA
atgaaggtgaccctgagcgccctggacaccagcgagagcagcttcacgcccctcgtcgtgattgaactcgcacaagacgttaaggaggaaaccaaggaatggctcaagaacaggataatcgcaaagaagaaggatggtggagcacagttgctcttcagaccactgctgaataagtatgaacaggaaaccctggagaatcaaaacctgtacttggtcggcgcctccaagattagaatgctgttgggcgcggaggccgttgggttggtcaaggaatgtaatgacaacactatgagagcattcacatacagaacacgccagaattttaagggctttgatgataacaacgatgattttcttacaatggccgaatgtcagtttattatcaagcacgaactggagaacctaagagcaaaggacgagaagatgatccccggctattag

SEQ ID NO: 179191 - DNA, 426 bp, synthetic construct
  misc_feature 1..426: note = Description of Artificial Sequence: Synthetic coding sequence
  source 1..426: mol_type = other DNA
atgaaggtgaccctgagcgccctggacaccagcgagagcagcttcactccactggtggtgatcgagctggcccaagacgttaaagaggaaacaaaagagtggttgaaaaatcgcatcatcgccaagaaaaaggacgggggcgcgcagttgctgttccgtcctctgctgaataagtacgagcaggagaccctggaaaaccaaaacttatacctggttggtgcatcaaagataagaatgctgctgggggcggaggctgtgggtctggtaaaagagtgtaacgacaacaccatgcgggcgtttacgtaccggacacggcagaacttcaaaggctttgatgacaacaacgacgacttcttgaccatggccgagtgccagttcataattaaacatgaactagagaaccttcgcgctaaggacgaaaaatag

SEQ ID NO: 179192 - DNA, 1785 bp, synthetic construct
  misc_feature 1..1785: note = Description of Artificial Sequence: Synthetic coding sequence
  source 1..1785: mol_type = other DNA
atgaaggtgaccctgagcgccctggacaccagcgagagcagcttcacccccctggttgtcatcgaactggctcaagatgtgaaggaagaaaccaaggagtggctcaaaaaccgcatcatcgccaagaagaaagatggggacaataatgacgatttcctaaccatggccgagtgtcagttcatcattaaacatgaattggaaaatctgagggcgaaagacgaaaagatgattccaggctacccccaggccaaactctatcctggaaaaagcctcctgaggcggctgctgacatccgggattgtcatacaggttttccctctgcatgattcagaagctctgaaaaaactcgaagacacttggtacaccagatttgctctgaaatatcagcccatagattccatcaggggctactttggggaaactatagctctttacttcggctttctggaatatttcacatttgccctgatcccaatggctgtaatcggcttgccttactacttgttcgtgtgggaagactatgataagtacgtgatttttgcttcctttaacctcatatggagtacagtgattcttgagctgtggaaacgtggttgcgccaacatgacataccgctggggcaccctgctgatgaagagaaagtttgaggaaccccgccctggcttccacggtgtgttgggcatcaattctattacggggaaagaggagcctctatacccatcctataagcgacagctgcggatatatcttgtgagcctgcctttcgtctgcctgtgcctatacttcagcttatacgtgatgatgatctacttcgatatggaagtgtgggctctgggcctccacgagaattccggctccgagtggacttccgtgctactctatgtcccttccatcatctacgcaattgtgattgaaattatgaacagactgtaccggtacgctgctgaattcctcactagctgggagaatcaccggctcgaatctgcataccaaaatcatttgatcctgaaagtgctggttttcaacttcctgaactgtttcgcttcattattttatatcgcattcgtcttgaaggatatgaagcttctgcgtcagtcgcttgctaccctactgatcacatctcagatcctgaaccaaattatggaatcttttctgccttactggttgcagagaaagcatggagtgcgggtgaagaggaaggtccaagctctcaaggcagacatcgacgctacgctctatgagcaggttatcctggagaaggagatgggcacctacctgggtacatttgatgattacctggagttattcctgcaatttggctacgtcagcctctttagttgtgtttacccattagcagctgcattcgctgttttgaataatttcaccgaagtgaactcagacgccctgaagatgtgtcgagtgtttaagcggccattcagtgagccaagtgccaacattggagtctggcagctggcatttgaaacaatgtcagttatcagcgtggtaactaattgtgccctgattggtatgagtccacaggtgaatgcagtttttccagagagcaaagccgatctgattcttatcgtggtcgccgtcgaacacgctttgctcgccctgaagttcatccttgcctttgctatcccagacaaacctagacacatccagatgaagctagctaggctggaattcgaatcactagaggctctcaaacaacaacagatgaaactcgtcacagagaacctaaaagaagagccgatggagtcaggtaaagaaaaggcaacctag

SEQ ID NO: 179193 - DNA, 1884 bp, synthetic construct
  misc_feature 1..1884: note = Description of Artificial Sequence: Synthetic coding sequence
  source 1..1884: mol_type = other DNA
atgaaggtgaccctgagcgccctggacaccagcgagagcagcttcacccccctggtggtgatcgagctggctcaggatgtcaaggaagagaccaaggagtggctcaagaaccgtatcatagcgaaaaagaaggatggtggagcacagctccttttccggccactcttaaataagtatgaacaagaaactctggagaatcaaaatctatatttggtgggtgcatctaaaatccgtatgctcctgggggctgaggcagttggcctggtgaaggagtgtaacgacaacaccatgcgcgcgtttacctatcgaacacgccaaaacttcaagggctttgatgataacaatgacgactttctgacaatggcagaatgtcagttcatcatcaagcacgaactggaaaatctgcgggccaaggatgagaagatgatcccaggataccctcaggccaaactttatcctgggaagagtcttctcaggcgactgctgacttccggcatcgtgattcaagttttcccgctccacgattccgaggccctgaaaaagctcgaggacacatggtatacgcgattcgccctgaaatatcagcctattgacagtatccgtgggtacttcggagagactattgctttgtacttcggctttttggaatatttcacattcgctcttatccctatggccgtgattggtctgccgtactatcttttcgtgtgggaggattacgacaagtacgttatctttgcttccttcaaccttatctggagcacagtgattctcgaattgtggaaacgagggtgcgccaacatgacttaccgctgggggactctgctgatgaagcgcaaatttgaggaaccacggcccggattccacggcgtgctcggaattaattccatcacaggtaaggaagagccgttatacccctcatacaaaaggcaactccggatctacctcgtgagtctcccctttgtgtgtctctgtctctacttttccctctacgtgatgatgatctacttcgacatggaggtttgggccctgggcctgcacgaaaactcaggttccgagtggacatcggtgctcctttatgtaccaagcattatttatgccattgtaattgaaataatgaatcggctttacaggtacgctgcggagttcctgacctcttgggagaaccatcgcctggagtcagcctatcagaaccacctgattctaaaggtgctagtgtttaattttctgaattgttttgctagcttattctacattgcttttgttctaaaagatatgaagcttttgaggcagtctttagctacactcctgattaccagtcagatcttaaaccaaatcatggaatcctttctaccgtactggctgcaaaggaaacacggggtgagggtgaagagaaaggtacaggctttgaaagccgacatcgacgccacactgtacgagcaggtgattctggaaaaagagatgggcacatacctaggtacctttgacgattatctcgaactatttctgcaatttggatatgtctctctcttctcctgcgtgtatccattagctgccgccttcgcagtgctgaacaactttacagaggtcaattcagatgcgctcaaaatgtgccgagtgtttaaacgtccttttagcgagccatcggcgaacattggagtgtggcagctggcttttgagactatgagtgtcatcagtgtagttacaaactgcgcactcattggcatgtcgccacaggtcaacgccgtcttccccgaaagtaaggctgacctgatactcatcgtcgtcgccgtggaggctgcctcgtgcaaactggtctcactgcctcgttatagctggagtaccaattcagtgcctggcactgttatcgggccaggtgtttag

SEQ ID NO: 179194 - DNA, 1650 bp, synthetic construct
  misc_feature 1..1650: note = Description of Artificial Sequence: Synthetic coding sequence
  source 1..1650: mol_type = other DNA
atgaaggtgaccctgagcgccctggacaccagcgagagcagcttcactcccctagttgtcatagaattagcccaggacgtaaaggaggaaaccaaagagtggctgaagaacagaatcatagctaaaaaaaaggacggggtccggagactgttaacttccggaatagtgatacaagtcttcccactgcatgattctgaagccctgaagaaactcgaggacacgtggtacacccgctttgccctgaaatatcagcctatcgactctatcagaggctacttcggagaaacgatagcgctgtactttggatttttggaatacttcactttcgctttaattcccatggctgtgattggcttgccctattaccttttcgtgtgggaggactacgataaatacgtgattttcgccagcttcaatcttatttggtccactgtgatattggaattgtggaaacgtggatgtgccaatatgacctatcggtgggggaccttgcttatgaagcggaagttcgaagaaccacggcccggttttcacggtgtgcttggcataaattctattaccgggaaagaggaacctctttacccaagttacaagcgtcaattaaggatctacctggtgtctctcccgttcgtctgtctatgtttgtactttagcctgtatgttatgatgatttacttcgatatggaagtgtgggctctgggcctgcacgagaattccggcagtgagtggacttctgtgttgctgtacgtgccatcgattatctacgctatcgtgattgagatcatgaatcggctgtaccgatacgccgccgaatttttgacatcttgggagaaccaccgcttggaaagtgcctaccaaaatcacctgattttgaaggtcctcgtgtttaacttcctgaactgtttcgcctctctattctatattgcattcgtgttgaaagacatgaaattactaagacagtcgctggcaactctgcttataaccagtcagattctcaatcagattatggagtctttcttgccttattggctgcaacggaagcatggcgtgagagtaaagcggaaagtgcaggccctcaaggccgacatagacgctaccttgtatgagcaggtgatccttgagaaggagatgggcacttacctggggacattcgacgactaccttgagctgtttttgcagtttggatatgtcagccttttctcctgtgtctatcccttggccgccgcttttgctgtcctgaataactttacagaagtcaatagcgatgcactcaagatgtgccgtgtgtttaagcggcctttttctgagccttcagctaatattggtgtgtggcagctggcgtttgagaccatgtctgtaatcagtgtggtgacgaattgcgcactaatcgggatgtcacctcaagtcaacgccgtattcccagaatcgaaggcagacttgattctgatcgttgtggctgttgagcatgctctgttggcactgaagttcatcctggccttcgcaattcctgacaaacccagacatatacagatgaagctggctcggttggagttcgaatctctggaagctttaaaacagcagcagatgaagcttgtgactgaaaatctcaaggaagagccaatggagtcagggaaagaaaaggctacatag

SEQ ID NO: 179195 - DNA, 2997 bp, synthetic construct
  misc_feature 1..2997: note = Description of Artificial Sequence: Synthetic coding sequence
  source 1..2997: mol_type = other DNA
atgcccgaggacatccccctgctgcccggcagcccccggcggctgtccccacaagcaggtagcaggggcgggcagggaccaaaacacggacagcaatgcctaaagatgcctggtcctagagcaccggggctccagggtgggtcaaatcgtgacccagggcagccctgcgggggcgagtccacacgttccagttctgtgatcaataactacctcgatgcgaatgagccagtttccctcgaagcccggctttccagaatgcactttcatgactcacagcggaaagtagactacgtcctcgcttatcactatagaaagaggggggtgcatctggcccaaggattccctggccacagtctcgccattgtgtccaacggtgagacaggcaaagaacctcacgccggaggacctggggacatcgaactcggccccctggacgctctcgaggaagaacggaaggagcaaagggaagagttcgagcacaacctgatggaggctgggctggagctcgagaaggatctagaaaacaagtctcagggctctattttcgttagaattcatgccccatggcaagtcctcgcgagggaagccgagttcctgaagatcaaagtgccaaccaaaaagatgtatgagataaaagcaggcggtagcatagcgaagaagttttccgccgctctccagaaactctcatctcatctccagcccagagttccggagcattctaacaacaagatgaaaaacctcagctaccccttttctagagaaaaaatgtatctctataatatccaagaaaaggataccttttttgacaacgctactcgctccagaattgtgcatgagattttgaagcggacagcatgcagccgggccaataacacgatgggtattaattctctgatcgcgaataacatttatgaggcagcctaccctcttcacgatggcgaatacgactcacccgaagacgacatgaatgaccggaaactgctttaccaggagtgggcaaggtatggggtgttttacaagttccagcctatagatctgattaggaagtactttggcgagaagattggcctttatttcgcttggctcggcctgtacacatccttcctgatcccgagttcggtgatcggtgtaattgtatttctgtatggctgtgctactattgaagaagatatccccagtcgcgaaatgtgcgaccagcagaacgccttcaccatgtgtccgctctgcgataaaagttgtgactattggaatctctctagcgcctgtggtacggctcaagcgtcacacctttttgacaatcccgccacggtctttttcagcatttttatggccttgtgggcaactatgttcttagagaattggaagagactccagatgaggctgggatatttttgggacctgactggaattgaggaggaggaggaaagggcccaggaacactcccgacctgagtacgagaccaaggtacgcgaaaaaatgcttaaagagtctaaccagagtgcagtccagaaattggaaaccaataccaccgagtgcggcgacgaagacgatgaagacaaactgacttggaaggatcgattccccggctacctgatgaatttcgcttccatactgtttatgatcgccctcacctttagcatcgtgtttggagttattgtttaccggatcacaacagccgccgcgctctccctaaataaggcaacaaggagcaacgttcgcgtgacagtaaccgcgaccgccgtgattataaacttggtggtgatactgatactcgacgagatatacggggccgtggccaaatggctgacaaaaattgaggtccctaagaccgagcagacattcgaagagcgacttatcctcaaggccttcctgctgaagtttgttaatgcttattctccaatcttctatgtggcgtttttcaaagggagattcgtgggccggcccggctcttacgtgtatgtcttcgatggctataggatggaagagtgcgccccagggggctgtttgatggaactgtgcattcagctatctattattatgctcggaaagcagctgatccagaataacatctttgaaatcggcgtgccaaagcttaaaaagcttttccgaaagcttaaggacgagaccgaagccggcgagacagactcagcccactccaaacaccctgagcagtgggatctggactattcgttagagccgtacacagggttgactccagagtatatggagatgatcatacagtttggattcgtgacactgttcgtggctagctttcccctcgcaccagtcttcgccctgctaaacaacgttatcgaggtgagactggatgctaagaagttcgttacagagctgcgtaggcctgacgctgtgcggactaaggatatcggcatctggttcgacattctcagcggtatcggaaagtttagcgtgatttcaaatgcctttgtcatagccataacctcagactttataccgcggttggtttatcagtacagctacagccataacggaacgctgcatggctttgtgaatcacactctgtcgttcttcaatgtcagtcagttgaaagaagggacacagcctgagaactcacaatttgaccaggaagtgcagttctgccgctttaaagactaccgtgaaccaccttgggctcccaacccctatgagttttcaaagcagtactggttcattttaagcgcacgacttgcctttgtgatcatattccagaacctggtcatgttcctgtccgtactggtggactggatgatccccgacatccccaccgatatcagtgaccaaattaaaaaagaaaagagtttattagtggatttttttttaaaggaagaacacgaaaaactgaaattgatggacgaacctgccctgcgttcccccggggggggggaccgcagtaggtcacgcgctgcgtcaagtgctccatctggccagagtcaattaggctcaatgatgagctctggtagccagcatactaacgtgtag

SEQ ID NO: 179196 - DNA, 3000 bp, synthetic construct
  misc_feature 1..3000: note = Description of Artificial Sequence: Synthetic coding sequence
  source 1..3000: mol_type = other DNA
atgcccgaggacatccccctgctgcccggcagcccccggcggctgtctccgcaggcagggagcagaggaggtcaaggacctaagcatggtcagcaatgcctgaagatgccaggacccagggcaccaggcctgcagggcggtagcaatagagaccctggtcagccatgcggtggcgagtcaaccaggtccagctcagtgattaataattacctcgatgccaatgagccagtcagcttggaggccaggttgtcaagaatgcactttcacgattctcagcggaaggttgactacgtgctcgcatatcactaccgcaaacgtggagttcatttagcccagggatttcctgggcactctcttgctattgtttccaacggtgagactggcaaggaaccacacgccggtggccccggcgatatagaattaggccccctggatgccctggaagaggagcgtaaggagcaacgggaagaattcgaacataacctaatggaagccgggctggagctagagaaagatctcgaaaataaaagccagggcagcatctttgtcagaatccacgccccatggcaggtactggcgcgagaagcagagttcttgaaaattaaagtcccaacaaaaaaggaaatgtacgagatcaaagcaggcggatcaatcgctaagaagttttcagctgctctgcagaagttgtcaagccatctgcagccacgcgttcccgagcacagcaataacaagatgaagaacctgtcatacccatttagccgagagaaaatgtacttgtacaacatccaggagaaggatacgttctttgacaacgccacgcgatcgcggatcgtgcacgaaattctgaagcgcactgcctgcagcagagctaataacacgatgggtatcaatagcctaatcgcaaataacatatacgaagccgcttatcctctccatgacggggaatacgactcacccgaagatgatatgaacgacagaaagctactgtaccaagagtgggccaggtacggagtgttctacaaattccaacctatagatctcatacggaagtatttcggcgaaaaaatcggtctctactttgcatggctgggcttgtacacatcttttctcatcccctctagcgttatcggagtaatcgtctttttgtatggctgtgctacaatcgaagaagacatccctagcagagagatgtgcgatcagcagaatgcgttcaccatgtgcccactgtgtgataaaagctgtgactattggaacctaagctccgcgtgtggcacggctcaagcgtcacacctctttgataacccagctacagttttcttttctattttcatggcgctttgggctacaatgttcctagaaaactggaagcgcttgcagatgcggcttggctacttctgggatctcactggcatagaggaagaggaagaacgcgcgcaggagcacagcagacccgaatacgaaaccaaggtcagggagaagatgctcaaggagagcaaccaatcagccgtgcagaaactggaaaccaatactacagagtgtggcgatgaggacgacgaagataaactgacttggaaggatcgcttccctggctacttaatgaacttcgcctctatcttattcatgattgcgctgactttttccatagtcttcggcgtgattgtgtatcggattaccaccgctgcggcactgagcctgaacaaagcaacgcgctccaacgtgcgagtcaccgtgactgcaactgctgtcatcataaacctcgttgtgattctcatcttggacgagatctacggggcagtcgctaaatggttgaccaaaatcgaagtcccgaagaccgagcagactttcgaggagaggctgatcctgaaggcttttctgttaaagttcgtgaacgcttatagcccaatcttctatgtggctttcttcaagggccggttcgtcggccggccaggtagctacgtttatgtgttcgatggctatagaatggaagaatgcgcccctggtggctgcctcatggagttatgcatccagctttccataataatgctgggaaagcagctcatccagaacaacatctttgagatcggggttcccaaacttaaaaagctctttagaaaactgaaggatgaaaccgaggccggggagaccgatagcgcccactcaaagcatccagaacaatgggacctcgactattccttggagccctacacaggtctgacaccggagtacatggaaatgatcatacagtttggcttcgtgactctgtttgttgcatccttccccctggccccagtattcgctctcttaaacaacgtcatcgaggtgcgcctggacgccaagaaatttgtgaccgagctgcgccgtccagacgccgtgcgcactaaggatatagggatatggttcgatatcttgagtggcataggcaagttctctgtcatttctaacgcgtttgtaattgccatcacatccgactttataccaaggctggtctaccagtattcctactcccacaatgggacactgcatggttttgtaaaccacaccctgagcttttttaacgtctcacaacttaaagaggggacacagcctgagaatagtcagtttgaccaggaggttcagttctgccgctttaaggattacagggagcctccatgggctcccaatccctatgaattttcaaaacagtattggtttattctgagcgccaggctcgccttcgttattatctttcagaatttggtaatgtttttgagcgttctagtagattggatgattcctgacatacccactgatatcagtgatcagatcaagaaggaaaagagcttgctggtcgacttttttctgaaagaggagcacgaaaaacttaagttaatggatgagccagccctgagatcaccggggggcggggatcggtccagaagtagggcagcctcaagtgctccctctggccagagccagttaggctccatgatgtcctctggatcacaacatactaatgtatag

SEQ ID NO: 179197 - DNA, 3012 bp, synthetic construct
  misc_feature 1..3012: note = Description of Artificial Sequence: Synthetic coding sequence
  source 1..3012: mol_type = other DNA
atggccacccccggcccccgggacatccccctgctgcccggcagcccacgcagactgagcccacaggctggctcacgtggtggccagggtccgaaacacggccagcagtgcctcaaaatgcctggaccaagagctccaggcctgcagggtggatccaaccgcgatccagggcagccctgcgggggagaatctacgaggtcctcatcagttattaataattatctcgatgctaacgaacctgtcagtctcgaggctaggttgagcaggatgcactttcacgacagccagagaaaggtagattatgtgttggcgtaccattacagaaaaaggggcgtgcatctggcccagggttttccaggccattctctggccatcgtttcgaacggagagacaggaaaggaaccgcacgccggagggcctggagatattgaactaggaccactggacgccctggaggaagaacgcaaagagcagcgcgaagagtttgagcacaacctgatggaagcaggcttagagttggagaaagatttggagaacaaaagtcagggatccatctttgtaagaattcacgctccctggcaggtgcttgcacgcgaggccgagttcctcaagatcaaggttcccacaaaaaaggagatgtacgaaattaaggcaggaggatctattgcgaagaaattctcagccgcgttgcagaaactgtcctcacacctgcagccaagggtcccggaacattctaacaacaagatgaagaacctaagctacccgttttcccgtgagaaaatgtacctctataacatccaggaaaaagataccttttttgataatgcaactaggagccgaattgtacacgagatactgaagaggactgcatgctccagagcgaacaatacgatgggcataaactctctgattgctaataatatctacgaagccgcttatccactgcacgatggcgagtatgattccccggaagatgacatgaacgacagaaagttgctgtatcaggaatgggcgagatacggcgtgttttataagttccagccaatcgacctcattcggaagtatttcggagaaaaaatcggcctgtatttcgcttggctcggcctgtacacatcctttttaataccaagttcggtgataggcgtgattgttttcctgtatggctgtgccactatcgaggaggatattccgtcccgcgagatgtgcgatcagcagaacgccttcactatgtgccccttatgtgataagagctgtgattactggaacctcagtagtgcctgcgggaccgcccaggcaagtcacttatttgataacccagctacggtctttttctctattttcatggccctctgggctaccatgttcttagagaactggaagcgcttgcaaatgcgcctgggttatttttgggatctgactggtatcgaagaagaggaggaaagagctcaggaacatagccgtccagagtacgaaactaaggtaagagagaagatgctgaaggaatcaaaccagtccgcggtccaaaaattggaaacaaacacaacagaatgtggcgacgaagacgatgaggacaagctgacctggaaggatagattccctggctatctgatgaatttcgcctccatcctcttcatgattgctctcactttctcaatcgtctttggagtgatagtgtacaggatcactacagctgctgctctcagcctcaataaagctacaaggagtaatgtccgcgtgactgttaccgcaaccgccgtcatcatcaacctggtggttatattgatcctcgatgagatttacggggccgtcgccaaatggttgaccaagatcgaagtccccaagactgagcagaccttcgaagagcgcttaattcttaaagccttcctactgaagttcgtgaatgcctacagccctattttttacgttgctttctttaaaggccgtttcgtgggcagacccggcagctatgtgtatgttttcgatggttatcgcatggaagaatgtgcaccaggcggatgtcttatggaactatgtattcagctgtcgataattatgctggggaaacagcttatacagaacaacatcttcgagattggtgtgcccaagctaaagaagctgtttcggaagctgaaggatgagaccgaggcaggtgagactgactcagcccacagtaagcaccccgaacagtgggatcttgactattccctggagccttacactggtctgactcccgaatacatggaaatgattattcagtttggcttcgtcacactgttcgtcgcatcctttccactagcaccggtgttcgccctcctgaacaacgtgatcgaggttagactggacgctaaaaagttcgttactgagttacggcgacctgatgctgtgagaaccaaggacatcggaatctggttcgacattctgtcaggcataggcaaattctccgtgatttctaacgccttcgtgattgccatcacttccgacttcattcctaggctggtctatcagtattcatatagccataatggaaccctgcacgggttcgttaaccacacgctgagcttctttaacgtgagtcaattgaaggagggcactcagccagagaattcccagttcgaccaggaagtgcaattctgtagatttaaagactacagggagcccccttgggcgcctaatccttatgaattttcaaagcagtactggttcattctttccgctagactagcgttcgtcatcatatttcagaatctagttatgtttctgtccgtgctggtggactggatgatacctgacataccgaccgacatttcggaccagatcaagaaagaaaagtcactcctggtggacttctttctgaaagaggagcatgaaaaacttaagctcatggatgaacccgcattgcggtcaccgggcggaggcgaccggagccggtccagggccgctagttctgcccctagcggccagagccaactgggaagcatgatgtccagtggtagtcagcataccaacgtttag

SEQ ID NO: 179198 - DNA, 261 bp, synthetic construct
  misc_feature 1..261: note = Description of Artificial Sequence: Synthetic coding sequence
  source 1..261: mol_type = other DNA
atgttcctgagcgtgctggtggactggatgatccccgacatccccacggacattagtgaccagatcaagaaagagaagtccttgctggtagatttttttcttaaggaagagcacgaaaagttgaaactgatggacgagcctgcgctccgaagccccggggggggggatcgatctcgtagccgagcggcgtccagcgcacccagcggtcaaagccagctgggcagcatgatgtcctctggatcccaacacactaatgtgtag

SEQ ID NO: 179199 - DNA, 3000 bp, synthetic construct
  misc_feature 1..3000: note = Description of Artificial Sequence: Synthetic coding sequence
  source 1..3000: mol_type = other DNA
atgcccgaggacatccccctgctgcccggcagcccccggcggctgtccccacaggcaggaagcagaggcgggcagggacctaaacacggccagcagtgtttgaagatgcccggaccgcgcgcacccgggcttcaagggggcagcaacagggacccgggacagccctgtggcggggaatcaactcgatcatcctccgtaataaataattatctcgatgctaacgaacccgttagccttgaggctcgcctgagccgtatgcattttcacgattcccagagaaaggttgactatgttctcgcttatcattatcgaaaacgcggcgtccacctcgcccagggtttcccaggccatagcctcgctattgtgtcaaacggcgaaactgggaaggagccacacgctggcggcccaggcgacatagagctggggcccttagacgcgctggaagaggagcggaaggaacagagagaggagtttgagcacaatctgatggaggcaggacttgagttggaaaaggatcttgaaaacaaatcccaggggagcatattcgttagaatccatgccccatggcaggtgctagctagagaagcagaatttctcaagattaaagttcccacgaagaaagagatgtatgaaataaaagccgggggatcaatcgctaagaagtttagcgccgcactccagaagctctcctcgcacctccagccccgagtgcctgagcactccaacaataagatgaagaatctgtcttacccattttcgagggaaaagatgtacctttataacattcaagagaaagatacttttttcgacaacgctacccggagtagaatcgtgcatgaaatcctgaagagaaccgcctgctcaagggccaataacacaatgggtataaattccctaatcgccaataatatttacgaggcagcatatccactgcacgacggagaatatgatagtccagaagatgacatgaatgatcggaaattgttgtatcaagagtgggctcgctatggggtgttctacaagttccagcctatcgatttgattcgaaagtactttggtgaaaagattgggctttatttcgcatggctcgggctgtatacctccttcctgattcccagcagcgtcatcggcgtaatcgtgtttttgtatggctgtgctactattgaagaggacatcccaagccgcgaaatgtgtgatcagcaaaatgcctttaccatgtgccccctgtgtgacaaaagctgcgattactggaacctcagttccgcctgtggaacagctcaggcgtcccatctgttcgataatcccgcaaccgtgtttttttctattttcatggctctgtgggcgacaatgtttttggaaaattggaaacgtctccagatgcgacttgggtacttctgggatctgaccggcatcgaagaagaagagcctcgagtgcaggagcatagtcgtcccgagtatgaaaccaaggtcagagagaagatgctgaaggagagcaatcagtctgctgtgcaaaagctggagacaaacacaacagaatgcggcgatgaagacgacgaggataagctaacttggaaagatagattccctggctacctcatgaacttcgcaagcatactgtttatgatcgccttgactttcagcatagtgttcggggtaattgtctacagaattacaactgctgccgccttgagtctgaacaaggccaccagatccaatgttcgggtcactgtcacagccacagccgtgataataaacctggtcgtcattctcatccttgacgaaatctacggagcagtggcaaagtggctgacaaaaatcgaggtacctaaaaccgagcagacattcgaggaaaggctgatcctgaaggctttcttactaaagttcgtcaatgcttactcacctattttttacgtggcattctttaagggtagattcgtcggtcgcccaggaagctatgtttatgtattcgatgggtacaggatggaagaatgtgctccaggcggatgcctgatggagctttgtatccaactctccattattatgctcgggaaacagctgatacaaaataatatttttgaaatcggcgtgcccaaacttaagaaactgttcagaaaactgaaggacgagactgaggccggcgagaccgactcagcccactccaaacatccggagcagtgggatttagactactctcttgagccttacaccgggcttacccccgagtacatggagatgattatccagtttggctttgtgacactgttcgtagcctcctttccattggcccccgtgtttgccctgctgaacaatgtgatagaagtgcggctcgacgctaaaaaatttgttactgagttaagacggcctgatgctgtaagaaccaaagatattgggatctggtttgacatcctgtccggcataggaaaattctccgtgatttctaacgcattcgtgatagccataaccagcgattttatcccacgtctggtttaccagtacagctattctcacaatggcactcttcatggcttcgtcaaccatacactctcattcttcaatgtgtcccagctgaaagagggtacacagcctgaaaacagtcagtttgaccaagaggtgcagttctgccgcttcaaagactaccgtgagcctccatgggcccccaacccgtacgaattctcaaagcagtactggtttatcctgagtgcacgcctggcttttgtcattatttttcagaatttggtaatgtttctctcagtgctcgtggactggatgatccccgacatcccgacggatatcagcgaccaaatcaagaaggaaaaatccctgttagtggatttctttctcaaagaggagcacgagaagttgaaattaatggatgaacccgcactccggagtcccggcggaggggataggagtcgcagccgagctgcatcctcagctccgagtggccagtctcagctaggctctatgatgtccagtgggagtcagcacaccaatgtttag

SEQ ID NO: 179200 - DNA, 2742 bp, synthetic construct
  misc_feature 1..2742: note = Description of Artificial Sequence: Synthetic coding sequence
  source 1..2742: mol_type = other DNA
atgggcgaccccgacctgctggaggtgctggccgaggagggcgagaaagtgaacaagcatatagactatagcttccagatgtctgaacaaagtctaagcagtcgagagacctcgttccttatcaatgaggaaacaatgcctgctaagcgatttaatctgttcctcagacggaggctgatgtttcagaagaatcagcagagcaaagactctatcttcttccgcgatggaatccggcagatcgattttgtgctgtcatacgtggatgacgtcaagaaagacgccgaattgaaggctgagagaaggaaggagtttgagacaaacctgagaaagacaggcctggaattggaaatagaggataagcgggattccgaagacggtcgaacttacttcgtgaaaatccacgcaccctgggaggtgctggttacctatgcagaggtgcttggaattaaaatgcccataaaggaaagcgatattcctcggcccaagcatacaccaatctcatacgtgttgggacccgtaaggcttccgctgtcagtgaaatacccacaccccgagtacttcaccgctcagttcagcaggcaccgacaggagttgttcctgattgaagatcaggcgaccttttttcctagctcctctcgcaatcggatcgtatactacatcttaagccgctgcccatttggtattgaggacggcaagaaacggttcggcatcgaacggctgcttaacagcaatacctacagctccgcgtatcctctccatgacggccagtattggaaaccatctgaaccaccaaacccgacgaacgaaaggtataccctgcaccagaattgggcgaggtttagctatttttataaggagcagccgttggaccttatcaagaactattacggcgagaaaatcggcatctatttcgtctttttgggtttctataccgaaatgctgttcttcgccgcggttgtaggactggcctgctttatttacggactcctcagcatggaacacaacacctcttccacagaaatctgtgatccggagatcggagggcagatgatcatgtgccctttgtgtgatcaggtgtgcgattattggcgcctgaatagcacatgtctcgcgtctaaattttcacatctgtttgataacgaatctaccgtctttttcgcgatatttatggggatctgggtaacactatttctcgaattttggaaacaaagacaggcccggctggaatacgagtgggaccttgtggattttgaggaggagcagcagcagctccagctgcggccggaattcgaggcgatgtgcaaacataggaagttgaatgcggtgactaaggaaatggagccctatatgcccctgtatacccgcatcccttggtactttttgtctggcgccacggtgaccctgtggatgagcctcgtggtgacgtctatggtcgcagtgatcgtgtacaggctcagcgtgtttgccacgtttgcgtccttcatggaatccgacgccagcctcaaacaggtgaaatcctttctgaccccacagattacaacttctctgacgggatcatgcctcaacttcatcgtcatcctgatcctcaactttttttacgaaaagatttccgcatggattacgaagatggagatacctcgcacctaccaggagtatgaatccagcctgacgctgaagatgtttttattccagtttgtaaacttttactcatcatgtttttatgtagcgttcttcaaaggaaaattcgtcggctacccaggcaagtacacttacttgtttaatgaatggcgtagcgaagagtgtgatccaggggggtgtctgatcgagttgacaacccagctcacaattataatgacaggaaagcagatatttggaaacatcaaggaggccatatatccacttgctctcaactggtggcgacgtcggaaggcacggactaacagtgagaaattatattcgcgatgggagcaggaccatgatctggagtcctttgggcccctgggtctgttttatgaatatctcgagactgttacccagttcgggtttgtgactttattcgtagcgagcttcccattggctcctctcctggcattaatcaacaacattgtcgaaatcagagtcgacgcctggaaactgactacccaatatcgtcgtaccgtggcgtctaaggcacactccattggcgtttggcaggacatcctttacggaatggcggtgttgtccgtggcgactaacgctttcatagtagctttcacctcagatattattccaagacttgtttattactacgcttactcaactaacgctacacagcctatgacggggtatgtgaacaattccctctccgtttttttaatcgctgacttcccgaaccatactgctccaagcgaaaaacgagacttcattacgtgcaggtaccgcgactaccgctatcccccggacgatgagaataagtatttccacaatatgcagttttggcatgtcttggcagccaagatgacattcattattgttatggagcatgtagtgttcctagtcaagttcctattagcctggatgattccggatgttccgaaggatgtggtagagcgaattaaacgcgagaagttaatgaccatcaagatcctgcatgatttcgaattgaataaattaaaagagaatcttggcataaactctaatgagttcgctaagcatgtcatgatagaggagaataaagcacagctggctaagtcgactttgtag

SEQ ID NO: 179201 - DNA, 2733 bp, synthetic construct
  misc_feature 1..2733: note = Description of Artificial Sequence: Synthetic coding sequence
  source 1..2733: mol_type = other DNA
atgaagaagatgagccggaacgtgctgctgcagatggaggaggaggaggatgacgatgatggcgacatagtgcttgagaatttaggacagacaatcgtgcctgatctcggttctctggaaagtcagcatgatttccgaacaccagaattcgaggagttcaacgggaaacctgatagcctgttctttaacgatgggcagagaagaattgattttgtgctggtgtacgaggatgagtctaggaaggagacaaataaaaaagggactaacgaaaagcagagacgaaagagacaggcgtacgaaagcaatcttatctgtcacggcttgcagctggaggcaacacgctcggtactggacgataaacttgtatttgtgaaggttcacgcaccttgggaggtcttatgcacatatgccgaaataatgcatatcaagctgccacttaagcctaatgaccttaagaaccgcagctctgctttcggaacattaaattggttcactaaggtgctcagtgtggacgagagtatcatcaagcccgagcaggaattcttcacggctccctttgagaaaaataggatgaacgacttctatatagtggaccgcgatgcattcttcaacccggcaacgcgttccaggatcgtctattttatccttagccgggtgaagtaccaagtgataaacaatgtgtccaaattcggcatcaacaggcttgtgaactctggtatatataaggctgcttttccattgcacgattgcaagtttcgccgtcagagtgaggatccaagctgccccaatgaacgctatttgctatatcgcgaatgggctcacccccgttccatctataaaaaacagccactggacctgatcaggaagtactacggcgagaaaatcggcatttactttgcctggttgggctactatactcaaatgctgctcctggcagccgtggtgggcgttgcttgttttctgtacggctacctcaatcaggacaattgtacctggtccaaagaagtgtgtcaccccgatattggtgggaaaataatcatgtgcccacagtgcgacaggctctgccctttctggaagttgaacatcacatgtgagagttcaaagaaactgtgtatatttgacagttttggcacactggtttttgccgtgttcatgggcgtgtgggtgacactattcctagagttctggaagcgacgtcaagctgagcttgagtacgaatgggatactgtggaactgcagcaggaggaacaggcaaggcccgaatatgaagcccgctgcacccacgtagtgattaatgaaatcacacaagaggaagaacgcatccctttcaccgcttgggggaaatgtattagaatcactctctgcgcctctgccgtgttcttctggatcctgctcatcatcgcgagcgtgattggcatcatcgtgtataggttaagtgtgtttattgtcttcagcgccaaactcccaaagaacattaatggaaccgacccaatccaaaagtacctcactccccagaccgccacttcgataacagcttctattatttcctttattatcatcatgattttgaacacaatctacgagaaggtggccattatgatcacaaattttgaactccctcggacacagacagattatgagaactcattgactatgaagatgttcctttttcagtttgtaaactattactcatcttgtttctatattgcgttcttcaaaggtaagtttgttggataccctggcgatcccgtttattggttaggtaaatatcgcaatgaagaatgcgatccgggtggttgcctccttgagttgacgactcagctgacgatcatcatgggtgggaaggcaatctggaataacattcaagaagtgctgctcccgtggattatgaacctcattggcaggtttcacagggtgtctgggtcggaaaagatcacccctcgttgggagcaggactaccaccttcaaccaatggggaaacttggattgttctacgaatacctggagatgatcatacagttcgggttcgtgacattatttgtggcatcctttcccctggccccccttctcgctctggtgaataacatactcgagatccgggtagatgcctggaagttgacaacccaattccggagattagtgccagagaaagcgcaggatatcggggcttggcaacctataatgcaaggaattgctattttggctgtggttacaaacgccatgatcattgcctttacatccgacatgattccccgtttagtgtactactggtcattctctgttccaccctatggcgatcacacttcatacaccatggaaggatatatcaacaacacattaagtatattcaaggtcgccgatttcaaaaataaaagtaaaggcaacccttactccgacctgggtaatcacacaacttgtagataccgcgactttagatacccaccaggccacccacaggagtataagcataatatctattactggcacgtaattgctgctaagttagcatttataatagtgatggaacatgttatctattcagtgaagtttttcatctcttatgctattcctgacgtcagcaaacgcactaagtctaaaatccagcgggaaaagtacttgacccaaaaattgctccatgagaatcacctgaaggatatgaccaagaacatgggggtgatagccgagcgtatgatcgaggctgtcgacaataacctcagacctaagtcggagtag

SEQ ID NO: 179202 - DNA, 2790 bp, synthetic construct
  misc_feature 1..2790: note = Description of Artificial Sequence: Synthetic coding sequence
  source 1..2790: mol_type = other DNA
atgaagaagatgagccggaacgtgctgctgcagatggaggaggaggaagatgacgatgacggcgatattgtgcttgagaacttaggccagactattgtgccagatctcgggtcactggagagccagcacgactttaggacgcccgaattcgaggaatttaatggaaagccggatagcctattcttcaatgacggccagcggagaattgattttgtgctggtgtacgaggatgagagtcgcaaggaaacaaacaaaaaaggcaccaatgagaaacaacgccgcaaaagacaagcatatgagagcaatctcatctgccatgggttgcaactcgaggccactcggtcggtgctggacgacaaactcgtgttcgttaaagtgcacgccccatgggaagtcctctgtacttatgccgagatcatgcacatcaaacttccgctcaagcccaatgatctaaaaaaccgcagttcagcttttggcacactcaattggttcaccaaagtgctcagtgtcgacgaatcgatcatcaagcctgagcaggagttcttcacggcgccttttgagaaaaatcgcatgaacgatttttatattgtcgacagagatgccttcttcaaccccgcaaccagatctcggatcgtgtacttcatattgagtagagtgaagtatcaggtgattaataatgtcagcaaatttggtatcaaccgtctggtgaactccggcatctacaaagcagctttcccacttcacgattgcaagtttcgccgtcagtctgaagacccatcatgtccgaatgagcgctacctcctctatagagaatgggcgcatcccaggtcaatttataagaagcagcccctcgatctcattcgcaaatattacggcgagaaaatcgggatctacttcgcctggttgggctattatacgcagatgctgttgctggccgccgtagtgggagttgcttgtttcctgtacggttatctgaatcaagacaactgtacttggagcaaggaggtttgtcatccagatattgggggcaaaattatcatgtgtccccaatgcgataggctatgtccattctggaaactgaatatcacatgtgagagttctaaaaagctctgcatttttgactcctttgggacgctcgtctttgcagtatttatgggagtgtgggtcactctgtttcttgaattctggaagaggcgccaggccgagctggagtacgaatgggataccgtggaattgcagcaggaagagcaggcacgtccggagtacgaagcacgttgcacgcacgtcgtcatcaacgagataacccaagaagaggaacgaatcccattcacagcctgggggaagtgcattagaatcactttatgcgctagtgccgtgttcttttggatcctgctgattattgcgagcgttatcggtatcattgtataccgcctctccgtgttcatcgtgttcagcgctaaattacccaaaaacataaatggcactgaccctatccagaaatacctgacgccccagaccgctaccagtataactgcgtcaataatttcttttatcatcattatgatattgaatactatttacgagaaagttgctataatgatcacaaacttcgagttgccaaggacacagacagactacgagaactcactgaccatgaagatgtttctgttccagttcgtgaactattattcaagctgtttttatatcgcatttttcaagggaaagttcgtcggatatccgggcgacccagtctattggctcggcaagtatcgaaacgaggagtgcgacccaggtggctgcctcctggagcttactacgcagctgacaattatcatgggcgggaaagctatatggaacaatatccaggaagtgcttctgccttggatcatgaacctgataggtagatttcatcgggtgtccggcagtgagaaaatcaccccgagatgggagcaggattaccatctgcagcccatgggtaaacttggtcttttctatgaatacctcgaaatgatcattcagtttgggttcgtgaccctctttgtggcttcttttccactggcacctctcctggcactggtgaacaatatcttggagatcagagtcgatgcatggaagcttacgacccagttcagaaggctagtcccagaaaaagcacaggacatcggggcctggcagccaattatgcaaggcatcgcaattctggccgtggtgacaaacgccatgatcatcgctttcacaagtgacatgataccccgactcgtatactattggtctttctctgttcctccttacggtgaccacacatcatatacaatggagggttacattaataacaccctcagcatttttaaggtagccgactttaaaaacaaatccaagggcaacccatacagcgatctagggaatcacaccacatgcagatacagagattttcgatatcctcccgggcacccacaggagtataagcacaacatctattattggcacgtgatcgcagcaaagctcgcctttataattgtgatggaatacctcgcactcctacctcgcttgggtcattctggtatgatcttggcccattgcaatctccgtttacctgttgactgttgtatgtgctatcgatttgtcgacgagattaggctgctggagcagctaacttccgacttcatagattcactctactacatctttagcatctccataataagtatttttttctctgtcacctttttcttcctcctgcttagcctggggcccactccttgtttttctgtttctaactttctgtcctag

SEQ ID NO: 179203 - DNA, 2790 bp, synthetic construct
  misc_feature 1..2790: note = Description of Artificial Sequence: Synthetic coding sequence
  source 1..2790: mol_type = other DNA
atgaagaagatgagccggaacgtgctgctgcagatggaggaggaggaagacgatgatgatggcgatatagttctcgagaatctgggccagaccatcgtgcccgatttaggatctctggagtcacagcatgactttcgaacaccagaatttgaggaatttaacggaaaaccggattcacttttctttaacgatggacagcgcagaatcgacttcgtgttagtgtatgaggacgagagtcgtaaagagacaaacaagaagggcaccaatgagaagcaacgccggaaacgacaagcttacgagagcaacctaatctgtcacgggctgcaattagaggccactcgttcagtgttggacgataaattggtgttcgttaaggtacatgccccttgggaagtgctgtgtacgtacgcagaaataatgcacataaagttaccgctgaaacccaatgacctcaagaaccgtagcagtgctttcgggactcttaattggtttacaaaagtgctcagcgtggatgagagtattatcaaaccagagcaagaatttttcaccgccccgtttgagaaaaacaggatgaacgatttttacattgttgatcgcgacgcatttttcaatcccgccacccgctctagaatcgtatatttcatcttatctcgcgttaaataccaggtcattaataacgtaagtaagttcggaattaacaggctggtgaactcgggcatttacaaggctgcttttcctttgcatgactgtaaatttcgacgccagtctgaagacccttcttgtcctaacgaaagatatctgttgtaccgtgagtgggcccaccctaggtcaatctataagaaacaacccctggacttgattcgaaagtactatggcgagaaaatcggtatctacttcgcatggttggggtattacacacaaatgttactgctagcggccgtagtcggagttgcttgttttctgtatggctacctcaaccaggataattgcacgtggtctaaagaggtttgccatcctgacattggaggaaagattatcatgtgcccccagtgcgaccgattgtgtccattttggaaattgaacatcacatgcgagagctctaaaaaactttgtatcttcgacagctttggaactctggtttttgccgtgtttatgggggtgtgggtgactctgttcctggagttctggaagagacggcaggctgagcttgagtacgaatgggacacagtggagctgcagcaagaagagcaggccaggcccgagtatgaagctagatgtacccatgttgtgatcaatgagatcactcaagaagaggagcgcatccctttcaccgcatgggggaagtgcatccggataaccttgtgcgcaagcgcagtctttttctggatactgttaatcattgcatcagtgattgggattatcgtgtatagactgagcgtgtttatcgttttttctgctaagctccccaagaacatcaatggtactgaccccatccagaaatacctgactccacagactgccacttccataacggccagcatcatctccttcatcattattatgattctgaacacaatttacgaaaaagtggcgatcatgattaccaatttcgaacttccccgtacccagacggactacgagaacagcctgacaatgaagatgtttctgttccagttcgtgaattattacagcagctgtttctatattgcttttttcaaaggcaagttcgtggggtatcctggggatcctgtgtattggctcgggaaataccgtaacgaagaatgtgaccccgggggatgtctacttgaactgactacacagctcaccatcattatgggtggtaaagcaatctggaataatattcaggaagtcctgcttccttggatcatgaatctcattgggagattccaccgagtgtccggatcagagaaaataacccctaggtgggagcaggactaccatctccagcctatggggaagctgggcttattttatgagtatttagagatgatcatccaatttggcttcgtcaccttatttgtcgctagttttccactggccccccttttagccctagttaacaacattctggaaatacgcgttgatgcttggaagctcaccacccagtttaggagattggttcccgaaaaagcccaggatattggcgcttggcagccaatcatgcagggcatcgcaatcctagccgttgtgactaatgccatgataattgcttttacttcggacatgattccacgtcttgtttactattggtcctttagtgtgccaccctacggcgaccatacatcctacaccatggagggttatatcaacaatacactgtcaatcttcaaggtcgccgatttcaaaaataaatcgaagggcaacccttatagtgacctcggcaaccacacaacgtgtagatatagggacttcaggtatcctcccggccacccgcaggaatacaagcataacatttactactggcatgtaatcgccgctaagctggcttttattattgtgatggagtatctggcactattgccgagactgggacacagcgggatgattctagctcattgcaacctgcgtctgcctgtggactgttgtatgtgctatcggttcgtcgatgaaatccgtctcctagagcaactaacgagcgactttatcgatagtctttactacattttttctatcagcatcatctcaatttttttctctgtcactttcttttttctactcctgtcccttggccctactccatgtttttctgtgtcaaatttccttagctag

SEQ ID NO: 179204 - DNA, 2679 bp, synthetic construct
  misc_feature 1..2679: note = Description of Artificial Sequence: Synthetic coding sequence
  source 1..2679: mol_type = other DNA
atgttctgcgccgccgtgctggagaacctgggccagaccatcgtgccagatctaggtagccttgagtcccagcacgactttcggacaccagagtttgaagaattcaatggaaagcccgattcattattttttaatgatggccagagacggatcgattttgtgcttgtctacgaggacgaatcccgaaaagagactaacaaaaagggcacgaatgaaaagcaaagaagaaagcgacaggcttatgaaagcaacctcatttgtcatggcctgcagcttgaggctactagaagcgtcctcgacgataagctcgtattcgtgaaggtccacgccccatgggaagtgttgtgtacctatgcagaaatcatgcatatcaaattacctctgaaacccaatgacctcaaaaatcggagtagcgcattcgggacccttaactggtttacaaaagtgctgagtgtggatgaatccattatcaaacctgaacaggagtttttcaccgcaccttttgaaaaaaaccgcatgaacgacttctatattgtggacagagacgcctttttcaacccagctacaaggtcccggatagtctacttcattctatctagggtgaaatatcaggtgattaataacgtctctaaatttggaattaaccggctggtcaatagcggaatttataaggcagcgtttcctttgcacgactgtaagtttaggcggcaatcagaggacccatcttgccccaacgagcggtatcttctgtacagagaatgggcccacccacgatcaatttataaaaaacagccactggatctcatccgaaaatattacggagagaaaatcggtatttacttcgcttggctgggctattatacacagatgctgttgctggcagcggtggttggcgtcgcttgcttcctgtatgggtatctcaaccaggacaactgcacatggtcaaaagaagtctgtcacccagacataggcgggaagatcatcatgtgcccgcagtgcgacagattatgccctttctggaaactgaatataacttgcgaaagctctaagaagctatgtatcttcgacagcttcggaacgctggtcttcgcggttttcatgggagtgtgggttacccttttcctcgagttctggaaaaggaggcaggcagaactggagtacgagtgggacaccgtagagttgcagcaggaagagcaggcaaggcctgaatatgaggcccgttgtactcacgtcgttatcaacgagattacccaagaagaggaacggatccctttcacagcatggggaaagtgcatcaggatcaccctctgcgcaagcgcggtgttcttctggattcttcttatcatcgcctctgttatcggaatcatcgtctaccgcctgtcggtgttcatcgtgtttagcgctaagctgccaaaaaacattaatggcaccgacccgattcagaagtatctgaccccccagacagccactagtattacggccagcattatctctttcatcataattatgattctcaatacaatttacgagaaagtagctataatgattacaaacttcgaactcccgcgaacacagaccgactatgagaatagtctgaccatgaaaatgttcctctttcagtttgtgaattactactcaagctgtttctacatcgcgttctttaaaggaaagtttgtgggatatcccggggacccagtatactggctgggtaaataccggaacgaggaatgcgatcctggaggctgcctgctcgagttaactacccagctgaccataatcatgggcggaaaagctatttggaataatattcaagaagtgctactcccctggataatgaaccttatcgggcgctttcatcgggtgagcggctccgagaaaatcacccctagatgggaacaggattaccatcttcagccaatgggaaaactgggcctcttttacgaataccttgagatgattatccaattcggattcgttactctgttcgtcgcaagttttccccttgccccgcttcttgccttggtgaacaacatactggaaattagagtagatgcctggaaactcacaacacagtttaggaggttggtgccggagaaggcccaggacatcggcgcttggcaacccataatgcagggaatcgcaattctggccgtagtcaccaacgccatgattatcgccttcactagcgacatgattccaagactagtgtactactggtccttcagcgtcccgccctatggggatcacacctcctataccatggagggttacatcaataacactttgtctatatttaaggtggccgactttaaaaataagtccaagggtaacccttatagcgacctggggaaccacacaacttgcaggtatcgagatttccggtatccaccaggccatccacaggagtataagcataatatatattactggcacgttatcgctgctaagctcgcgtttattatagtcatggaacacgttatttactcagtgaagttctttatctcttacgccatacctgatgtcagcaaaagaaccaagagcaagatccagcgggaaaagtatttaactcagaaactactgcacgagaaccatctgaaagatatgaccaagaacatgggcgtgatcgccgagcggatgattgaggctgtagacaacaatctgagaccaaagtcggaatag

SEQ ID NO: 179205 - DNA, 2796 bp, synthetic construct
  misc_feature 1..2796: note = Description of Artificial Sequence: Synthetic coding sequence
  source 1..2796: mol_type = other DNA
atgaagaagatgagccggaacgtgctgctgcagatggaggaggaggaggacgatgacgatggtgacattggcgatgtacctgcttcaaggcgaccttttttgaccccgcacacccacctgcccagttccttggtgcttgaaaacttgggtcagacaatcgtgccggacctcggaagcctcgagagccagcatgacttcagaacaccagagtttgaagaattcaatgggaagcccgatagcctcttttttaacgacggtcaacgtaggatcgatttcgtgctggtgtacgaggatgagtcaaggaaggaaactaataaaaaaggaactaacgaaaagcagcgccgcaaacgacaagcgtacgagagtaatctgatttgccacggactgcagcttgaggcaacacgcagcgttttggacgacaagctggtcttcgtgaaagtgcacgccccctgggaagtgctttgcacctacgctgagatcatgcatatcaaactgcccttaaaacccaacgacttaaaaaacaggtctagcgctttcggaactttgaattggttcaccaaggttctttccgtggatgaatctattattaagccggaacaggagtttttcaccgcaccctttgagaagaatagaatgaatgacttctatattgtggaccgggatgcattcttcaatccagcaacccggtcaagaatagtgtatttcatcctgtccagggtcaaataccaggttataaataatgtgagcaagttcgggatcaatagactcgtgaacagcggaatatacaaagcggcattcccattacacgattgcaaattcagacgccagtcagaggatcctagttgcccgaacgaacggtacttactgtatcgagagtgggctcacccgaggtcgatatacaagaaacagcccctcgacctgattaggaaatattatggggagaagattggtatttacttcgcatggctggggtattacacccagatgttactgctcgccgcagttgttggagtcgcgtgctttctgtacggttaccttaaccaggacaattgcacttggtcaaaagaggtgtgtcatcctgacattggaggaaaaattatcatgtgtccccagtgcgaccgtttgtgtcctttttggaaacttaacatcacctgcgagagtagtaagaagctatgcattttcgactccttcggtaccctggtcttcgcagttttcatgggggtgtgggtgactttattccttgaattttggaaacggagacaggccgagctcgagtatgaatgggatacagttgagctccagcaggaagaacaggccaggcctgagtatgaggcacgatgcacacacgtcgtgattaatgagattactcaagaggaagaacggattccctttactgcttggggtaagtgcattcgcattaccctgtgcgcctcggctgtgttcttttggattctgctaatcattgccagcgtgatcgggataatcgtctaccgcctatctgtcttcattgtcttctcagcaaagctccctaagaacattaacggtaccgatcctatccagaagtaccttacccctcagacggccacttctatcaccgcaagcatcatctcctttatcataattatgattctcaatactatctacgagaaggtcgccattatgattacaaatttcgaacttccaaggacacagacagattacgagaactcactcacgatgaagatgttcctgttccagttcgtgaactattattccagctgcttttacatcgcatttttcaaaggtaagtttgtcggatatccgggggacccagtctattggttgggcaaatacaggaacgaagaatgtgaccccggcgggtgtctcttagaactgacaacccagctgacaatcattatgggcggcaaggccatctggaacaacatccaggaagtgctcctgccttggataatgaacctaatcggacgcttccaccgcgtatcagggtccgaaaagatcaccccccgttgggaacaggattaccatctgcagccaatgggaaaattgggtctgttttacgagtacctggaaatgattatccagtttggtttcgtgacgctttttgtggcctcctttccattggccccactgctcgccctcgtgaataatatcctcgagattagagtggacgcgtggaaactaaccacccagtttcgccgtcttgtgccggaaaaggcccaagatattggagcctggcagcccataatgcagggtattgccatccttgctgtggtgaccaacgccatgattattgcctttacctccgacatgattcccagacttgtttattactggagcttcagcgtcccaccatacggcgatcacacatcatacaccatggagggatacattaataatacactgagcatcttcaaagtcgcagattttaagaacaaatctaaggggaatccttatagcgatctcggaaatcacacgacatgtcggtacagggatttcagataccctcctggccacccacaagaatacaagcacaacatctattactggcacgtgattgccgccaagttggccttcattattgtcatggaacacgtcatttatagtgtgaagttcttcatctcctacgccatccccgacgtcagcaagcgcacgaaaagcaagattcagagagagaaatatctcactcaaaagttgcttcacgagaatcatctcaaagatatgacaaaaaacatgggggtaatcgccgaaaggatgattgaggctgtcgataataaccttcggcctaagagcgagtag

SEQ ID NO: 179206 - DNA, 501 bp, synthetic construct
  misc_feature 1..501: note = Description of Artificial Sequence: Synthetic coding sequence
  source 1..501: mol_type = other DNA
atgatgctgcacagcgccctgggcctgtgcctgctgctggtgaccgtgtcttccaatctggctatagcaatcaaaaaggaaaagagaccacctcagacgttatctcgcggatggggggatgacatcacctgggtccaaacctatgaagaaggactgttctacgcccagaaatccaaaaaacccctgatggtcattcatcacttagaagattgccagtacagccaggctttgaagaaggtgtttgcgcagaatgaagagatccaggagatggctcagaacaagtttatcatgttaaacttaatgcacgaaactactgataaaaacctgtcaccagatggccagtacgtaccacggataatgttcgttgacccttccctaactgtgcgcgctgacattgccgggcgatactctaatcgcttatatacctatgagccacgggacctgcctctgctaatcgaaaatatgaaaaaggccttgcgactgattcagtccgaactgtag

SEQ ID NO: 179207 - DNA, 453 bp, synthetic construct
  misc_feature 1..453: note = Description of Artificial Sequence: Synthetic coding sequence
  source 1..453: mol_type = other DNA
atgggcgccgccgtgttcttcggctgcaccttcgtggccttcggccctgcatttgcgctttttttaatcaccgtggctggtgaccccctccgcgtaatcatcctcgtggcagggaaggcagatgagggactagccagcctgtcagaagacggcagatctcccatcagcattcgccagatggcctacgtgtctggcttgtctttcggcattatctcaggagtcttctcagtgattaacatactagccgacgccctgggaccaggagtcgtgggaattcatggtgacagcccttattattttctgacaagcgcattcctgactgccgccatcattctcctgcacacattttggggcgtggtgttcttcgatgcgtgtgagcgcaggcgctattgggcactcggactggttgtgggatcccatcttctgacatctggtctgaccttcctgaattag

SEQ ID NO: 179208 - DNA, 744 bp, synthetic construct
  misc_feature 1..744: note = Description of Artificial Sequence: Synthetic coding sequence
  source 1..744: mol_type = other DNA
atgggcgccgccgtgttcttcggctgcaccttcgtggccttcggcccagccttcgccttgttcctaatcactgtagccggcgaccccctccgcgttattatattggtcgccggcgctttcttttggttggtgtctcttctgttggcttcagtagtgtggtttatcctggtgcacgtgaccgaccggtccgatgctaggctccaatatggcctactaatcttcggagccgccgttagcgttctgctgcaggaagtatttaggttcgcctattacaagctgctcaagaaggccgacgaagggctagcctccttgagtgaagatggaaggtctcccatcagtattcggcagatggcttacgtgtcaggcttaagcttcggaattatctccggggttttcagtgtcattaacattttagctgacgcattgggaccaggcgtcgttggcattcatggcgattccccttactattttctgacatcagcatttctcacggcagcaattatactccttcacaccttttggggagtagtcttcttcgatgcgtgcgagcgccggcgttactgggccctggggcttgtggtgggttctcatttactaacctctggcttaacttttctcaatccgtggtacgaggcctctttactgcccatctacgccgtgacagtgtctatgggcctgtgggctttcattacagcaggcggctccctgcgatccatccaacggagcctcttgtgcaaggattag

SEQ ID NO: 179209 - DNA, 798 bp, synthetic construct
  misc_feature 1..798: note = Description of Artificial Sequence: Synthetic coding sequence
  source 1..798: mol_type = other DNA
atgggcgccgccgtgttcttcggctgcaccttcgtggccttcggcccagccttcgcgctcttccttatcactgtggcgggggatcccttaagagtgattatactcgttgcgggagcttttttttggctggtgagcctgcttttagcttcagtcgtttggttcattctcgttcacgttacggatcgctccgacgctcgactccagtatgggctccttatcttcggagccgccgtgagtgtcctgctccaggaggtgttccgatttgcctattataagcttttgaaaaaagccgacgaaggcctggcatcactctccgaagacggccggtcccccatttccattaggcagatggcttatgtctccggcctgtcgttcggcataatcagtggtgtttttagtgtgataaatatactggccgacgccctgggcccaggggtggtgggaattcacggggattcaccctactactttctgaccagcgcattcctgacagccgctattattctcctccacacgttctggggtgtagtcttctttgatgcttgtgaacgacggcggtattgggcactgggcctggttgttggttcccacttactcaccagcggcctcacgttcctaaatccgtggtacgaggctagcctgttacccatatacgccgtgaccgtgagtatgggcctctgggctttcattacggcaggaggcagcctaaggtcgatccagcgtagtttactgtgccggagacaagaagattctcgggtgatggtttacagtgccctcagaataccccccgaggactag

SEQ ID NO: 179210 - DNA, 588 bp, synthetic construct
  misc_feature 1..588: note = Description of Artificial Sequence: Synthetic coding sequence
  source 1..588: mol_type = other DNA
atgggcgccgccgtgttcttcggctgcaccttcgtggccttcggccccgcatttgccttgtttctaatcaccgtcgccggcgaccctctgcgggtgattatccttgtggccggaaggtgcagcgctctgccgacaacctcttgcctgatcagcggcctgagtttcggaataatttccggcgtgttcagcgtcattaacatactagcagacgccctggggcccggagtagtgggaatccatggcgactcaccgtattatttcctgacatccgcgtttctgacagccgccatcatactcctccataccttctggggcgtggtgttttttgatgcgtgtgagcggcggcgctattgggcacttggccttgtcgtcggcagtcatcttctgactagcggactgacattcctgaacccttggtacgaagcctctctgctgcccatatacgcggtgacagtctcaatggggctgtgggcgtttattacagcgggtgggagccttaggagcatccagcgctccctcttatgtagaaggcaggaggattcaagagtaatggtttactccgccttgcgaatacctccagaggactag

SEQ ID NO: 179211 - DNA, 774 bp, synthetic construct
  misc_feature 1..774: note = Description of Artificial Sequence: Synthetic coding sequence
  source 1..774: mol_type = other DNA
atgaccgccgccgtgttcttcggctgcgccttcatcgccttcggcccagccctggcactctacgtgttcaccatagcaaccgaaccgctgcgtatcatattcctgattgccggcgcatttttttggcttgtctccctcttgatctcatctcttgtctggtttatggcacgggtgatcatcgacaacaaagacggccctacccagaaatatttgctcatcttcggggcattcgtgtccgtgtacattcaggagatgttccgattcgcgtactacaagctgctgaaaaaagcgagcgaaggccttaagtcaatcaacccaggagagaccgcccctagtatgagactgctggcctacgtcagcgggcttgggttcggaatcatgagcggagtattcagtttcgttaacacgctgtccgattcattagggcccggcactgtgggaatccatggcgattccccgcagttttttttgtattctgcatttatgactttagtgattatcctgctgcacgtgttctggggaattgtcttcttcgacggctgtgagaagaagaagtggggcattctcttgattgttttgctcacccatcttctggtgtctgcccaaacattcatctctagctactacggaatcaatttagcgagtgcgttcatcattctggttttaatgggcacctgggcttttctggccgccggtggatcttgcagaagcttaaagctgtgcttactgtgtcaggacaagaatttcctgctgtacaaccagagatcccgatag

SEQ ID NO: 179212 - DNA, 246 bp, synthetic construct
  misc_feature 1..246: note = Description of Artificial Sequence: Synthetic coding sequence
  source 1..246: mol_type = other DNA
atgaccgccgccgtgttcttcggctgcgccttcatcgccttcggccctgctttagctttatacgtgtttacaatcgccactgaacctcttcggattatcttcctgatagctggtaggcgagtggaaacctgcaagaacaccgaagctcccgactgtgccagtccctcagggtcactctcctttctgctggttggggtgagcaccgacttcgtgccctgtctggtacacggtaagagccactattag

SEQ ID NO: 179213 - DNA, 651 bp, synthetic construct
  misc_feature 1..651: note = Description of Artificial Sequence: Synthetic coding sequence
  source 1..651: mol_type = other DNA
atgaccgccgccgtgttcttcggctgcgccttcatcgccttcggccctgcccttgccttgtacgtttttacaattgcaacagaacccctgcgtatcatatttcttatcgccggcgcatttttctggttggtaagcctgttgattagctctctggtgtggttcatggctcgcgtgattatcgacaacaaggatggccctactcagaaatacttgcttattttcggggctttcgtgtccgtgtacatccaggaaatgttccggtttgcttactataaactcctgaagaaggcgtcggaaggattaaaaagtattaatcctggcgaaaccgccccctctatgaggctcttagcttatgctttcatgaccctagtcatcatcctgctccatgtattttgggggattgtgttctttgacggatgcgagaaaaaaaaatgggggattctccttattgttctgctgacgcacctcctggtgtcggcacagaccttcatatcgtcctactacgggatcaacttggccagtgcttttattattctggtgcttatgggaacatgggcgttcctcgccgctggtgggtcctgtcggtcccttaaactttgtctgctgtgccaagataaaaatttcctgttgtacaatcagcgatccaggtag

SEQ ID NO: 179214 - DNA, 1695 bp, synthetic construct
  misc_feature 1..1695: note = Description of Artificial Sequence: Synthetic coding sequence
  source 1..1695: mol_type = other DNA
atggccaccgccgagcggcgggccctgggcatcggcttccagtggctttctttggccacccttgtgttgatctgtgctggacagggcgggaggcgggaggatgggggaccagcatgttacggagggttcgacctgtatttcatactggataaatccggcagtgtattgcaccattggaacgagatatactacttcgtggaacagctcgctcataaatttatttcaccccagctgcgcatgtccttcatagtgttcagtacacggggtaccacactgatgaagctgacagaagacagagaacagatccgccagggcttggaggagctgcagaaagtactacctggcggcgatacatacatgcacgaggggttcgagcgcgcaagtgagcagatatactacgagaatagacagggctaccgcacagcctcagtgataatcgccctaaccgacggcgaattacacgaagacttgttcttttatagcgagcgagaagctaacaggagtagagaccttggggctatcgtgtactgcgttggtgtgaaagactttaatgaaacacagttggccagaatagccgattcaaaggatcacgtgtttcccgttaatgatggtttccaggcactccagggaataattcactcgatcctgaagaagagctgtattgagattctggcagctgagccctccacaatttgcgcaggcgagtcattccaggttgtcgtcagggggaacggcttccgacatgcaaggaatgtggatcgtgtgctctgctcttttaagatcaatgatagtgtaaccctaaacgagaaacctttctcagtcgaggacacatatctgctttgtcctgcaccaatcctgaaggaagtggggatgaaagcggctctccaggtgtccatgaacgatggattgtctttcatctcgtcatcagttataattacaactacacactgcagcgacggaagcattttggccatcgcgctcctcatcctgtttctcctccttgcgcttgccctgctttggtggttctggcctttgtgttgcaccgtaatcataaaagaggtgccacccccaccggcggaggaatcggaagaggaagatgacgacgggctccctaagaagaaatggccaactgtggacgcctcctactacggtggacgtggtgtcggtggcattaaaagaatggaagtgcgttggggagagaaggggtcaaccgaagagggcgccaagttggagaaagctaagaacgcccgtgtgaagatgccggagcaagaatatgagttccctgaaccgcgaaatctgaacaataacatgaggcggccaagtagtcccagaaagtggtactcccccatcaagggcaaactagacgctctgtgggttctactgaggaaaggctatgacagagtatcagtcatgcgtccccaacccggggacaccggccgttgcattaacttcactcgagtgaaaaacaaccagcctgctaaatacccgctcaataacgcataccacacctccagccctccgccggctccaatatatactccgcctccacctgcgccgcattgcccccctccaccccctagcgctcctacacccccgattccctcaccaccctctactcttcctccgcctccccaggccccacctccgaatagggctcctcccccgtctcgcccccctccacgtccatcagtatag

SEQ ID NO: 179215 - DNA, 1107 bp, synthetic construct
  misc_feature 1..1107: note = Description of Artificial Sequence: Synthetic coding sequence
  source 1..1107: mol_type = other DNA
atggccaccgccgagcggcgggccctgggcatcggcttccagtggctctcactagcaacattggtgcttatctgcgccggtcagggtggccgtcgcgaggatggaggtccagcgtgctatgggggttttgacctgtattttattttggataaatcgggaagcgtcctccaccactggaatgagatatattattttgtcgagcaattagctcataaatttatctcaccacagctgaggatgtcatttatcgtgttctctacccggggtaccacgctgatgaagctcactgaggatcgggaacaaattcggcagggcctggaagaactgcagaaggtgctgcctggtggtgatacctatatgcacgaaggctttgaacgtgcctctgaacagatctactacgagaacaggcaaggctacaggaccgcatctgttatcatcgctctgacagatggcgaattgcatgaagatctgtttttctatagcgagagagaagccaatcggagtcgtgatctgggggctattgtgtactgcgttggggtgaaagatttcaatgagacacagctggcacgaattgctgactctaaagatcatgtgtttcctgtaaacgacgggttccaggcgctgcagggcattattcactccattctgaagaagtcttgcatcgagatcttagcagctgagccctctactatctgcgcaggagagagcttccaggtcgtggtcagaggcaatggcttccgccacgcccgcaacgtggaccgcgtcctctgcagctttaaaataaatgattcagtgaccttgaacgagaagcctttcagcgtagaggatacgtacctcctctgcccagccccaattcttaaggaggtcggcatgaaagccgccttacaagtctccatgaatgatgggctcagcttcatcagcagctccgtaataattaccacgacacattgcagcgacggttctattctggcaatagcactgctcattctgttcctgctgctcgcattggcgctgctgtggtggttctggcctttgtgttgtaccgtgattattaaagaggtgcctcccccgcctgccgaagagagcgaagaaaacaaaatcaaatag

SEQ ID NO: 179216 - DNA, 1002 bp, synthetic construct
  misc_feature 1..1002: note = Description of Artificial Sequence: Synthetic coding sequence
  source 1..1002: mol_type = other DNA
atggccaccgccgagcggcgggccctgggcatcggcttccagtggcttagtctggcgacactggtactcatttgtgccgggcaggggggccggcgagaagatggagggccggcctgctacggtggcttcgatctgtactttatcctggacaaaagcgggagcgttctccaccactggaacgagatttactacttcgtggagcagctcgctcacaaatttatatcaccacagctacggatgtcttttattgtattttccacaagagggaccacacttatgaagttaaccgaggatagagagcagattcgccagggcttggaggagctccagaaggtcctcccaggcggagacacttacatgcacgagggcttcgagagggcatctgagcaaatctactatgaaaacagacaaggctaccgtaccgcttcagtgattatcgcactgacagatggagaactacacgaagacctctttttctactccgaacgtgaagctaatagatcacgcgacctcggtgcaattgtctattgcgtcggcgtaaaagattttaacgagacgcagcttgcccgcatcgctgactctaaggaccacgtctttccagtgaacgacggttttcaggccctccagggcatcattcattcgattctgaaaaagtcctgcattgagatcctcgccgctgagcctagcacaatctgtgccggagagagtttccaggtagtggtacgaggtaacggcttccggcatgctaggaatgtggatagagtcctctgctcctttaagattaacgattccgtcacactgaatgagaagccgttcagtgtcgaggacacctatttactgtgtccagcccctattctgaaagaggtgggcatgaaagccgccctccaagtgtccatgaatgatggtcttagctttatctcaagcagcgtgatcatcactaccacacattgctctcttcacaagatcgcttctggtcctactactgctgcatgtatggagtag

SEQ ID NO: 179217 - DNA, 969 bp, synthetic construct
  misc_feature 1..969: note = Description of Artificial Sequence: Synthetic coding sequence
  source 1..969: mol_type = other DNA
atggtggccgagcggagccccgcccggagccccggcagctggctgttccccggcctatggttgctcgtgctttccgggccgggtggtctactgcgagctcaggaacaaccaagctgccggagggcattcgatctgtacttcgtcctggacaagtcaggctccgtggccaataactggatagagatctacaatttcgttcagcaactggccgagcgctttgtcagccccgaaatgcgcctgtcctttatcgtcttctcatctcaggctacaatcatcctgcctctgaccggagatcggggtaagatcagtaaaggactggaagatctgaagcgcgtttcaccggttggagaaacatacatacatgaaggtttgaagctggcgaacgagcagatccagaaggccggcggcttaaaaacgagcagtatcataatcgccctgacagacggcaagctcgatggcctggtacctagctacgccgaaaaagaggccaagatatctagatcactgggggccagtgtgtattgtgtgggtgtcctcgacttcgagcaggcccagcttgagcgcatcgctgacagcaaagagcaggtgtttccagtgaaaggggggtttcaggctcttaagggaatcattaattccatacttgcccagagctgcaccgaaatcctggaactgcagccgagcagcgtctgtgtgggagaggagtttcagattgtactgtctggccggggatttatgttgggatcacggaatggatccgtcctctgcacttacaccgtcaacgagacatacacgacatcagtcaaaccggtctcagtgcagcttaactctatgctgtgccctgctcccatactgaacaaggctggtgagtggggacttacagttacacaggcaggagttaagtggcacgacctcacgcactgcacttttggtctatcaggtagcggtgacccccccacctctgcatcatag

SEQ ID NO: 179218 - DNA, 1470 bp, synthetic construct
  misc_feature 1..1470: note = Description of Artificial Sequence: Synthetic coding sequence
  source 1..1470: mol_type = other DNA
atggtggccgagcggagccccgcccggagccccggcagctggctgtttcccggtctgtggctgttggtgctgtccggacctggaggcctgctgcgggcccaagaacagcccagctgccggcgggccttcgatctgtacttcgtgctggacaaatccggctcagtggctaataactggatcgagatttataatttcgtgcaacaattggctgagagattcgtgtcaccagaaatgaggctgtctttcattgtgttttcctcgcaggccacaataatcctgcccttaacaggagatcgaggcaagatttcaaaggggctggaagatctgaagcgcgtttcccctgtcggcgaaacatacattcacgaggggcttaagctggccaatgagcagattcagaaagccgggggtttgaaaacgtccagcatcatcatcgcgttgacagatggaaagttagatgggttagtgccgtcctacgccgagaaggaggcaaaaatttccaggtccttgggtgctagcgtctattgtgtgggtgtgctcgacttcgagcaggcccagcttgaaaggattgccgactctaaggagcaggtctttcccgttaaagggggatttcaagcacttaaaggtattattaatagcatcctggcccagagctgtaccgagatcttagaactgcagccctccagcgtgtgcgtcggtgaggaattccaaatcgtcctttcagggcgcgggttcatgcttggatcgagaaacgggtctgtgttgtgcacatacactgtaaatgagacgtatacgacgtctgtcaagccagtgtctgtgcagctgaattccatgctgtgtcccgcgcccatcctgaacaaggccggggagacactggatgttagcgtgtcttttaacggcggtaaaagcgtcatctcaggtagtctgatcgttactgctaccgaatgttcgaacggcatagcagctataatcgtcatactggttctgcttctgctgttgggcatcggactgatgtggtggttctggccattatgttgtaaagtcgtaataaaggatcccccgcccccacccgcccccgcccccaaagaagaggaggaagagcccctgcctacgaagaagtggcctaccgtggacgcctcgtattatggtgggcggggtgtgggcggaataaagcgaatggaagtccggtggggagataaaggatccactgaggagggcgccagattagagaaagccaaaaacgctgtcgtaaaaattccggaggagacagaggagcccatacggccaaggccccctcgacctaagcccacacaccagcccccacagaccaaatggtacacccccatcaaaggccgattagacgctctatgggcacttctgagaaggcagtacgaccgcgtgagcctgatgagaccccaggaaggcgatgaagtctgtatatgggaatgtattgagaaggagcttactgcatag

SEQ ID NO: 179219 - DNA, 1161 bp, synthetic construct
  misc_feature 1..1161: note = Description of Artificial Sequence: Synthetic coding sequence
  source 1..1161: mol_type = other DNA
atggtggccgagcggagccccgcccggagccccggcagctggctgttccctggcctctggttgctcgttctcagtggtccaggtggattactcagagcacaggaacagccaagttgcagaagggcctttgacctatacttcgtgttggataaatcaggctccgtggccaacaactggatcgagatttacaactttgtgcagcagctggcagagcgctttgtttcgcctgaaatgaggctgtcatttattgttttctcctcacaggccaccattatattgccccttactggggatagaggtaagatctcgaaagggctggaggacctgaagcgcgtgtcgcctgtgggcgaaacctacattcacgagggcctcaagctggcgaatgagcaaatacagaaagcggggggcctgaaaacaagttctattatcattgcactcactgacggcaagctggacggcttggtgccaagttacgccgaaaaagaagccaaaatctcgaggtccttgggggcgagcgtctactgcgtcggtgtcctggattttgagcaggcacagctggaaaggattgcagactccaaggagcaagtgttccccgtgaaagggggatttcaggctttaaaaggaattatcaactcatccaatggcatcgccgcaattattgttattctcgtcctcttgctgctgctaggaatcggactaatgtggtggttttggcccctgtgctgtaaagttgtgataaaggaccctccgcccccccccgcgcctgcccctaaagaggaggaggaggagccgctacccactaagaaatggcccacagtcgatgcaagctactacggaggccggggggttggcggaattaagagaatggaggtccgatggggggataaaggctcaaccgaagaaggagccaggctcgagaaggccaagaatgctgtcgttaagatcccagaggaaactgaggagcctattagacctcgacccccaagacccaagcccacccaccagccaccgcaaacaaaatggtatacacccataaaaggacggcttgacgccttatgggctttactgaggaggcaatatgatcgcgtgtcccttatgcgaccccaggagggagacgaggtgtgtatttgggagtgcatcgagaaagagctcaccgcatag

SEQ ID NO: 179220 - DNA, 1467 bp, synthetic construct
  misc_feature 1..1467: note = Description of Artificial Sequence: Synthetic coding sequence
  source 1..1467: mol_type = other DNA
atggtggccgagcggagccccgcccggagccccggcagctggctgtttccaggcctgtggcttctagtgctgtctggcccaggtggcttgttacgcgcacaggaacagccatcatgtcgccgggcctttgatctttactttgtgttggataagagtgggagtgtagcgaacaattggatcgagatctacaattttgtacaacaattagcggaaagattcgtctctcctgagatgaggttgtcctttattgtgttttcaagtcaggctaccattatactgcctctaaccggggatcgtggcaagataagcaaagggttagaagatctaaaacgggtgtcacccgttggtgagacatatattcacgaaggcctaaaactagccaatgagcaaattcagaaggctggtggactgaaaacttcttcaatcatcattgcgctgaccgacggcaagctggacggcctggtgccgtcctacgccgaaaaggaagctaagatatcccgctcactaggagcttccgtttactgtgtgggagtcctggactttgagcaggcccagctcgagagaattgccgactccaaggagcaggtgttccctgtgaagggcggctttcaggctttgaaaggcatcatcaactccattctggcgcagagttgcacggagattctggaactgcagccttcgagcgtatgcgttggtgaggagttccagatcgtactgtccggcagaggcttcatgctgggaagccggaatggtagcgtcttgtgcacttataccgtgaatgaaacctacacaacctccgtgaaaccggtgagtgttcagctaaattccatgctctgccccgcgccaattctgaacaaggcaggcgaaacactggatgtgtccgtcagttttaacgggggcaagagcgttatttccggttcactgatcgttaccgcaacggaatgttcaaacggcattgctgcaattatcgttatcctggtgctgctgctgctcctgggcattggactgatgtggtggttttggcctctctgttgcaaggttgtgatcaaggacccaccgcccccgccagcaccggcccccaaagaggaggaggaggaaccactgccaacaaagaaatggcccactgtcgatgcgtcatactatggtggccgcggcgtgggcggaattaaacgtatggaggtgcgctggggcgacaaggggtctacagaagaaggtgcaagattggagaaggccaagaacgcggtggtcaaaatccccgaggagaccgaagaaccaattcgaccacggccaccaaggcctaagcccacccatcaaccccctcaaacgaaatggtacacgccaatcaagggacgcctagatgcactctgggcccttctccgtagacaatatgacagagtttcactaatgcgaccacaggagggggatgagggccggtgcatcaacttttcgcgggttccatcacagtag

SEQ ID NO: 179221 - DNA, 2217 bp, synthetic construct
  misc_feature 1..2217: note = Description of Artificial Sequence: Synthetic coding sequence
  source 1..2217: mol_type = other DNA
atgcggggccccagcggcgccctgtggctgctgctggccctgcggactgtcctcggcggcatggaggtacggtggtgtgccacgtccgatcccgaacaacacaagtgcggaaacatgtccgaagcgttcagagaggcgggaattcagccttctctcctgtgcgtacgtggaacttcagctgaccattgtgtccaattgatcgcagcccaggaagcggatgctatcacactggatgggggagcaatctacgaggccggtaaagagcacggactgaagcccgtcgtgggcgaagtatacgaccaagaggttgggacctcttattatgctgtggcagtggtgcgacgctcttcgcatgtcaccatagacacgctgaaaggagtcaagtcatgtcatacaggcataaataggactgtgggctggaacgtgccagtcggctacctggtggaatcgggtagattgagtgtaatgggctgcgacgtcctaaaggcagtgagtgactatttcggggggagctgcgtgcctggagccggggagacgtcgtactctgagtcactttgccgcctgtgtagaggcgacagctccggcgaaggcgtatgtgacaaatcccctctcgaaagatactacgattacagtggcgcctttcggtgtctggccgaaggcgccggtgatgtagcattcgtcaagcactccacagtgctggaaaatacagacgggaaaactcttccttcttgggggcaggccctgctcagccaggacttcgaattactttgtagggacggtagccgagcagatgtcacagaatggagacaatgtcacctggcacgggtgcctgcccacgctgtggtcgtaagagctgatacggatggaggcctgatcttccgtctgttgaatgaaggccagaggctgttctcacacgaaggttctagctttcaaatgttttcgagcgaggcttatggtcaaaaggatctgctgtttaaagattctacgagcgagttagtgcccatagcgacccagacctacgaagcttggctaggccacgaatacttgcacgccatgaagggcctattatgcgaccccaacaggctgcctccctacctcaggtggtgcgtgctgagcaccccagagatccagaagtgcggagatatggccgttgcctttcgcaggcagcgacttaaacccgagatccagtgtgtctcagctaagagcccacagcactgtatggaacggatccaggctgagcaagtagacgctgttaccttaagtggtgaagatatctatactgcgggtaaaacctacggattggtgcccgccgcaggcgagcactacgctccggaagattctagcaattcctattacgtggtggcagtcgtgcgcagagattcaagccatgcattcacgctcgatgaactgcggggaaaacggagctgtcacgctggatttggctctcctgcgggatgggatgtgccagtgggcgctcttatccaacgaggctttatccgacctaaagactgcgatgtacttacagcagtctccgaatttttcaatgcatcttgcgtgccagttaataatcctaaaaattatccttcttctctgtgtgccttatgcgtaggggatgagcagggcagaaacaagtgcgtcgggaatagtcaggagagatactatggctatcggggggcattcagatgtctcgtagaaaacgcgggggacgtcgctttcgtgcggcatactacggtctttgacaacactaatggacacaattcagagccttgggccgctgagctgaggagcgaggactacgagctgctgtgccccaacggagccagagctgaagtatcacaattcgctgcgtgcaacctagctcagattcccccccacgccgtgatggttcgccctgatactaatatattcacagtgtatggtttactggataaggcgcaagacttgtttggcgacgaccacaacaagaatggctttaagatgttcgattctagtaattaccatggccaagaccttcttttcaaagacgcgacagtgcgcgctgttcccgtcggggaaaagaccacctatcgcgggtggctgggcctggattacgttgcggctttggaaggtatgagctcccagcagtgtagcggagcggccgcgccagcacctggagctccactgctgcctttattgttaccggcccttgccgccagactcctccccccagcactttag

SEQ ID NO: 179222 - DNA, 909 bp, synthetic construct
  misc_feature 1..909: note = Description of Artificial Sequence: Synthetic coding sequence
  source 1..909: mol_type = other DNA
atgcggggccccagcggcgccctgtggctgctgctggccctgcggaccgttttgggcggcatggaagtgcgatggtgtgctacaagcgaccccgagcagcacaagtgcggcaatatgtccgaggcatttagagaagctggtatccagccatctctcctttgtgttcgaggaaccagtgccgaccactgtgtgcaactgatcgctgcccaagaggcagatgccattacattggatgggggggctatttacgaggccggtaaagagcatggcctgaagccagttgttggagaggtgtacgaccaggaggtcgggacgtcttattatgccgtcgcagtagtgcgaagaagttcccacgttaccatcgatacccttaagggcgtcaagagctgtcacacgggcattaaccgcacagtgggatggaacgtcccagtgggctatttggtcgagtccggcagactgtccgtcatgggatgcgacgtgctgaaggccgtgagtgattacttcggcgggagttgcgtcccaggcgctggcgaaactagttactctgaatccctctgtaggttgtgtcggggggacagctcaggagagggggtctgcgacaagagtcccctggagcggtattatgactatagtggcgcctttcggtgcctcgctgagggtgccggagatgttgcatttgtcaaacatagcacggtactggagaacaccgacgagagcccgtcacggcgccaaacctggaccaggagcgaagaagaggagggcgagtgcccagctcacgaagaggcgagaaggacgatgagatcatctgccgggcaggcatggaaatgggctcctgtacaccgcccgcaagacgagagcgataagggtgagttcgggaaaagagccaaaagccgggacatgctgggttag

SEQ ID NO: 179223 - DNA, 1395 bp, synthetic construct
  misc_feature 1..1395: note = Description of Artificial Sequence: Synthetic coding sequence
  source 1..1395: mol_type = other DNA
atggacttccagcaccggcccggcggcaagaccggcagcggcggcgtggcaagctcatcagagagtaatagagaccgccgggagcgtctccgtcagctggctcttgagacaatagacatcaataaagacccctatttcatgaaaaaccatctgggcagttatgagtgtaagctttgcctcacactgcataataacgagggatcctatctggcccatacccagggaaagaagcatcagactaacctggcgcggagggccgcgaaggaagcaaaggaagctccagcccagcccgccccagaaaaggtcaaagtcgaagtgaaaaaatttgtcaagatcggacgtcctggctataaggtcactaagcagagggacagtgaaatggggcaacaaagtctgctcttccagatcgactacccagagatcgccgaggggatcatgcctcgacacagatttatgtccgcctacgagcagagaatagagccacctgatcggagatggcagtacctcctcatggcagccgagccctatgagactattgcgtttaaggtgcccagtcgagagatcgacaaggctgagggcaaattctggacccactggaatcgggagacaaagcagtttttcctgcagtttcatttcaaaatggagaaaccacccgcccctcctagcctgcccgctggcccccctggagtgaaaagacctccacctcctctgatgaatggtctaccgccgcgccccccactgccagagtccctccctccgccgccacccgggggtctcccactgccgccaatgcctcccaccggtcccgcgccctcaggccctccaggccctcctcagctcccccccccggcaccaggcgttcacccccccgcacccgtagtccatccaccggccagcggcgtccacccacccgcccctggcgtgcaccccccagcacctggtgtacacccccctgcacccggagtccatcccccaaccagcggcgttcacccaccggctcctggggtgcatcctccagcgcccggagtgcacccaccagcccctggtgtgcatccacctgccccgggtgtccaccctccagcacccggagtccatcctccaccatcagcaggcgtgcatccccaggccccgggagttcaccctgctgcaccagccgtgcatccacaggcaccaggcgtgcacccccccgcaccaggtatgcaccctcaggccccgggtgtccacccccagccgccaggggtgcacccgagcgctcccggtgtgcaccctcaaccaccaggagtgcatccatcaaatcctggggtccatcccccaacccctatgcctcccatgctccgcccaccgcttccatctgaaggcccgggtaacatcccccccccgcccccaacaaactag

SEQ ID NO: 179224 - DNA, 1437 bp, synthetic construct
  misc_feature 1..1437: note = Description of Artificial Sequence: Synthetic coding sequence
  source 1..1437: mol_type = other DNA
atgctgggcagcctgggcctgtgggccctgctgcccaccgccgtggaggctccacccaacaggcgcacgtgtgtgttcttcgaagcacctggcgtgcgcggcagcactaagacccttggggagctgctcgacacaggtactgaacttccccgcgccatcaggtgcttgtacagcagatgttgtttcgggatctggaatcttacccaagaccgagcgcaggtcgaaatgcaaggctgtcgggattcagatgagcctgggtgtgaatccttgcattgtgacccatcccctcgcgcacatccatctcctgggagcaccctgtttacgtgttcctgtggtacagatttctgtaacgcaaactatagccatttaccacccccagggtctcctggaaccccgggttcccaaggccctcaggccgcaccaggcgagtctatttggatggcacttgtgttgctaggcctgttcctgctgctattactgctcctgggaagtattatcctggcattacttcaacgcaaaaactatcgagttcggggggagccggtccccgagccacgcccagattctggtagggactggtccgtggagctccaagaactcccagagctgtgcttcagccaggtgattagagagggcggccatgccgttgtgtgggcggggcagcttcagggaaaattagtggccattaaagcctttcccccgcgaagcgttgctcaattccaggcggagcgcgctctctacgagctgccaggactccagcacgatcacattgtccggttcataacagcatcccgcggaggccctggaaggctcctgtccgggcctctgttagtgctcgagctccaccctaaggggtcactgtgtcattacctgacacaatatacatcagactggggaagctctcttcggatggccctgtccctcgcgcagggattggcttttttgcacgaagagagatggcagaacggacagtacaagccaggcattgctcaccgggacttgtcttcccagaatgtgctcatcagagaggacggctcatgtgccatcggcgatttgggtttggcgttggtgctgcccggtcttactcaacccccggcatggaccccgacacagcctcagggaccagcggcaatcatggaagaccctgacggactacgggagctcttagaggactgctgggatgctgacccagaagcccggctgaccgccgaatgcgtgcagcaacggttagccgccctggcacacccccaggagagccacccctttcctgaatcttgtcccagagggtgcccgccgctgtgtccagaagactgtacctcaatccctgcccccactatccttccatgccgtccccaaagatccgcttgccattttagtgtgcagcaaggaccttgttcacgtaacccacagcctgcctgcacgctctcacctgtctag

SEQ ID NO: 179225 - DNA, 1437 bp, synthetic construct
  misc_feature 1..1437: note = Description of Artificial Sequence: Synthetic coding sequence
  source 1..1437: mol_type = other DNA
atgctgggcagcctgggcctgtgggccctgctgcccaccgccgtggaggcgcctccaaataggcggacctgtgtgttctttgaggcacccggcgttcgggggagtacgaagactttaggagagttacttgacaccggcactgaactgccccgtgcaatcaggtgcctctatagtaggtgttgctttggcatttggaatcttacccaagatcgcgcccaagtggaaatgcagggttgtcgggatagtgacgaaccgggttgcgaatcccttcactgtgacccctcccccagggctcacccgtcaccgggcagcacactcttcacatgcagctgcggcacagatttctgcaacgcaaactattctcacttgcctccacccggcagcccaggaacaccgggcagtcaaggaccccaggcagctccaggtgagagcatctggatggctttggtacttttgggcctgttcctcctgcttcttctgctcttgggaagcatcattctggctctattgcagcgcaagaattatcgggtcaggggggagccagtgccagagccaagaccagattccggacgcgactggtccgtggaacttcaggaactgcccgagctgtgtttcagtcaagtcattagggaaggcggacatgccgtcgtttgggcaggacagctgcaagggaagttagtcgccatcaaagccttccccccccgttccgtggcacagttccaggctgaacgtgcactttatgagcttcctggtttgcaacatgatcatatcgtccgctttattaccgcctcccggggagggcccggcagacttttgtctggtccccttctggtgctggagctgcacccaaagggctctctatgccactacctgacacagtacacttctgactgggggtcctcattaagaatggcactgtcgcttgctcagggtctggcgtttcttcatgaagaacgatggcagaacgggcagtataaaccaggtatcgctcatagagacctgtcatcccagaatgtcctgatcagggaggacggcagctgcgccattggcgatctgggcctggctctggtgctgccaggcctgactcagccaccagcctggactccgacacagccccagggcccagctgcaattatggaggccggtacacaaaggtacatggccccagagttactcgacaagaccttggatcttcaggattgggggatggctctccgtcgggcagatatctactcgctggccttgctgctgtgggaaatcttatctcgttgccctgacctgaggcccgcagtccatcacccctccaactggcccatgcggcagaattgggcaatcccacttccattaatgtcatatggtccatggcaatgccgccgcggaggcgtgcctaccagtcatcctcctggtgccgcacttccgcagactctcatggggtag

SEQ ID NO: 179226 - DNA, 1722 bp, synthetic construct
  misc_feature 1..1722: note = Description of Artificial Sequence: Synthetic coding sequence
  source 1..1722: mol_type = other DNA
atgctgggcagcctgggcctgtgggccctgctgcccaccgccgtggaagcccccccgaaccgacggacatgcgtgtttttcgaggccccaggcgtgcgcggctccacaaaaacacttggcgaactgctcgacactggcacagagcttcctcgtgcaatccggtgtttatactccaggtgttgtttcggaatctggaatcttacgcaggaccgcgcacaggtggaaatgcagggatgtagggattcagacgaacccggctgcgaatccttgcactgcgacccttctcctagagcccacccgagcccaggcagtactctgtttacttgttcgtgcggtactgacttttgcaatgcaaactacagccacttacctcctcctggcagtccagggacccctggcagccaggggcctcaagccgcacctggggagtctatttggatggctcttgtgttgctagggctgttcttgctgctgctgctgctgctcgggagtatcatcctcgccctgcttcagcgtaagaattacagagtgagaggggaacccgtacccgaaccgagaccagactctggacgcgactggtccgtggagctgcaggagttgcccgaactgtgcttctcacaggtcattcgcgagggggggcatgccgtggtgtgggctggccagcttcaaggaaagctggtggccatcaaggccttccctccacgatctgttgcccaattccaggcagagcgggccctatatgaactccccggactgcagcatgaccatattgttaggttcatcacagcaagccgtggcggtccgggacgtttgttgagtggaccactgctcgtgctggagttacaccctaaaggctcactctgccactacctgacccaatataccagcgattgggggtccagcctgagaatggccctcagcctggcacaaggactggcttttctgcacgaggaacggtggcagaacggtcagtataagccagggatagctcacagggatctgtcatcccagaacgtcctgatcagggaggacggctcttgcgccataggggacctgggtctcgctttggtgctcccaggcctcactcaaccacccgcctggacaccaacccaaccacaggggccagcagccatcatggaggcgggcactcagagatacatggcccccgagctgttggataaaacccttgatctccaggactgggggatggccctccggagggccgacatctactctctggccctcttgctgtgggagatcctgagtcgttgtcctgacctgagaccagactcatcacctcccccatttcagctcgcctatgaagctgaacttgggaatactccgaccagcgacgaactctgggctctggctgtgcaggagcgccgacgcccctatataccctcaacctggaggtgcttcgccacggaccctgacggcttgcgcgagcttttggaagactgttgggacgctgacccagaagcaaggctaactgctgagtgcgtgcaacaaagactcgcagctctagcccatccccaagagtcccaccccttccctgaatcatgcccacgaggatgtccacccctttgccccgaggactgcaccagcattccagcaccaacgattctgccttgcaggcctcagagatccgcgtgtcatttttccgtccagcagggtccatgctcccggaatcctcagcccgcgtgcacactcagtccggtgtag

SEQ ID NO: 179227 - DNA, 1347 bp, synthetic construct
  misc_feature 1..1347: note = Description of Artificial Sequence: Synthetic coding sequence
  source 1..1347: mol_type = other DNA
atgaagggcttcatcgacgacgccaactacagcgtgggcctgctggacgaaggtacaaatctcgggaacgtcatcgacaattacgtttatgagcacactctcaccggcaagaacgctttttttgttggtgacctgggaaaaatagtaaaaaaacatagtcagtggcagaatgtcgtagcccaaatcaagccattttacacggtgaagtgcaactcagcgcctgctgtgcttgagatactcgccgcgctgggcactggttttgcctgtagctcaaagaatgagatggccctggtacaggaactgggggtgcctcctgagaacataatctatatttcaccttgtaagcaggtaagccagattaaatacgccgccaaagtaggcgtaaacattctgacctgcgacaatgaaattgagctgaagaaaatcgccaggaatcaccctaatgcgaaggtgttattgcacatcgctacagaggacaacatcgggggagaggagggaaacatgaagtttggcaccacccttaagaattgcaggcatctgctggagtgtgcgaaggagctcgatgtgcaaatcatcggagtgaagtttcacgtgtccagtgcctgtaaggagtcccaggtgtatgtccatgcactgtcggacgctcggtgtgtcttcgacatggctggcgagataggttttaccatgaatatgctggacatagggggtggttttaccggtaccgaatttcagttagaggaagttaaccatgtgattagcccgctgctcgacatctattttccagaagggtctggggtaaagataataagtgagccaggatcttattacgtgtcatccgctttcacgcttgcggtaaatatcatcgcaaagaaggttgttgagaatgacaaattcccctcgggcgtggagaagactgggagtgacgaacccgcattcatgtactatatgaacgacggcgtctatggtagttttgcatcaaaactgtccgaggacctaaacactattcctgaggtgcataagaagtataaggaggacgaacccttgttcacttcatccctttggggaccatcctgcgacgagcttgaccaaatagtcgaatcctgcctcctgcctgaactgaacgtgggggactggctaatttttgataacatgggggccgattctttccatgagcccagcgctttcaatgatttccagcggcccgccatctattatatgatgtccttctccgactggtatgaaatgcaagacgctgggatcacgtccgacagcatgatgaagaattttttttttgtgccaagctgcatacaattgagccaggaggactctttctccgcagaggcttag

SEQ ID NO: 179228 - DNA, 1347 bp, synthetic construct
  misc_feature 1..1347: note = Description of Artificial Sequence: Synthetic coding sequence
  source 1..1347: mol_type = other DNA
atgaagggcttcatcgacgacgccaactacagcgtgggcctgctggatgagggtaccaatctgggcaatgtgattgataactacgtgtatgagcacactcttactgggaagaacgcgttcttcgtgggagacctcggcaagattgttaagaagcactcacagtggcagaacgtggtggcccagatcaagccattttatactgtgaaatgtaacagcgcaccggcagtgctcgagattttggcagctcttgggactggcttcgcttgttccagtaagaatgagatggccttggtccaggaattgggcgtccctccagagaatatcatctacatttcgccttgcaagcaggtgtctcagattaaatacgcagctaaggtcggagttaacatactgacttgcgataacgagatcgaactcaagaagattgctcgtaaccatcccaatgccaaagtgttgctgcacattgctacagaggataatattggcggagaagaagggaatatgaagttcgggacgaccttgaaaaattgcagacacctgttggaatgcgctaaagaactggacgtgcagattatcggggtgaagtttcatgtgagctctgcatgtaaggagtcacaggtgtacgttcatgccctttcagacgctcggtgcgtgttcgatatggccggggagatcggctttactatgaacatgcttgatatcggaggtggcttcaccgggactgaattccagctggaagaggtcaatcacgtgatttctccattactcgatatctactttccagaggggtcgggtgtgaagattattagtgaaccaggctcctactatgtgtcgtccgctttcacactggcagtcaacattatagctaaaaaggtcgtggaaaatgataaatttccttccggcgtagagaaaacggggtccgacgagcctgcatttatgtattatatgaacgacggtgtttatgggtcattcgccagcaaactcagcgaagacctgaatacaatcccagaagttcacaagaagtacaaggaggatgaaccccttttcacaagctcactgtggggtccatcttgcgatgaactcgaccagatcgtggaatcatgcctgcttcccgagctgaacgttggagattggctgattttcgacaatatgggagctgattcattccacgagcccagtgccttcaatgacttccagcgcccggccatctactatatgatgagcttctctgactggtacgaaatgcaggatgccggaatcacaagcgattcaatgatgaaaaacttcttctttgtcccatcctgtatccagttgagtcaggaggattccttttctgccgaggcctag

SEQ ID NO: 179229 - DNA, 102 bp, synthetic construct
  misc_feature 1..102: note = Description of Artificial Sequence: Synthetic coding sequence
  source 1..102: mol_type = other DNA
atgaagggcttcatcgacgacgccaactacagcgtgggcctgctggacgaaggtactaacctgggaaatgtgattgacaactacgtgtatgaacatacatag

SEQ ID NO: 179230 - DNA, 294 bp, synthetic construct
  misc_feature 1..294: note = Description of Artificial Sequence: Synthetic coding sequence
  source 1..294: mol_type = other DNA
atgaagggcttcatcgacgacgccaactacagcgtgggcctgctggacgaggggacaaatctcggaaacgtgattgataattatgtctatgaacataccctgaccggcaagaatgcctttttcgtgggggaccttggcaagattgttaagaagcactctcagtggcagaacgtggtggcgcagataaagcctttctatactgtcaaatgtaattccgccccagccgtgctcgagatactggcggccttaggcactggattcgcttgttcctccaaaaatgagatggccttatag

SEQ ID NO: 179231 - DNA, 780 bp, synthetic construct
  misc_feature 1..780: note = Description of Artificial Sequence: Synthetic coding sequence
  source 1..780: mol_type = other DNA
atgcggcgggccgtggcctacatggccatcaagatcgaggtgcaggggcatcaaagcttcgctataccctcaggaactttctggctgtggcggagcctcctaagccaggacaaggagcatcccaggtatctgatcccggagctgtgcaaacagttttatcacttaggctgggtaaccgggaccggaggaggcatcagcctcaagcacggcgacgagatttatattgccccttccggtgtgcaaaaagaacgtatacagcctgaagatatgttcgtttgtgatataaacgaaaaagatatttccggacccagcccttccaagaagctgaaaaaatctcagtgtacaccactctttatgaacgcatataccatgagaggcgccggggccgtcattcacacacatagcaaggccgccgtcatggccactctgctgtttcccggccgagaattcaagattacgcaccaggaaatgatcaaggggatcaaaaaatgcacgtccggcggctactaccgatacgacgacatgctcgtagtgcctattatcgaaaacacccccgaggagaaagatctgaaggacagaatggctcacgcgatgaacgagtatcccgactcctgtgcagtgctggtacggaggcacggagtgtatgtatggggagaaacttgggagaaagccaagactatgtgtgaatgttatgactatctgttcgacatagcagtcagtatgaagaaagtgggtctggacccctcacagttacctgtgggggaaaacgggattgtctag

SEQ ID NO: 179232 - DNA, 729 bp, synthetic construct
  misc_feature 1..729: note = Description of Artificial Sequence: Synthetic coding sequence
  source 1..729: mol_type = other DNA
atgagcggctgcgacgcccgggagggcgactgctgcagccggcggtgcggagcgcaggacaaggagcaccccagatatctgatcccagagctgtgcaaacagttttaccacctgggctgggtgaccggcacaggaggcggcataagtctcaagcacggcgacgaaatttatatcgcacctagtggagttcagaaagagagaatccaaccggaagacatgttcgtgtgtgacatcaatgagaaagacatcagcggtcctagtcccagcaagaagcttaagaagagtcagtgcaccccgctgttcatgaatgcatatactatgcgaggggctggggcagtaatccatactcattcaaaagcggccgtgatggcaacattgctttttcctggaagagagttcaagattactcaccaggaaatgattaagggcatcaagaagtgtacctctggagggtactatagatatgatgacatgctcgtggtacctattatcgagaacacgccagaagagaaggacttgaaagaccggatggcccatgccatgaacgagtatccagacagttgcgccgtgcttgtgcggcggcacggggtgtatgtctggggcgaaacttgggagaaggcgaaaacaatgtgcgaatgctatgactatctgtttgacatcgctgtgagtatgaagaaagtgggactggacccttcccagctgcccgtaggggagaatggcatcgtgtag

SEQ ID NO: 179233 - DNA, 234 bp, synthetic construct
  misc_feature 1..234: note = Description of Artificial Sequence: Synthetic coding sequence
  source 1..234: mol_type = other DNA
atgaacctgcggctgtgcgtgcaggccctgctgctgctgtggctgtctctgacggctgtctgtggcgggagtctgatgcctcttccggacgggaatggattggaagatggcaatgtgcgacacctagttcaaccgcgcgggagccgaaatggccccggcccatggcaaggcggccggcggaagtttaggaggcagaggcctcgattgtcgcataaagggcccatgcctttctag

SEQ ID NO: 179234 - DNA, 369 bp, synthetic construct
  misc_feature 1..369: note = Description of Artificial Sequence: Synthetic coding sequence
  source 1..369: mol_type = other DNA
atgagcgccacctggtgcagccccgagggccagggcatgggccagggacctggccgggaggtcggcggcaactcggcggcttctggacctgccagccccatccgagatccctgcctgtctgaagctgggctcaagggacctccatccgcacaccctaggagactgtgtctgctccatcgcctggtctgcttttccggtggactgaccagcatccagctgagcccgagaacctgttgcagccaccaatgggctcagctgttctctcccgcctgcttcccccaatggagggccccggggtgttctctggacgacagccggtcactgacgcggatcagacccgtgcacctgccaggcccgtcacttgactag

SEQ ID NO: 179235 - DNA, 369 bp, synthetic construct
  misc_feature 1..369: note = Description of Artificial Sequence: Synthetic coding sequence
  source 1..369: mol_type = other DNA
atgagcgccacctggtgcagccccgagggccagggcatgggccaggggcccgggcgcgaggttggggggaactctgccgcgtcggggcccgcgtcacctattcgggatccctgcctctccgaggcagggcttaaagggccaccttccgctcacccacggaggttatgcctgttgcaccggctggtgtgcttttcgggtggtctgacaagtatccagctgagccccagaacctgctgctcccaccagtgggcacagctgttctctcccgcttgttttccacagtggcgagcgcccggctgttcactagacgactcaagatctctgacaagaatccgacccgtgcacttacccggacctagtcttgattag

SEQ ID NO: 179236 - DNA, 303 bp, synthetic construct
  misc_feature 1..303: note = Description of Artificial Sequence: Synthetic coding sequence
  source 1..303: mol_type = other DNA
atgaagctgctggccgccaccgtgctgctgctgaccatctgcagcttggagggtgctctggtgcggcgacaggccaaagaaccctgcgtggagagcctggtttcccagtactttcaaacggtgaccgactacgggaaggatctgatggaaaaggttaagagtccagagctccaggccgaagcaaaatcatacttcgagaaatccaaggagcagttgacacccttgattaaaaaggcagggacagagctcgtgaatttcttgtcatactttgtggagctaggcacacagccagccacgcaatag

SEQ ID NO: 179237 - DNA, 1191 bp, synthetic construct
  misc_feature 1..1191: note = Description of Artificial Sequence: Synthetic coding sequence
  source 1..1191: mol_type = other DNA
atgttcctgaaggccgtggtgctgaccctggccctggtggccgtggcgggagctcgagcggaggtgtccgccgaccaggtggctaccgtaatgtgggactactttagccagctcagcaacaacgctaaggaggctgtggaacacctgcaaaagtccgaactgacacagcagcttaacgcactattccaggacaagcttggggaagtcaatacatatgcaggagatctgcagaagaagctggtccccttcgcaacagaactacacgaaagactggcgaaggacagcgaaaagctcaaagaggagattggcaaagaactggaggaactgcgggcgcgcttgttaccacacgcaaatgaagtatcacaaaaaatcggtgacaacttaagagagctgcaacagagactggaaccatatgctgaccagctgcgaactcaagtgtctacccaggccgagcagctccggcgccaacttacgccttatgcccagcggatggaacgtgtactgcgagaaaatgccgattccctgcaggcaagcctgagaccgcatgcggacgagctgaaagccaaaatcgaccaaaacgtggaggagctgaaaggtagactgaccccgtacgctgatgagttcaaagttaagatagatcaaacagtcgaagaattgcgccggagtctcgctccatatgctcaggatactcaggagaaactgaaccaccagctagagggccttacatttcagatgaagaagaacgctgaggaactgaaagcgagaatctctgctagtgctgaggagttgcgccagaggcttgcaccactagcagaagacgtgcggggcaatctgcggggtaacactgaagggttacagaagtccttagctgagttaggaggtcatcttgatcagcaggttgaagaattcagacgtagagtcgaaccctacggcgagaattttaataaggcgctggtacagcaaatggagcagctgcgacaaaagctcggaccccacgccggcgatgttgaagggcatttgagcttcctcgagaaagatctgagagataaggtcaacagcttcttctctaccttcaaggagaaggaatctcaggataaaaccctgtctctgcctgagctggagcagcagcaagaacaacagcaggaacaacagcaagaacaggttcagatgctagcccccttggagtcttag

SEQ ID NO: 179238 - DNA, 1281 bp, synthetic construct
  misc_feature 1..1281: note = Description of Artificial Sequence: Synthetic coding sequence
  source 1..1281: mol_type = other DNA
atggccatcgcccagctggccaccgagtacgtgttcagcgacttcctgctcaaagagccgacagagccgaagttcaagggtctgaggctggagttggccgtggataaaatggtcacctgtatcgcagtcggcttgccattattgttaataagtttggcgtttgcgcaagagatatctatcgggactcagatctcttgtttctcgcccagctccttctcttggaggcaagccgccttcgtcgacagttattgctgggcggcagttcagcagaagaattccctgcaaagtgagtctggcaatcttcccctttggctccataagtttttcccctacatcttgctcctgttcgcaatcctgctatacctcccgcctctcttctggcgcttcgctgctgcaccccatatctgttcggatcttaagttcatcatggaggagctcgacaaagtatataatcgcgctatcaaagcagcaaagagtgccagagatctagatatgagggacggggcttgttccgtgccaggcgttacagagaatctggggcaatcactctgggaggtttccgagagccacttcaaatacccaattgtcgagcaatatctgaaaactaaaaagaacagcaataatcttataattaagtatatctcttgccgcttgctcacgctcatcataattctccttgcttgcatttatttgggctattattttagcttatcatcattgagtgatgagttcgtatgtagtataaagtcagggattctccggaatgactcgacagtgcccgatcagtttcagtgcaaattgattgcagtgggaattttccaactgctcagcgtgattaacctggttgtatatgtgcttcttgcgcccgtggttgtttataccctcttcgtccccttcagacagaagacggacgttctgaaagtttacgagatactacccacattcgatgtcctgcatttcaagagcgaaggatataacgacctgtccttatataacttattcttagaggaaaacattagcgaggtgaagtcctacaaatgtttgaaggtgctggaaaatatcaagtcgagcggtcaggggatagaccctatgctgctcctgacgaacctggggatgattaaaatggatgtcgttgacggaaaaaccccaatgagcgcagagatgcgtgaagaacaaggcaaccagacagctgaactgcaagggatgaacattgactcagagacaaaagccaacaacggtgagaagaacgcaagacagagactcctggatagcagctgctag

SEQ ID NO: 179239 - DNA, 489 bp, synthetic construct
  misc_feature 1..489: note = Description of Artificial Sequence: Synthetic coding sequence
  source 1..489: mol_type = other DNA
atggccagcatggccgccgtgctgacctgggccctggccctgctgagcgccttttccgccacccaggcccggaaaggcttctgggattacttctcccagacatctggagacaaagggcgggtagagcaaattcatcagcagaaaatggctcgtgaacctgcgacactgaaggactcgcttgaacaagatttgaataacatgaacaaatttttggagaagttgcgcccgttaagcggaagcgaagcgccccgtctgcctcaagatccagtgggaatgaggagacagcttcaggaggagcttgaagaagtcaaggcccgcctgcaaccctacatggcagaggcacacgagcttgtgggttggaatctggagggcctgcgccagcagctcaaaccttacacaatggacctgatggaacaggttgccctgagggtccaagaactgcaggagcagttgcgggtcgtgggtgaagacactaaggcgcaactttag

SEQ ID NO: 179240 - DNA, 1101 bp, synthetic construct
  misc_feature 1..1101: note = Description of Artificial Sequence: Synthetic coding sequence
  source 1..1101: mol_type = other DNA
atggccagcatggccgccgtgctgacctgggccctggccctgctgtccgctttcagtgctacacaggccaggaaaggattctgggattatttttcccaaacgtctggagacaaagggcgggtggagcagatccaccagcaaaaaatggctcgggagcccgcaactctgaaagactctctggaacaggacctcaacaacatgaacaagtttctcgaaaaactcaggccactgagcgggtccgaagcgcctagactgccacaagacccagtaggcatgagacgtcagctgcaggaagagctagaggaagtaaaggctcgcttgcaaccctacatggccgaggctcacgagctcgtcggttggaatctggaaggattacgccagcagctgaaaccttataccatggacttaatggaacaggtggctctccgcgtccaggaactgcaagaacagttgagggtagttggggaagacaccaaagcgcagttgctgggtggagttgatgaggcttgggccctccttcaagggttgcaatctcgcgtggtacaccacaccggccgatttaaggagctgtttcacccgtacgccgagtccctggtcagtggcatcggccgccatgtgcaggaactgcatagatccgtagcacctcatgctcccgcttctccggcccggctgtctcggtgcgtgcaggtgcttagccggaagttgactctgaaggccaaggcgttgcacgctcggatccagcagaacttagaccagttacgggaggagctaagcagggccttcgcaggcacaggcacagaagagggcgccggacccgatccccagatgctatccgaagaagttagacagcgattgcaagcattccggcaggacacgtacctccaaatcgctgccttcactcgggctattgatcaagagactgaagaggtgcagcagcagctcgccccgcccccacccggacacagcgctttcgcgccagaattccagcagacagatagtgggaaggtgttgtctaaactgcaagctaggctggacgacctgtgggaagacatcacacacagcctgcacgatcagggtcacagccatctcggcgatccttag

SEQ ID NO: 179241 - DNA, 1074 bp, synthetic construct
  misc_feature 1..1074: note = Description of Artificial Sequence: Synthetic coding sequence
  source 1..1074: mol_type = other DNA
atgaacccccagatccggaaccccatggagcggatgtaccgggacaccttctatgacaactttgagaatgagcccatcctctacggtaggtcatacacctggctgtgctatgaggtaaaaatcaaacggggtcgaagcaacctgctctgggataccggggtgtttcgtgggcaggtttacttcaaaccgcagtaccacgccgaaatgtgcttcctttcttggttttgtggaaaccaactccccgcctataagtgtttccagattacctggtttgtctcttggacgccgtgccccgattgcgtggccaaactggccgaattcctgagcgaacacccaaacgttactctaactatcagcgcagctagactctactattactgggaaagggactatcggagggcactttgtagactgtcacaggccggtgccagggttactattatggactatgaggaatttgcttactgctgggaaaattttgtgtacaatgaggggcagcaattcatgccgtggtacaaattcgacgagaactacgcttttttgcacagaactctcaaagagatcctgcgctaccttatggaccccgatacgttcacatttaatttcaataacgacccgctcgtgttgagaaggcgtcagacctatctatgttacgaggtagaaagactagacaatgggacatgggtgctgatggaccaacacatgggcttcctgtgcaatgagcttgaccccgcccaaatttacagggtaacgtggtttatctcatggtcaccatgtttctcctggggatgtgccggcgaggtcagagcgtttctacaggagaatacccacgtaaggttacgaatttttgcagccaggatatatgactacgatcctctctacaaggaagctctccaaatgctgcgggacgcaggcgcccaggtatccatcatgacttacgacgagtttgaatattgctgggacacgttcgtttacaggcagggttgtccgtttcagccctgggacggcctggaggagcactctcaggctctgtcgggtaggttacgcgccatactgcagaaccagggaaactag

SEQ ID NO: 179242 - DNA, 306 bp, synthetic construct
  misc_feature 1..306: note = Description of Artificial Sequence: Synthetic coding sequence
  source 1..306: mol_type = other DNA
atgaagccccacttccggaacaccgtggagcggatgtaccgggacacattcagctataacttctacaaccggcccatcttaagcagaagaaacacagtttggctgtgttacgaagtgaaaactaaggggccgtctagaccccgactggatgccaaaatttttagggggcaggtgcctcggagctttatcagagcccctttccaggtgctgagctcacccttcggtcagtgcgctccacctcatggaaccgcccaagtccagtggcccccacagctgaccgcgggaagagagcagggtagaccttag

SEQ ID NO: 179243 - DNA, 381 bp, synthetic construct
  misc_feature 1..381: note = Description of Artificial Sequence: Synthetic coding sequence
  source 1..381: mol_type = other DNA
atggccagcgccagcacccagcccgccgccctgagcgccgagcaggccaaggtcgtactcgccgaagtgatacaagcctttagtgcacccgaaaacgccgtccgcatggatgaagctcgcgacaacgcatgtaacgatatgggtaagatgctgcaattcgtgctcccagtggccactcagatccagcaggaggtgatcaaggcatacggcttctcctgcgacggggagggggtgctcaagtttgccagattggtgaagagctacgaagcccaagaccccgaaatcgcaagcttgtctggaaaactaaaagctctcttcctgccaccgatgaccctccctccacacggacctgctgcaggtggatcggtcgccgcctcctag

SEQ ID NO: 179244 - DNA, 675 bp, synthetic construct
  misc_feature 1..675: note = Description of Artificial Sequence: Synthetic coding sequence
  source 1..675: mol_type = other DNA
atggcccagaaggaggaggccgccgtggccaccgaggccgccagccaaaacggcgaggatctagaaaatttggacgatcctgaaaagttgaaggaactgatagaactgccgccctttgagattgtcaccggggagaggcttcctgccaatttttttaagttccagttcaggaatgtggaatactccagtgggcgcaataaaacattcctgtgctacgtggtggaagcacagggaaagggagggcaagtacaggcctcaaggggatacttggaggatgaacacgccgctgctcacgccgaggaggccttctttaacactatactcccagcgttcgaccccgcccttagatataacgtgacctggtacgtgtcttccagcccctgtgcggcctgcgccgacagaatcattaagacactgtctaaaacaaaaaatctcagactgcttatcctcgtaggacgactgtttatgtgggaagagcccgagatccaggccgctctgaaaaagctgaaagaagctggctgcaagttgagaatcatgaaaccccaagacttcgagtacgtgtggcagaattttgtggagcaggaggagggtgagagcaaggccttccagccctgggaggacatacaggaaaatttcctctattatgaggagaagttagccgacatcctcaagtag

SEQ ID NO: 179245 - DNA, 393 bp, synthetic construct
  misc_feature 1..393: note = Description of Artificial Sequence: Synthetic coding sequence
  source 1..393: mol_type = other DNA
atggcccagaaggaggaggccgccgtggccaccgaggccgccagccaaaatggcgaggacctggagaatctcgatgatcccgagaaactgaaggagctgatagagcttccaccttttgagatagtgaccggggaacggctcccagcaaacttttttaagttccagtttcggaatgtcgagtactcttctggccgaaaattgagttcgacaccctcctgtcagccctccacccaaccttgtggcacaatgtcccctggcatgtgtcccccagcacccgtgcagcgggtccttacagcgctttcgaaaccattagcccgcccaaggacttgcgtatgctcgttttggtgggtggactcctcatgtgggaggtcacgacggtcacgtctgctatag

SEQ ID NO: 179246 - DNA, 600 bp, synthetic construct
  misc_feature 1..600: note = Description of Artificial Sequence: Synthetic coding sequence
  source 1..600: mol_type = other DNA
atggaggccagccccgccagcggcccccggcacctgatggacccccacattttcacttccaatttcaataatggcatcggtcgccataaaacctatctatgttacgaggttgagcggttggataatggtacatcggtgaagatggatcaacatcgggggtttctgcacaatcaggccaagaacctgctgtgtggattttatggtcggcacgcagagcttcgctttcttgacctggtcccctccctgcagttggatcctgcacagatttaccgggttacctggttcatctcatggtccccgtgcttctcctgggggtgtgccggagaggtaagggccttcctgcaagagaacacccatgttcggcttaggattttcgccgcaaggatttatgattacgatcccctgtacaaagaggcactacaaatgctgagagatgccggagcccaagtctctataatgacatatgacgagtttaaacattgttgggatactttcgtggaccaccaaggatgtccttttcagccttgggatggcctggacgaacacagccaagccctgagcggcagactcagggcaatcctccaaaatcaagggaactag

SEQ ID NO: 179247 - DNA, 600 bp, synthetic construct
  misc_feature 1..600: note = Description of Artificial Sequence: Synthetic coding sequence
  source 1..600: mol_type = other DNA
atggaggccagccccgccagcggcccccggcacctgatggacccccacattttcacttcaaacttcaataatggcattggccggcacaaaacatacttgtgctacgaggtggaaagactagacaacggcacttctgtaaaaatggatcagcataggggcttcctccacaatcaagccaagaaccttttatgcggcttttacgggcggcatgccgagttaaggttcctggatctggtccccagcctgcagcttgatcccgctcagatctaccgggtgacgtggtttattagttggagtccatgtttttcttggggttgcgcaggggaagtgcgcgctttcctgcaagaaaatactcatgttcgtctgcgcatttttgcagctaggatttacgactacgaccccctgtacaaggaggcccttcagatgttacgagacgctggtgcccaggtcagcattatgacctacgatgagtttaagcattgttgggatacttttgtggaccatcagggatgccctttccaaccctgggatggactggacgaacattcccaggcactgtcaggacgcctgcgggctatcttgcaaaaccaggggaattag

SEQ ID NO: 179248 - DNA, 1149 bp, synthetic construct
  misc_feature 1..1149: note = Description of Artificial Sequence: Synthetic coding sequence
  source 1..1149: mol_type = other DNA
atgaacccccagatccggaaccccatggagcggatgtaccgggacaccttctacgacaactttgagaacgagccaatactgtacggccgaagctacacgtggctgtgctatgaggtcaaaatcaagcgggggaggtcaaacctgctttgggacacaggagtctttcgcggacaggtatattttaaaccccagtatcacgcggaaatgtgctttctctcgtggttttgtggaaaccagctcccggcctacaagtgtttccagattacatggtttgtatcatggacaccttgcccggattgcgtggccaagctggcagagtttctcagcgagcacccaaacgtgacgttgacgatctcagccgcccgcctctactattattgggagagggattaccgaagagccctatgtcgattgtctcaggccggggcccgagtgacaatcatggattacgaagaatttgcctactgctgggagaacttcgtgtataatgaaggacagcaattcatgccctggtacaaattcgacgagaactacgcgtttcttcacagaaccctgaaagagattttacgttacctcatggaccccgatacatttacctttaactttaacaacgacccactggtgctccgacgaaggcaaacttatctttgttatgaagtggagcgactggacaatgggacctgggtgctcatggaccagcatatgggctttctgtgcaacgaggccaaaaacctgttgtgtggcttctacgggcgccacgcagaactgcgatttttggatctcgtccctagtcttcaattggaccctgcgcagatctacagagtgacatggtttataagttggtctccctgctttagttggggctgtgcaggtgaggttcgagcattcctgcaggaaaatacacacgtgcgtctgaggatttttgccgcccgtatttacgattacgatcctttgtacaaagaagcattgcaaatgttaagagatgctggggcccaggtctctatcatgacctatgatgagttcgaatattgttgggacacctttgtctaccgccagggctgtccgttccagccatgggacggtcttgaagaacacagtcaggccctgtctgggcggctgagagcaatactgcaaaatcagggaaactag

SEQ ID NO: 179249 - DNA, 573 bp, synthetic construct
  misc_feature 1..573: note = Description of Artificial Sequence: Synthetic coding sequence
  source 1..573: mol_type = other DNA
atgaacccccagatccggaaccccatgaaggccatgtaccccggcactttctactttcagtttaagaatctgtgggaggcgaatgatcgtaatgagacatggctctgctttaccgttgaggggataaaacggcgttccgtagtgtcgtggaaaacaggcgtgttcagaaaccaggtggatagcgaaacccattgccacgctgaaaggtgcttcctgagctggttctgcgatgacattctgtccccgaacaccaaatatcaggtaacctggtatacttcttggagtccatgccccgattgcgcgggcgaagttgctgagttcctggcacgccattctaatgtaaaccttaccatctttacagcccgcttatactactttcagtatccgtgttaccaggagggccttagatccctgtcccaggaaggggttgctgtggagattatggactacgaagactttaaatattgttgggagaatttcgtgtataatgataacgagccatttaaaccttggaagggattaaagaccaatttccggttgctcaagagacggttacgtgagtctctgcaatag

SEQ ID NO: 179250 - DNA, 1122 bp, synthetic construct
  misc_feature 1..1122: note = Description of Artificial Sequence: Synthetic coding sequence
  source 1..1122: mol_type = other DNA
atgaagccccacttccggaacaccgtggagcggatgtaccgggacactttcagctataatttttacaatcgacccatcctgagccgcaggaacaccgtgtggctttgctacgaggtaaagacaaaaggcccatctagacctcgtctcgacgccaagatctttagaggacaagtgtatagccagccagaacaccatgctgaaatgtgttttctgagctggttttgcggaaaccaactgccggcctataagtgtttccagataacctggttcgtctcctggacaccctgtcctgattgcgtagctaagctggctgagtttttagctgaacacccaaatgtcaccctcacgatctcagccgctaggctctactactattgggagcgagactaccggcgggcactgtgccggctgtcacaggccggcgcgagagtgaagataatggacgatgaggagtttgcctattgttgggagaacttcgtttattccgagggccagccgttcatgccctggtataagtttgacgacaactacgcttttctgcatagaacccttaaagaaatcctgcggaatcccatggaagccatgtatccccatatattctatttccactttaagaatcttcgtaaggcatacgggcgcaacgagagctggttgtgtttcacaatggaagttgtgaaacaccacagccccgtttcctggaagcgaggggtcttcagaaatcaggtcgacccagaaacgcactgtcacgccgagcgctgtttcctgagctggttttgtgatgatatcctatctccaaacacgaactacgaggtgacctggtataccagctggtccccctgcccagagtgcgctggggaagtggctgaattcctagcccgccatagtaatgttaacctcacaatttttacagctcggctctattacttttgggatacggattaccaggaaggactcaggtcactctcccaggaaggcgctagcgtcgaaattatggggtataaggacttcaagtactgctgggagaactttgtgtataatgacgacgagcccttcaagccctggaaaggactgaaatataactttctgtttctcgactctaaattgcaggaaatacttgagtag

SEQ ID NO: 179251 - DNA, 1155 bp, synthetic construct
  misc_feature 1..1155: note = Description of Artificial Sequence: Synthetic coding sequence
  source 1..1155: mol_type = other DNA
atgaagccccacttccggaacaccgtggagcggatgtaccgggacaccttttcatataacttctacaatcgcccaattttgagccgacgcaatacagtgtggctgtgctatgaagtcaagaccaagggtccctcccgtcccccactcgacgctaagatctttcgaggccaggtttattccgagctcaagtaccaccccgagatgcgattctttcactggttttccaaatggagaaagctgcatcgcgaccaagaatatgaggtgacatggtacatttcctggtccccatgcacgaagtgcaccagagacatggctacatttctggccgaggatcctaaagtgactctgaccatatttgtcgctagactttactacttttgggatcccgattaccaggaggccttacggtccctgtgtcagaaaagggacggccctagagccaccatgaaaatcatgaactatgacgagttccagcactgctggtccaagtttgtttattcacaacgggagctcttcgagccctggaataatctgcccaagtattacatcctgttgcatatcatgttgggggagattttgcgccattcgatggacccaccgaccttcaccttcaactttaacaacgagccttgggttagggggcggcatgagacatatctttgctacgaggtagaacgaatgcataatgatacttgggttctcctaaatcaacggcgagggtttttatgtaaccaggccccccataaacatggtttcctggaaggacgacatgccgaactgtgttttctcgatgtcattcccttctggaagcttgatttggaccaggattatcgcgtgacgtgctttacatcctggtccccatgtttctcttgcgcgcaagagatggctaaatttataagcaagaataagcacgtatcactctgtattttcacagccagaatctacgacgatcaaggacggtgccaggagggcctccgtactcttgccgaagctggagcaaagatctctatcatgacctactccgaattcaagcactgttgggacactttcgtagaccaccagggttgtcctttccaaccctgggacggtctggatgagcattcacaggatctatcaggacgcctacgagcaattttacaaaaccaggagaattag

SEQ ID NO: 179252 - DNA, 1155 bp, synthetic construct
  misc_feature 1..1155: note = Description of Artificial Sequence: Synthetic coding sequence
  source 1..1155: mol_type = other DNA
atgaagccccacttccggaacaccgtggagcggatgtaccgggacaccttctcatacaatttctacaaccgtccaatcctctctaggaggaataccgtctggctctgctatgaggtcaagacgaaaggcccaagcaggccgcctctcgatgccaaaatttttcggggacaggtgtacagcgaactcaagtaccaccccgagatgaggttttttcattggttttccaagtggagaaaactccaccgtgaccaggaatacgaagtaacttggtatatttcctggtccccctgcactaagtgtacccgggatatggcgactttcctggccgaagaccccaaagtcaccctcaccatattcgtcgcaaggctgtattacttctgggatccagattaccaggaggccctccggagcctgtgtcagaagcgcgacggaccccgcgctaccatgaagattatgaattacgacgagtttcaacactgttggtctaaatttgtgtactcacagagagagctttttgagccctggaacaatctgcccaagtactacattctcctgcatattatgttgggtgagatcctacggcactctatggaccccccgacatttactttcaacttcaacaacgagccctgggtacgcggacgccatgagacctatttatgttatgaggttgagcgcatgcacaatgatacatgggttctgctcaaccagcgcagaggtttcctctgcaaccaggccccacacaagcacggctttctggagggccgccatgcagaactctgtttcctcgatgtgattcctttttggaagctggacctagaccaagattaccgcgtgacctgctttacatcttggtcgccttgtttctcctgcgcacaagaaatggctaagttcatatccaagaataagcatgtgagtctctgcatttttacggcaagaatctatgacgaccagggcagatgccaggaaggactgcgaaccttggccgaggcgggtgccaagattagcattatgacgtattctgagttcaaacattgctgggacacttttgtggaccaccagggttgtcccttccaaccctgggacgggctggacgagcacagccaggacctcagcggtagacttcgcgctatactccaaaaccaagagaactag

SEQ ID NO: 179253 - DNA, 549 bp, synthetic construct
  misc_feature 1..549: note = Description of Artificial Sequence: Synthetic coding sequence
  source 1..549: mol_type = other DNA
atggccctgctgaccgccgagaccttccggctgcagttcaacaacaaaagaagactccggaggccgtattaccctcggaaggccctgttatgctaccaactaaccccccagaacgggtctaccccaacaaggggctattttgaaaataaaaagaagtgtcatgcggagatctgcttcataaacgagatcaagtctatgggtttagacgaaactcaatgttatcaggtcacttgctacctgacctggagcccatgttcaagctgtgcatgggagctcgtcgacttcataaaagctcacgaccacctgaacttaggtatctttgcctcgcgactctactatcattggtgcaaaccgcaacagaagggcctgcgcttactgtgtggcagccaggtgcctgtggaggtcatgggatttcccaagtttgcagattgttgggagaatttcgtggaccacgagaaacctctgagcttcaacccttataaaatgctagaggagctggacaagaactcccgcgccataaagcgcagactagaacgcattaagtcttag

SEQ ID NO: 179254 - DNA, 603 bp, synthetic construct
  misc_feature 1..603: note = Description of Artificial Sequence: Synthetic coding sequence
  source 1..603: mol_type = other DNA
atggccctgctgaccgccgagaccttccggctgcagttcaacaacaagagacggttaagaaggccttactacccaaggaaagcattgctgtgttaccagctcacccctcagaatggatccacccccacaaggggctacttcgaaaacaagaaaaaatgtcatgctgagatatgttttatcaatgagattaaaagtatgggcctggatgagactcagtgctatcaggttacatgctatctgacctggtcgccctgcagctcttgtgcctgggaactggtagatttcattaaggctcatgaccacctcaatctcggcatttttgcctccaggctctactatcattggtgtaagccgcagcagaagggactgaggttgctttgcggttcgcaggtccctgtggaagtcatgggcttccctaagttcgcagactgttgggagaatttcgtcgaccatgaaaaacccctgtctttcaatccttacaaaatgctggaggagttggacaaaaactccagggcaatcaagcggagacttgaacgcatcaagatccccggggttagagcccaaggcaggtatatggacatcctctgcgatgctgaggtgtag

SEQ ID NO: 179255 - DNA, 465 bp, synthetic construct
  misc_feature 1..465: note = Description of Artificial Sequence: Synthetic coding sequence
  source 1..465: mol_type = other DNA
atggccctgctgaccgccgagaccttccggctgcagttcaacaacaagcgcagactgcgtagaccctattacccccggaaagccctgctctgttaccaactgaccccccagaatgggtcaacacccacgcgcggttactttgagaacaagaaaaagtgtcacgcagaaatctgcttcataaacgagatcaaaagtatggggctggacgaaacgcaatgctatcaagttacatgttacctcacatggtccccctgctccagctgcgcttgggagctcgtggacttcattaaggcacacgaccacctgaatttgggcattttcgcatctcgtctgtattatcattggtgtaagccacagcaaaaaggactgcgtttgctgtgcggttcgcaagtgcccgtcgaggtcatgggcttccccaatagtaggggcacatgtgccggctccctgcacggatatatcgtttag

SEQ ID NO: 179256 - DNA, 552 bp, synthetic construct
  misc_feature 1..552: note = Description of Artificial Sequence: Synthetic coding sequence
  source 1..552: mol_type = other DNA
atggccctgctgaccgccgagaccttccggctgcagttcaacaacaagagacggttacgcagaccatattatcctcgaaaggcattgctgtgttaccagctcacaccgcaaaacggaagcaccccaactagaggctattttgaaaacaagaagaagtgtcatgccgagatctgcttcatcaatgaaattaagagtatgggcctggacgagacacaatgctaccaggtgacatgctacttgacatggtcaccatgctcatcatgtgcttgggagttggtggatttcatcaaagcccacgatcacctgaatctgggaatttttgcctctaggttatactaccactggtgtaagccccagcagaagggtctgcgacttctctgcggctcacaggtaccagtggaggtaatgggcttcccaaaatttgcggattgctgggagaatttcgtggatcacgagaagcctctatcttttaacccttacaagatgcttgaggagctcgataagaactcaagggccattaaaagacgtctagagcggattaagcagtcgtag

SEQ ID NO: 179257 - DNA, 1104 bp, synthetic construct
  misc_feature 1..1104: note = Description of Artificial Sequence: Synthetic coding sequence
  source 1..1104: mol_type = other DNA
atggagcccatctacgaggagtacctggccaaccacggcaccatcgtgaaaccttattactggctttccttcagcttagattgtagcaactgtccatatcacataagaaccggcgaagaggccagagtgtccttaaccgagttttgccagatcttcggttttccgtatggcacaaccttcccgcagaccaagcacctgaccttctatgagctcaaaacttcttctgggagccttgtgcagaaggggcacgcttcgtcctgtactggcaattacattcacccagagagtatgcttttcgaaatgaatggttaccttgattcagccatctataataacgactcaattagacatataatcttgtactctaataactcgccttgcaatgaagccaatcactgctgtatatctaagatgtacaactttctcatcacctacccaggaatcactctttctatctatttctcccagttgtaccacaccgagatggatttcccagcgtccgcctggaaccgcgaagccctcagaagcctggcttccttgtggccccgcgtagtcctttcacctatcagcgggggaatttggcactcagtcctgcatagctttattagcggtgtctccgggagtcatgtgtttcaacccatcttaactggacgggccctggcagataggcataacgcctatgagatcaacgcaataactggtgtgaagccgtacttcacggacgtcttgctgcagacaaagagaaacccaaacaccaaggcacaggaggcgctggaatcctacccactcaataatgccttcccaggacagtttttccagatgccatctgggcagctgcagccaaatttgcctcccgatctgcgagccccggttgtgttcgtcctcgtgccattaagagacttgccaccaatgcatatggggcagaacccgaacaaacctagaaatatcgttcgccacttaaacatgcctcagatgtcatttcaggaaactaaagatttgggtcgcttaccaactggccgctcagtcgaaattgttgagattactgagcagtttgcaagtagcaaggaggctgatgaaaaaaagaaaaagaagggcaagaagtag

SEQ ID NO: 179258 - DNA, 252 bp, synthetic construct
  misc_feature 1..252: note = Description of Artificial Sequence: Synthetic coding sequence
  source 1..252: mol_type = other DNA
atgcggctgttcctgagcctgcccgtgctggtggtggtgctgagcatcgtcctcgaggggcctgcgcccgctcagggtacgcccgacgtgagcagcgccctggataaactaaaagaatttggcaacacactcgaagacaaagcccgtgagttaatctcaaggatcaagcaatcagagttgtctgccaagatgcgtgagtggttcagcgagactttccagaaggtaaaagaaaagctgaaaatcgacagctag

SEQ ID NO: 179259 - DNA, 306 bp, synthetic construct
  misc_feature 1..306: note = Description of Artificial Sequence: Synthetic coding sequence
  source 1..306: mol_type = other DNA
atgggcacccggctgctgcccgccctgttcctggtgctgctggtgcttggcttcgaagtacagggaacacagcaacctcaacaggatgagatgccttctcccacatttttaacacaggtgaaggagagtctctcttcatactgggagagcgctaagactgccgcacagaacctgtacgaaaagacatacttacccgccgtcgatgagaaacttagagatctctacagtaaaagcacagccgccatgtccacctacacagggattttcaccgatcaggtactctctgtcctgaagggtgaggaatag

SEQ ID NO: 179260 - DNA, 384 bp, synthetic construct
  misc_feature 1..384: note = Description of Artificial Sequence: Synthetic coding sequence
  source 1..384: mol_type = other DNA
atgagcctgctgcggaaccggctgcaggccctgcccgccctgtgcctgtgcgtgctggtgctggcctgcatcggggcatgtcaacctgaggcccaggagggaacactctcccctcctcccaaactgaagatgtcaagatggtcgctggtgcgtggaagaatgaaggaactgctcgagacggtggtcaatagaaccagagacggttggcagtggttttggtctccgtccacttttcgcggttttatgcaaacatattacgacgaccacctccgcgacctggggcccctcacaaaggcatggtttctagaaagtaaagactctttgttgaagaagacccatagtctgtgtcctagactggtttgcggggataaagaccaggggtag

SEQ ID NO: 179261 - DNA, 1101 bp, synthetic construct
  misc_feature 1..1101: note = Description of Artificial Sequence: Synthetic coding sequence
  source 1..1101: mol_type = other DNA
atggccagcatggccgccgtgctgacctgggccctggccctgctgagcgcattcagtgctactcaggctaggaaaggtttctgggattacttttcccagacaagcggcgacaagggacgcgttgagcagatacaccagcaaaagatggcccgggaacctgccaccctcaaggattcgctggaacaggacttaaataatatgaataagtttctcgaaaagctccgcccactctcaggctctgaagcgcccagattaccccaggaccctgtgggaatgcgtcgacagctccaggaagagcttgaggaagtgaaggcccggcttcagccatatatggccgaggcacacgaactggtagggtggaacttagagggcctccggcagcagctgaagccttacacaatggatctcatggagcaggttgctcttagggttcaggagctgcaggagcagctgagagtggtcggtgaggacaccaaggcccagctgctgggtggagtagatgaagcttgggcgctgttgcaggggctgcaatcaagggtagtgcatcataccggcaggtttaaagagctgttccatccatacgctgaatcactggtgagtggcattgggcgccacgtccaggagctacatcggagcgtcgcacctcacgcgcccgcttctccagcccgcctcagtaggtgcgtgcaggtcctctctcgcaaattgaccctgaaagcaaaggccttacacgcacgcatccagcagaacctggatcagctccgcgaggagctcagccgagcgtttgctggaacggggacagaagagggcgcgggacccgatccacagatgctcagcgaagaagtacggcaaagactgcaggccttccggcaggatacatatctccagatcgctgcttttacgagagcaatcgatcaggaaaccgaagaagttcaacagcagctggcaccacccccccctgggcattctgcatttgcgccagagttccagcaaactgattcaggcaaggtgctgagcaagcttcaagcacgccttgatgatctgtgggaagatattacacattcgttgcatgaccagggccactcccacttgggggatccctag

SEQ ID NO: 179262 - DNA, 354 bp, synthetic construct
  misc_feature 1..354: note = Description of Artificial Sequence: Synthetic coding sequence
  source 1..354: mol_type = other DNA
atgggcacctggggcgccccccaccggaccctgccctgccggaacagaggggctatgcagccaagagtgcttctcgtcgtcgcacttctggcactgctggcctctgcccgcgcatcagaagctgaggatgcatcccttctgtccttcatgcagggttatatgaaacacgcaaccaaaactgctaaggatgccctttcaagcgtccaggagtctcaagtcgcacagcaggcaagaggctgggtcacagacggattttcttctctgaaggactattggtcgactgtcaaggacaaattctccgaattttgggatcttgaccccgaggttcgacccacttcggctgttgccgcatag

SEQ ID NO: 179263 - DNA, 168 bp, synthetic construct
  misc_feature 1..168: note = Description of Artificial Sequence: Synthetic coding sequence
  source 1..168: mol_type = other DNA
atgcagccccgggtgctgctggtggtggccctgctggccctgctggccagcgctcgggcttccgaggctgaagatgcctcactcctgtcctttatgcagggatatatgaaacacgcgacaaaaactgcaaaagatgccctgagcagtgtccaggaaagtcaggtatag

SEQ ID NO: 179264 - DNA, 384 bp, synthetic construct
  misc_feature 1..384: note = Description of Artificial Sequence: Synthetic coding sequence
  source 1..384: mol_type = other DNA
atgagcctgctgcggaaccggctgcaggccctgcccgccctgtgcctgtgcgtcctagtgttggcctgcatcggtgcttgccaacccgaagcacaggagggaacgctgagtccccccccgaagctcaaaatgtctaggtggtcgctggtccgggggcgcatgaaggagttactggagaccgtcgtcaatcgcacccgggatggttggcagtggttctggtcaccatcaactttccgtggatttatgcagacctattatgatgaccatctacgggatttaggtccccttaccaaagcttggtttcttgaaagcaaagacagcttgctgaagaagacccattcactctgccccagactggtgtgtggcgataaggaccaaggatag

SEQ ID NO: 179265 - DNA, 384 bp, synthetic construct
  misc_feature 1..384: note = Description of Artificial Sequence: Synthetic coding sequence
  source 1..384: mol_type = other DNA
atgagcctgctgcggaaccggctgcaggccctgcccgccctgtgcctctgtgtgttggtcttagcgtgtatcggggcatgccagccggaagcgcaggaagggaccctgtcacctcctcccaaactcaagatgtcaaggtggagcctcgtccggggccgcatgaaggaattgctggaaaccgtggtgaacagaacaagagacggttggcagtggttttggagccctagcacttttaggggatttatgcagacctattatgacgaccaccttcgcgacctgggacctctgaccaaggcctggttcttggagtccaaggacagccttctgaaaaagacccactcactttgcccccgcctggtgtgtggtgacaaggatcagggctag

SEQ ID NO: 179266 - DNA, 570 bp, synthetic construct
  misc_feature 1..570: note = Description of Artificial Sequence: Synthetic coding sequence
  source 1..570: mol_type = other DNA
atggtgatgctgctgctgctgctgagcgccctggccggcctgttcggagccgccgaaggacaggcatttcatctgggaaaatgcccaaatcctccagtccaagaaaactttgatgtcaacaagtatctgggcaggtggtatgagatagaaaagattccaacaacatttgaaaatggccggtgtatccaggcaaattattcattgatggaaaatggcaaaattaaagtgttaaatcaagaacttagggctgatggtaccgtgaaccaaatagaaggcgaggccactcccgtcaacttaactgaacccgccaagctcgaggtcaaattttcctggttcatgccgtctgcaccctattggattctcgccaccgattatgaaaactacgccctcgtgtattcatgtacatgcataattcaactgttccacgtggactttgcctggatcttggctaggaaccccaatctgccaccagagacagtggattctttaaaaaacattctgacatccaataacatcgatgtgaaaaagatgactgttacagaccaggtgaactgccctaaactcagctag

SEQ ID NO: 179267 - DNA, 450 bp, synthetic construct
  misc_feature 1..450: note = Description of Artificial Sequence: Synthetic coding sequence
  source 1..450: mol_type = other DNA
atggtgatgctgctgctgctgctgagcgccctggccggcctgttcggagcggctgagggccaggcattccacctcggtaaatgccccaatccgcccgtgcaagaaaattttgatgtcaataaatacctcggtcggtggtatgagattgagaagattcccaccacctttgaaaatgggagatgtatccaggccaactatagtcttatggagaacggcaaaatcaaggtcttaaaccaggagttgagagccgacggcaccgttaatcagatcgaaggagaggcgacaccagtgaacctcacagagcctgccaaactcgaggtgaagttcagttggtttatgcctagcgcgccgtactggatcctggcaaccgattacgaaaactacgcactagtatactcctgtacgtgtatcatccaactgtttcacgtggattttgcatggattctgtag

SEQ ID NO: 179268 - DNA, 954 bp, synthetic construct
  misc_feature 1..954: note = Description of Artificial Sequence: Synthetic coding sequence
  source 1..954: mol_type = other DNA
atgaaggtgctgtgggccgccctgctggtgaccttcctggccggctgccaggctaaggtggagcaggctgtcgagaccgagcccgaacctgaactccggcagcagaccgagtggcagagcgggcagcggtgggaactggccttgggcaggttttgggattacctcagatgggtccagactctaagtgaacaggtgcaagaggaactgctgtcatcacaggtaacacaggaactgagggcgcttatggatgagaccatgaaagagctgaaagcttataaaagcgaactagaagagcagctcacccctgtagccgaagagacaagggccagactgtcaaaggaattgcaggctgctcaggctcggttaggcgccgatatggaggatgtgtgtggtcgcctggtccagtatcgcggggaagtgcaggcgatgctggggcaatccacggaggagttgcgtgtgcgtctggccagccatttgaggaagctgcggaaacgtctgctgagggatgccgatgacttgcagaaaaggctagcagtgtaccaagcgggagccagagagggagcggagcgtgggctgagcgctatccgcgagcgcctcggcccactcgtagagcaagggcgcgtgcgcgctgctactgtggggagcttggctggccagccactgcaggaacgcgcccaggcctggggggagcgcctgcgggcccgcatggaggagatgggtagtagaacccgcgaccgtctcgatgaggtaaaggaacaagtggcagaagttagagccaagctggaggaacaggcccaacagatccgactccaagcagaagcattccaggcaagactgaagtcatggttcgaacccctggtagaagacatgcaaaggcaatgggctgggttagttgaaaaagtgcaggccgccgttggaacatccgccgcacctgtgccttctgataatcattag

SEQ ID NO: 179269 - DNA, 660 bp, synthetic construct
  misc_feature 1..660: note = Description of Artificial Sequence: Synthetic coding sequence
  source 1..660: mol_type = other DNA
atgaaggtgctgtgggccgccctgctggtgaccttcctggccggctgccaagccaaagtagagcaggcagtggaaactgagcccgaaccagaattgcgacaacagaccgagtggcagagcggccagcgctgggagctcgctcttgggcggttctgggactatctccggtgggtgcagacgctttccgagcaggtgcaggaagaactgctttcaagccaggtaactcaggagttgcgggcactcatggacgaaaccatgaaggagctgaaagcttataaaagtgagctggaggagcagttgactccagtagcggaagagacacgagctcggctgtccaaggagctacaggccgcacaggcgcgtttgggggccgacatggaggatgtgtgcgggcggttggtgcagtatcggggagaagtgcaggcaatgttgggccaaagcacagaggagctccgagtgcgcctggctagtcacctgcggaaactgcggaagaggctccttcgcgatgcagatgacctgcaaaagagactggccgtgtaccaggccggggcccgcgagggggccgaacgcggcttgtctgcaatccgggagaggctgggaccgctagtggaacagggacgggtgagagctgccacagtggggagtctggcaggtcagtag

SEQ ID NO: 179270 - DNA, 867 bp, synthetic construct
  misc_feature 1..867: note = Description of Artificial Sequence: Synthetic coding sequence
  source 1..867: mol_type = other DNA
gaggtgaaggacgtgctgccccaggagcccgtgcggagcgccgtgggggggacagggatgtcgtccggcgcttcccgaaagtcctgggatccaggaaatccctggccaccagattggcctatcaccggtagaaaaatgaaggtgctgtgggctgccctgctggtgaccttcctggcaggctgccaggcaaaggtggaacaggctgtggaaacggaacccgaacccgagctcaggcaacagaccgaatggcagtccggtcagcgctgggagcttgcactgggccgtttttgggactatctgcggtgggtgcaaacgttgtcggaacaagtgcaggaagaactgctttcgtctcaagtcacgcaagagctcagagccctgatggatgagaccatgaaggagcttaaggcatacaagtcagagctagaggagcagctgacccctgtcgcagaggaaacacgagccagattgagcaaagaactccaagcagcccaggcacggctgggagccgatatggaagacgtgtgcggtcgccttgttcagtacaggggcgaggttcaggcaatgttagggcagtcaacggaagagctccgggtccggttagccagtcacctccggaaattgaggaagcgtctcctgagagacgcagatgatctgcagaagcgacttgcggtttaccaagcgggtgccagggaaggtgctgaacgcggactgtctgccatcagagagaggcttgggcctttagtggaacagggcagggttcgggctgccactgtgggcagcctcgccggtcagccactccaggagcgggcccaagcttggggagagcgtttaagagcgcgtatggaggagatgggcagcagaacctag

SEQ ID NO: 179271 - DNA, 651 bp, synthetic construct
  misc_feature 1..651: note = Description of Artificial Sequence: Synthetic coding sequence
  source 1..651: mol_type = other DNA
atgaaggtgctgtgggccgccctgctggtgaccttcctggccggctgtcaggctaaggtcgagcaggcagtagagactgagccagagccagaactgcgccagcagacagaatggcagagtggtcagaggtgggagttggctctcggaagattttgggattacctccgatgggttcagactctcagtgagcaagtgcaagaggaactccttagctctcaggtcacacaggagctgcgggccctgatggacgaaacaatgaaggaactgaaagcatataaaagtgaattagaagaacagctgacgccagtggcagaggagaccagggccagactgagtaaggaactacaggccgcccaagcaagactgggtgccgacatggaagatgtgtgtgggaggctcgtgcaatatcggggcgaggttcaggctatgctgggacaatcaacagaagaactgagagtccggcttgcgagccaccttcgcaagcttcgcaaacgcttattacgcgacgccgacgatctgcagaaaagactcgccgtgtaccaggccggtgcgagggaaggagccgagcgtggtctgtcagccatcagggaaaggttaggaccactagtggaacagggtcgggtccgagctgctactgtcgggtccctgtag

SEQ ID NO: 179272 - DNA, 10593 bp, synthetic construct
  misc_feature 1..10593: note = Description of Artificial Sequence: Synthetic coding sequence
  source 1..10593: mol_type = other DNA
atggccaaggaggaggacgaggagaagaaggccaagaagggcaagaaggggaagaaagcccctgaaccggagaagcccaagcgaagcttaaaaggcaccagtcggctgttcatggggttccgcgaccgcacgccaaagatcagcaagaaaggccagttccggagtgcctcagccttcttttgggggctacatacgggcccacagaaaacaaagaggaagcgcaaggcgcgtactgtgctgaagagcacatcaaagctgatgacgcagatgcgtatgggaaagaagaaaagggcgatgaagggtaagaagccaagcttcatggtgattcgcttccccggacgaagaggatacggcagattacggcccagggcccgatctctgtccaaggcaagcacagccatcaattggctcacaaagaaatttctcctgaagaaagccgaggaatcgggctccgagcaggcaaccgtagacgcttggttgcagcgaagctcttctagaatgggttcgcgcaagctcccctttccatctggcgcggaaattctgcggccgggtggcaggcttcgccggtttccaagatcccgctctatttacgcctccggcgaacccctgggattcctgcctttcgaagacgaggctccctttcaccactcaggctcaaggaagtctctctatgggttagaagggttccaggaccttggtgagtattacgactatcacagagacggggacgattactatgatagacagtcacttcataggtacgaagagcaggagccctatcttgcagggctggggccgtattctccggcctggcctccttatggcgatcactattacggataccctcctgaagatccatacgactactaccaccccgattattacggcgggccattcgacccaggctatacttatggttatggatatgatgattatgagcccccctacgctcccccatccggctacagctctccatattcataccacgacgggtacgagggggaagctcacccttatggctactatctggatccctatgccccatacgacgccccataccccccttatgatttgccttatcatacgccatacgatgtgccatatttcgacccatacggcgttcactatactgtaccttatgctgaaggggtctacggtggcggcgatgaggctatctacccacctgaagttccctatttctaccccgaggaaagcgcctctgcattcgtttacccctgggttcctccccccattccttcaccacacaacccatatgcacatgccatggacgatattgctgagctggaagagcccgaggacgcgggcgtggaacgacagggaaccagcttcaggcttcccagtgccgcgttttttgagcaacaaggcatggacaagccggctcgttcaaagcttagtttgattcgaaagttccgactctttccccgcccgcaggtgaagttatttggtaaagagaaattagaagtgcctcttccgcctagtctggacattcccctgccattgggcgacgctgacgaagaggaagacgaggaagagctgccccccgtatccgcagtcccttatggacaccctttctgggggttcctcactcctcgtcaacgcaacctgcaacgagcgctgagcgcattcggcgcccaccggggcctcggcttcggacctgaatttggaagacccgtcccgaggccggctactagtctggcgcggttccttaagaaaacactgagcgagaaaaagcctatcgcccgattgaggggtagtcagaaggcccgcgctggcggaccagcagtgcgagaggccgcatacaaacgcttcggatacaagttggcagggatggaccctgagaagcccggcacgccaatcgtgctccggagagcccagcctagagctcgtagtagtaacgatgcacggaggcccccggctccgcagcccgcgcctcgcactctgagccactggtcagcgttactgtcacccccagtgcccccgaggccaccaagctctgggccgcccccagcaccaccactgagtccagcactgtcaggactgccccgtccggccagcccttatggttccttgaggcgacaccctcctccttgggctgcccccgcccatgtcccgcccgccccccaagccagctggtgggccttcgtagaaccacctgctgtgtcccccgaggtgcctccagatttacttgcatttccgggccctagaccctccttccgcggctcgcggagaaggggcgcagctttcggcttccctggagcttctccacgcgcatctcgtcgaagggcttggtcacccctcgcaagcccccagcccagtctccgcagctcccctggacttgggtactgctcccccctggcacctccctcacctcagctgtcattgagaactggaccctttcagccgcctttcctgccacctgcccggcgtccaagatctttgcaggaaagccccgcacctcgtagagccgccgggcgcctcgggccaccagggtcaccattgcctggaagcccccgcccgcctagcccccctttgggtctgtgccacagtccacgtagatcctccttgaaccttccgtcacggctgccccatacctggcgccgtctgagcgagccaccaactcgggccgtcaagccccaagttcggctgccttttcaccgtccccctcgggccggtgcctggcgcgccccactcgagcaccgggaaagccctagagagcccgaggactccgaaacaccctggaccgtgccccctttggcaccatcctgggatgtggatatgcccccgacccagcgacctcccagcccgtggccaggaggagcagggtctcgacgagggttcagccgcccccctccagtgcccgagaacccctttctacaactccttggccctgtaccctctccaacacttcagcccgaggacccggcagccgacatgaccagggtgtttctcggtcgccatcacgagccaggcccaggacagttgaccaagagtgccggacccacaccagagaagccggaagaggaagcgacccttggtgacccccagcttccggcggagacaaagccacccacacccgccccaccaaaggacgttaccccacccaaggacatcacccctccaaaagatgtactgccagaacagaagacccttaggccgtctctgtcttaccctctcgctgcatgcgaccagacccgggctacttggcctccctggcaccgctgggggaccttaccacaggccgccgccccccttgccccaatcagagcccccgaacccctgccaaaaggcggagaaagacggcaggcagcacccgggcgctttgccgtcgttatgcctcgcgttcagaagctctcttctttccagcgcgtggggccagcaaccctgaaacctcaagttcagcccattcaagacccgaagccccgcgcctgttctctgagatggtcttgcctgtggctgcgagccgacgcatatggcccctggccacgcgtgcatacccatccccaatcatgccatttaggccctggagccgcctgtcttagcctgagaggttcttgggaagaggtgggccctccctcttggagaaacaagatgcacagtatacggaacctccctagcatgcgtttccgggagcagcatggagaagatggggtggaggatatgactcagttggaggatctgcaagagacgaccgtgctgtcaaatctgaagatccggtttgagagaaatctgatctatacatatatcggcagcatccttgtgagcgttaacccatatcagatgttcgggatttatgggccagagcaggtgcaacaatacaacggacgcgcattaggagaaaacccaccccatctatttgccgttgctaatctggcctttgctaagatgttagacgcgaagcagaatcagtgcatcattatctctggcgagagcggctcgggaaagacagaagctaccaagttgattcttagatacttagctgctatgaatcaaaagcgggaggtaatgcagcaaatcaagattctggaggcaaccccgttactggagtctttcggcaatgctaagaccgtgcgcaacgacaatagcagccgtttcggaaagttcgtcgagattttccttgaaggcggcgtgattagcggagcgatcacctcacagtaccttctggagaagagccgaatcgtgtttcaggccaaaaacgagaggaactatcacatcttctacgagctcctcgccggactgccggcgcagctgagacaggccttcagtcttcaggaggccgaaacatactattatctgaaccagggagggaactgcgagatcgccggcaaaagtgatgctgacgatttccgacggttgctcgctgcaatggaagtgctggggttctcttctgaggatcaggatagtatttttcgaatactggcatccattctgcatctcgggaacgtgtactttgaaaagtacgagactgatgcacaggaggtcgcttccgtggtgtcggcaagggaaatccaggctgtggctgagctactacagatctctccggaagggttgcaaaaagctatcactttcaaggtgactgaaactatgcgcgagaaaatctttacgcccctgaccgtcgagtccgccgtcgacgcaagggatgccatcgccaaggtgctatatgcactcctatttagctggctgatcacacgcgttaacgccctcgtgtctccacggcaggatactcttagtatcgctatacttgatatctatgggtttgaggacctttcctttaattctttcgaacagctgtgtatcaactacgcaaacgaaaatctgcagtatttattcaataaaatcgttttccaagaggagcaggaggagtacatccgcgagcaaattgattggcaggaaatcactttcgccgacaatcaaccgtgtatcaacctcattagtttaaaaccgtacgggatactcaggatactcgatgatcaatgctgctttccacaggcaacggatcatacctttctgcagaagtgtcactatcatcatggcgcaaacccattgtacagcaagcccaaaatgccactgccagaattcacaatcaagcattatgccgggaaggtgacataccaagtgcataaattcctggataagaaccatgatcaggtgagacaggacgtactagacctgttcgttaggtccaggacacgggttgttgctcacttattcagctctcacgccccccaggccgccccccagagattgggtaagtcttcaagtgtgactcgcctgtacaaagcacacacggtggctgccaaattccagcaatctctcttagacttggttgaaaagatggagaggtgtaatcccctgttcatgagatgcctcaaacccaatcataagaaggaacccgggctttttgagccagatgtcgtgatggctcagttacggtattccggagtgctggagacggttcggatcagaaaggaaggatttcctgtgcggctgccctttcaaggttttattgacagatattgctgcctcgtggctctcaaacacgatctccccgctaacggcgatatgtgcgtgtctgtgttaagccggctttgtaaagtgatgcccaacatgtatagggtcggcgtgagtaagcttttcctcaaggagcacctgtaccaacttctggagtcaatgagggagcatgtcctgaacctggcggcattgacattgcaacgatgcctccgcgggttctttatcaagaggagatttaggtccttgagacacaaaataatcttactacaaagccgcgcccgggggtacttggccaggcagcgctaccagcagatgagacggtccctcgtgaagtttcgctcccttgtacatgcgtacgtatccagaagacgatatcttaaactacgggccgaatggcggtgtcaggtggaaggagcgcttctgtgggaacaggaagagctgtccaaacgcgaggtggtggcagtgggccatctagaggttcctgcagaacttgctggcttacttcaagcagttgccggtcttgggctggcccaggtgcctcaggtcgcccccgtacggactccacggctgcaagcagaaccccgggtgacattaccgcttgacataaataactatccaatggctaagtttgtacaatgccattttaaggagcctgccttcgggatgctgaccgtccctctgaggacacccttaactcagttgccagctgagcaccatgccgaggccgtcagcattttcaaactgattctccggttcatgggtgatcctcacctgcacggggctcgcgagaacatatttggcaattatatcgttcaaaagggactagccgtgcctgagctcagagatgagattctggcacagctcgccaatcaagtttggcacaatcataacgcacataatgccgaacgggggtggctgctgctagcggcatgcctgtcaggctttgcacctagtccctgttttaataagtacctcctaaagttcgtatccgactatggacgcaacggatttcaggctgtgtgccaacaccgcctgatgcaggccatggggagagcgcagcagcagggatctggcgctgcccggacccttcccccgactcaactagaatggactgccacatatgaaaaagcctccatggcacttgatgttggctgctttaatggcgatcagttttcctgccctgttcactcctggagcactggggaggaggttgcgggagatattttgcgacatagaggactggcagatggctggaggggctggaccgttgccatgaaaaatggagtgcagtgggccgaactcgctggtcacgattacgtactggaccttgtgagtgacctggagcttcttcgagactttcctaggcaaaagtcttatttcatcgtgggaacagagggcccagctgcctctagaggcgggcctaaggtcgtgtttgggaacagctgggacagtgacgaggacatgtcaacaaggcctcaacctcaggagcacatgcccaaggtgcttgattcagacggatacagttctcataaccaggatgggacgaatggcgaaacagaggctcaacggggaacagctactcaccaagagtcggactccctgggcgagccagccgtgcctcacaaagggctggactgctaccttgattcattgtttgaccccgtgctttcctacggtgatgctgacctcgaaaaacctacggctattgcttacaggatgaagggaggcggccagcctgggggaggtagctcctctgggactgaggacacacctaggcgcccgcccgaacctaagcccattccgggattggatgctagtaccctggccttgcagcaagcttttatccataagcaggcggtacttctggctagggaaatgactctgcaggcgactgctctacagcaacagccactgagcgccgcgttacgatctttacctgccgaaaagcccccggccccagaggctcagcctactagtgtgggtacgggcccacctgccaaacccgtgctgctgcgggccacccctaagccacttgcacccgctcctctcgcgaaggctccacgcctgccaattaaaccggtcgccgcacctgttttggctcaagatcaagcatcccccgaaacaacctcaccctcaccagagctggtgagatacagcactctgaactccgagcactttccccagcccacacagcaaattaagaatattgtgagacagtatcagcagccatttcgtggtggacggccagaagcgcttcgaaaggatggaggcaaggtgttcatgaagagacccgacccacacgaagaagcacttatgatcctaaaagggcaaatgacccatctggccgcagcacctggaacccaggtctcccgtgaagcggtggccctagtcaagcctgtgacaagtgctccccgcccatctatggcacccacaagtgctctgccatcacggtctctggagcctcctgaggagctgacccagactaggctgcaccgtctgattaaccccaacttttacgggtatcaggacgctccgtggaagattttcctgagaaaagaagttttctatcccaaggattcttattctcaccctgttcagctcgatctgttgttccgacagattttacatgacacactcagcgaggcctgtctgcgcatctccgaagatgagcggcttaggatgaaagccctcttcgcacagaaccagttggatacccagaagcccctcgtcacagaatccgttaaacgcgcggtcgttagcaccgccagagatacttgggaagtatacttctctaggattttccctgctactgggagcgtagggacaggtgtccagcttctggcagtgtcgcatgtgggcattaaactgctccgtatggtcaaaggcggtcaggaggccggcgggcaacttcgagtactgagagcatattcgtttgccgatatcctgtttgtcactatgccctctcagaatatgctggagttcaacctggcatccgaaaaggtgattctgtttagtgcaagggcccaccaagtgaaaacgctcgtggatgattttatcttggaactcaaaaaggatagcgattatgtcgtggccgtgcggaactttctgccggaggatccagctctgctagccttccataagggtgatattatccatttgcagcccctggagccccctcgggttggatactcggctggctgcgtcgtgcggcgaaaggttgtttacctggaggaattacgtagacgcggcccagacttcggctggagatttggcacaatccacggccgcgtcggacggttcccttctgagctggtccagcctgccgccgcccccgatttcctgcagcttccaaccgagccaggacgcggtagggcagccgccgtggcagccgcagtggcttccgcagcagcggctcaagaagtcgggcggcggagagagggccctccggtccgtgctcggtcagccgatcacggagaagacgccctcgccctgcccccttacaccatgttggaatttgcccagaaatactttagggaccctcagaggagaccccaggacggtctcagactgaagagcaaggaacctagagagagccgtactttggaggacatgctttgcttcacaaagacgcccctgcaggagagtttaatcgagttgtcggacagctccttgagtaagatggccacagacatgtttctggccgtcatgcggttcatgggtgacgcgccactgaaaggacagagtgacctggacgtactgtgtaacctgctgaagttgtgtggcgatcatgaagtgatgagggacgagtgctactgccaggtggtgaaacagatcaccgacaacacgtccagcaagcaagactcctgtcaaaggggctggaggcttctctacatcgtgaccgcataccattcttgctctgaggtcctccacccgcacctgacacgcttcctgcaggatgtttctcgaacccctggtttgcccttccagggaatcgccaaggcttgcgagcagaacttgcaaaagaccctgcgctttggcgggcggctagagttgccctcaagcatcgaactgcgcgctatgttggccggaagaagttcaaaaagacagctctttctgttaccgggaggcctggagcgtcaccttaaaattaagacgtgcactgttgctctggatgtcgtggaggaaatctgcgccgagatggccctgacacggcctgaagctttcaacgagtatgtcatcttcgtggttaccaaccgcgggcagcacgtgtgcccgctgagtagacgcgcctacattttagacgtagccagcgagatggaacaagttgacgggggatacatgctgtggtttcgcagggtcctgtgggaccagccactgaaattcgaaaatgaactgtatgtgactatgcactataaccaggttctccctgattatctgaaaggcttgtttagttcagtccctgcaagtcggccctcagaacagctgctgcagcaagtgagcaagctggcctcccttcaacaccgggcaaaggatcatttctatttgccctctgtcagagaggtgcaggagtatatccccgcacagttgtaccgaacaaccgctggtagtacgtggctgaatctggtgtctcaacatcgccaacagacccaagccctgtcaccccatcaggcgcgcgcccagttcctgggactgctgtcggccttacctatgtttggttcatctttcttttttatacagtcctgctccaatattgcagtgccggcgccctgtatcttagctatcaaccataatgggctgaatttcctgtccactgagacacatgagctgatggtgaaatttcctctgaaagagattcagagcactagaacccagcgaccgacggccaattcatcatacccttatgtggaaattgccctcggcgacgtcgctgcccaaagaactttgcaattgcagctggagcagggattggagctttgtagagtagtggcagtgcacgtggaaaacttattgtctgcacatgaaaagagattgactctccctcccagcgaaatcactctactctag

SEQ ID NO: 179273 - DNA, 840 bp, synthetic construct
  misc_feature 1..840: note = Description of Artificial Sequence: Synthetic coding sequence
  source 1..840: mol_type = other DNA
atgttccgggccccctgccaccggctgcgggcccggggcacccggaaagccagggccggcgcttggcgcggatgcacttttccatgcctggggaaagggatggaacggcctgccgctcgggaaccccacgggcccgacgctctccgccgctttcagggcctcctcctggatcgaagaggcagactccatgggcaggtgctccggctacgggaggtggcgcggcgccttgaacgcctgaggaggcgttctctcgtggctaatgtggccggctcctctctgtccgctaccggagctctggcagcaattgtggggctgagtctctcacccgtgaccttgggaacatccctcctggtctccgccgttggcctcggtgttgccaccgccgggggggcagtgacgattacctccgacttgtcgctcatcttttgtaactctcgcgagctgcgaagagtgcaggaaatagcagcaacatgtcaggaccagatgcgggagatcctctcctgtcttgaattcttttgtcgatggcagggctgcggggacagacagttactgcagtgcggacgtaacgcaagcattgcattgtacaacagcgtgtacttcattgtattttttggatccagaggctttctcatcccaaggcgggcagagggcgacaccaaggtgtctcaggccgtacttaaggcaaagatacagaagctcgccgagtccctggagtcctgtacgggcgctctcgacgagctgagtgagcagctggagtctagggtgcagctgtgcacaaagtccagtcgaggacacgatctgaagattagtgcagaccagcgggccggactgtttttttag

SEQ ID NO: 179274 - DNA, 747 bp, synthetic construct
  misc_feature 1..747: note = Description of Artificial Sequence: Synthetic coding sequence
  source 1..747: mol_type = other DNA
atgggcatggagcggcccgccgcccgggagccccacggccccgacgccttgagacggtttcagggcttactgctcgaccgaagaggtcgactgcacgggcaggtgctccggttgcgggaagtcgcacgaagattagagcgtctaagacgccgctccctggttgcaaacgtcgccggctcaagtttgagcgccaccggagccctcgcggcgattgtcggcctgagtctcagccctgtgactctgggtacaagtctgttggtcagcgctgtcggattgggcgttgcgacagctggcggggcggtgaccattacaagcgacctgtccttgatcttctgcaatagtagggagctccgccgagtgcaggagatcgcagcaacatgtcaggaccagatgagagagatcctgtcctgcctggagttcttttgcagatggcaggggtgcggcgaccgtcagctgttgcaatgtgggcgcaatgcaagcatagctttgtacaactccgtatattttatcgtttttttcgggtcgcggggattccttatccctcgccgcgcagaaggagatacaaaggtgagccaggccgtcttaaaggctaagattcagaaactcgccgaatctctcgaatcatgtaccggagctctggacgaactgtccgagcagttggaatcaagagtccaactgtgtacaaagagctcaaggggacacgacctgaaaatcagcgccgaccagcgagccggccttttcttttag

SEQ ID NO: 179275 - DNA, 1245 bp, synthetic construct
  misc_feature 1..1245: note = Description of Artificial Sequence: Synthetic coding sequence
  source 1..1245: mol_type = other DNA
atgcggttcaagagccacaccgtggagctgcggcggccctgcagcgacatggaaggcgccgccctgctgagagtgtctgtgctgtgcatctggatgagcgccctctttctaggcgtaggggtcagagctgaagaggctggcgctagggtgcagcaaaatgtgccctcaggcaccgataccggagatccccagagcaaaccattgggcgactgggccgctggcacaatggacccagagagctctatcttcattgaggacgccataaaatacttcaaagagaaagtctccacgcagaacttgctgttgctcctgacagacaacgaggcttggaatggttttgtggccgctgcagaacttccgcgcaatgaggcagatgagctccgaaaggcactggacaacctggctcgtcaaatgatcatgaaggacaagaattggcatgataagggccagcagtaccggaactggttcttaaaagagttcccacggctgaaatcggaactggaggataatatccgtcggctccgcgcactggccgatggggtccaaaaggtgcacaagggtaccactatcgctaacgtggtgtccgggagtctttcaatttccagcgggatcctaacactagtagggatgggtctggcaccgttcacagagggaggctccctcgtgctgctcgagcccggcatggagcttggaatcactgcagcactgacaggaatcacaagctccactatggattacggcaaaaagtggtggacccaagcacaagcacacgacttggttatcaaatcccttgacaaactgaaggaagtccgcgagtttctgggggagaatatttcaaatttcctcagccttgctgggaacacgtaccagttaacccgtggcatcggaaaggacatacgcgctctacggagggccagagcgaacctgcagagcgtgccccatgccagcgcaagcagaccgcgagtcactgaacctatttcagctgaatcaggagagcaagtggaaagggtgaacgagccaagcatcctggagatgagcagaggcgtgaagctcaccgatgtagcacccgtctctttcttcctggtcctggacgtggtatatttagtgtatgagagcaagcaccttcatgagggcgcaaaaagcgagaccgccgaggaacttaagaaagtggcacaagaacttgaggagaagcttaacattcttaacaataactacaaaattctgcaggctgatcaggagctgtag

SEQ ID NO: 179276 - DNA, 834 bp, synthetic construct
  misc_feature 1..834: note = Description of Artificial Sequence: Synthetic coding sequence
  source 1..834: mol_type = other DNA
atgatcatgaaggacaagaactggcacgacaagggccagcagtaccgcaattggtttctcaaagaattcccaagacttaaatctgaactggaggacaatatccgtcgtttgcgcgctctggctgacggggtgcagaaggtgcataaagggactactatagccaacgtggtttctggatctctctctatctcctcgggcatcttgacactcgtgggcatgggattggcaccctttactgaggggggctccttggtgcttctggagcccggaatggaactggggataacagccgctctgaccggcattaccagttccactatggactatggcaaaaagtggtggacacaagcccaggcccatgatttggttatcaaatcactggataagctgaaggaggtcagagagttcctgggcgaaaacatatcaaacttccttagtctggccggcaacacataccagctgacgcggggcataggcaaggacatcagagccctgcgccgggcccgggccaatctccagtctgtgccccatgccagtgcgtccagacctcgggtcacggaacctatctccgccgagagtggggaacaggttgaacgcgtcaatgagccaagcatcttggaaatgagcaggggtgtgaagttaacggacgtagcccctgtaagtttctttctcgtgctggacgttgtttacctagtgtatgagtcaaagcatctccatgaaggcgccaaatctgagacagctgaggagctaaagaaagttgcccaggagctcgaggagaagctcaacatcctaaataataattataaaatcctgcaagctgaccaggaactgtag

SEQ ID NO: 179277 - DNA, 1197 bp, synthetic construct
  misc_feature 1..1197: note = Description of Artificial Sequence: Synthetic coding sequence
  source 1..1197: mol_type = other DNA
atggagggcgccgccctgctgcgggtgagcgtgctgtgcatctggatgtccgctctctttctaggagtgggcgttagggcagaggaggccggggctcgtgtgcagcagaacgtcccctccggaactgacaccggcgatcctcagtcaaagcccctgggcgactgggcagcgggaaccatggatccggaatcctcaatctttatagaagacgctattaagtactttaaggagaaggtgtcgactcaaaacttacttttgttgctgaccgacaatgaagcctggaacggctttgtcgccgccgccgaactaccgaggaacgaagccgatgagctccgaaaggccttagacaatttggccaggcagatgatcatgaaagacaagaattggcatgataagggccaacagtacaggaactggtttctgaaagagtttccgcgccttaaatcagagctggaagacaatatcagacgcctcagagcccttgcagacggtgtgcaaaaagttcacaaaggcactacaatagccaatgtcgtttcgggttcgctctctattagttccgggatcctgacgcttgtaggcatggggctggcccccttcacagaggggggttctctagtattactggaaccgggtatggaactcggcattaccgccgccctgacggggatcaccagctccaccatggattacggaaaaaaatggtggacccaggcacaggcgcacgaccttgtaattaagtccctcgacaaactaaaggaggttagagagttcttaggagagaatattagcaatttcttgagcttggctggtaacacctaccagctgacacgcggtatcggcaaggacataagagcactcagaagggcgcgcgcaaatctgcagtctgtaccccacgcatcagctagcaggccccgggtaacagagccaatatccgcagaaagtggcgaacaggtggaaagggtgaatgaaccttcaattttagagatgtcccgcggcgtaaagttgacagacgttgctccagtttcattttttttggtgcttgacgtggtctacctcgtgtacgaaagcaagcaccttcacgagggcgccaagagcgaaactgcagaggaacttaagaaagtagcccaagagctcgaggagaagctgaatattttgaataataactataagatcctgcaggctgatcaggaactgtag

SEQ ID NO: 179278 - DNA, 1197 bp, synthetic construct
  misc_feature 1..1197: note = Description of Artificial Sequence: Synthetic coding sequence
  source 1..1197: mol_type = other DNA
atggagggcgccgccctgctgcgggtgagcgtgctgtgcatctggatgtccgcacttttcctaggcgtcggcgtaagggctgaagaggcaggtgctcgagtccagcagaatgtgccaagcggcacggatactggggacccgcagagcaaacccttgggtgattgggcagccggaacaatggatcccgaatccagcatttttatagaagatgccatcaaatatttcaaggaaaaagtctctacccaaaatttgctcctcctgcttacagataatgaagcatggaacggtttcgtggccgccgcagaattgcctcgcaatgaggccgacgagctgcggaaggctctcgacaatctggcacggcagatgatcatgaaggataagaactggcacgacaaaggccaacagtaccgaaattggtttctgaaagaattccctcgcctaaaatcagaattggaagataacatacgacgactccgcgcccttgctgatggcgtgcagaaggtgcacaaaggtactaccatcgccaatgttgtaagtgggtccctgtctattagcagtggcatactgactctggtgggcatgggactggcacccttcaccgaagggggttcactggttttgctggagcccggaatggaactgggcatcaccgctgcgctgaccggtattactagtagtacaatggattatggcaagaagtggtggacacaggcacaagcccacgatctggtgatcaagagtctggataagttgaaggaggttcgggagttcttaggtgagaacatctcaaactttctatcgctggccggaaatacataccagctgacacggggaatagggaaagatatccgcgcgctgagacgcgcaagagccaacctgcagtccgtccctcacgcatctgcttcccgccctcgggtaacagagccgatctcagccgaaagcggcgagcaggtggagcgggtgaatgaaccttcaatcctagagatgagcaggggggtcaagctgacggacgtagcccccgtgagcttttttctggtgctggatgtcgtttacttagtatacgaaagcaaacatcttcatgagggcgcaaaaagcgagaccgccgaagagctgaagaaagtcgcccaggagctggaagaaaagttgaatatcctcaataacaattacaagattctgcaggctgaccaggagctctag

SEQ ID NO: 179279 - DNA, 1197 bp, synthetic construct
  misc_feature 1..1197: note = Description of Artificial Sequence: Synthetic coding sequence
  source 1..1197: mol_type = other DNA
atggagggcgccgccctgctgcgggtgagcgtgctgtgcatctggatgagcgcattattcctgggagtgggcgttcgggccgaggaggctggagccagagtgcaacagaacgtgcctagcggcactgacactggcgacccccagtctaaacccttgggagattgggcagccggtacaatggatcccgagagttccatcttcatcgaagatgccataaagtacttcaaagagaaggtttctactcaaaacctgctgctgctgctgacggataatgaagcctggaatggatttgtggcagccgcggaattgcctcggaatgaggctgatgagctgagaaaggcactggacaatttggccagacagatgatcatgaaagataagaattggcacgacaaagggcaacagtacagaaattggttcctgaaggaatttcctcgactcaaatctgagctagaggataacattcgcagattgagggctctggccgatggcgtgcagaaagtccacaagggcacgacaattgctaacgtggtgtcaggcagcctaagtatctcatctggtatcctaaccctggtcgggatggggttagcaccttttacggagggcggctccttggttctgctggaaccaggaatggagctgggaattactgctgctctgactggcataacgtcctccaccatggattacggaaagaagtggtggacccaggcacaggcccacgatcttgtgatcaagagcctggataaattgaaggaggtcagggagttcctgggagagaatattagtaatttcttaagtctggccggaaacacttaccagctgaccaggggaattggcaaggatattcgcgcgttaaggagggcccgagctaatcttcagtccgttcctcatgcaagcgcaagccggccccgcgtgacggagccaatcagcgccgaaagcggggaacaagtcgaacgggtgaacgagcccagtatcctcgaaatgtctcggggcgttaaattgacagatgtcgcacctgtcagcttctttcttgtgcttgacgtagtataccttgtttatgaatccaagcacttacatgagggggccaagtccgagactgccgaggaactcaaaaaagtggcacaagagctcgaggagaagttaaatattctgaacaataattacaaaattctacaggctgaccaggaactgtag

SEQ ID NO: 179280 - DNA, 1197 bp, synthetic construct
  misc_feature 1..1197: note = Description of Artificial Sequence: Synthetic coding sequence
  source 1..1197: mol_type = other DNA
atggagggcgccgccctgctgcgggtgagcgtgctgtgcatctggatgtccgctttgtttctgggcgtgggggttcgtgctgaggaggcgggagctcgggtgcagcagaacgtcccgagcggaaccgacactggcgatccacaaagtaaaccactaggagactgggctgccggcactatggacccagaaagttccattttcatcgaagatgccattaaatactttaaggaaaaagtgagcacgcaaaacctgctgctgctgctgacagacaatgaggcctggaatggatttgtggccgctgctgagctgccacgaaacgaagcagacgagctgaggaaggccctcgataatctggctcggcagatgatcatgaaggacaagaattggcacgataagggtcagcaatatagaaattggttcttgaaggaattccctaggctgaaatccgaactggaggataatattaggaggctcagagccctggcagacggagtgcagaaggtgcacaaaggcactactatcgctaatgtggtgtcagggagcctctcaatcagcagcgggatcctgacattggtgggcatgggcctcgccccatttacagagggcgggagtctggtcctgctcgagccggggatggagcttggcataacagcggctttgactggcataacaagcagcacgatggactacggaaaaaagtggtggacccaggcccaggctcacgacctggtcattaagtcgttagataaactaaaggaagtgcgagagtttctgggtgagaacatctcgaatttcctctcactagcagggaacacctatcaactcacacgtggaatagggaaggatatcagagcactaagacgggcccgtgctaacttgcaaagtgtgccgcacgcctctgcatctcggccgcgtgttacagagcctatcagcgccgaaagcggagagcaagtggagcgggtcaacgagcccagtattctcgagatgtcaagaggtgtgaaactcactgacgtcgcacccgtatccttttttctggttctggacgtggtgtatctcgtgtacgaaagtaagcacttacacgagggggctaagtccgagactgccgaagagttaaagaaggtggcacaggagctggaggagaagctgaatatactgaacaataactataaaatactacaggccgatcaggagctgtag

SEQ ID NO: 179281 - DNA, 1143 bp, synthetic construct
  misc_feature 1..1143: note = Description of Artificial Sequence: Synthetic coding sequence
  source 1..1143: mol_type = other DNA
atggagggcgccgccctgctgcgggtgagcgtgctgtgcatctgggtccaacaaaatgtccctagcggaacagataccggggatccacagagtaaacctctcggcgactgggctgcgggtaccatggatccagagagttctatcttcatcgaagatgccattaagtatttcaaggaaaaggtctccacacaaaacttactgttactgctcacagataacgaggcctggaatggattcgttgccgcagccgaactgccacggaacgaggccgacgagctcaggaaggcactggacaacctcgcccggcagatgatcatgaaagacaagaattggcacgacaaaggccagcagtataggaattggtttctcaaggagttccctcggcttaaaagtgaactagaagataatattcgtcgtctcagagcactggctgatggagtgcagaaggtccacaaaggcacaactattgctaatgtcgtctccggctcactctctatttcctctggaattctgacgcttgttgggatgggactggctccgtttaccgagggcggatccctcgtcttgctggagccaggcatggagctcgggattaccgcagctcttactggaatcaccagcagtactatggactacgggaaaaaatggtggacccaggcacaggctcatgacctggttataaagagcctggacaagctgaaggaggtgagggagttcctgggcgagaatatttccaacttcctatccctcgctgggaacacctaccagcttactagagggattggtaaagacattcgagcattaagaagagcccgcgcaaacctgcaatcagtacctcacgcgtccgcatccaggcctagagtgaccgaacccataagcgccgagtctggagagcaggtcgagcgggtcaacgaaccttctatcctggagatgagccggggagtgaagctgactgacgtggcaccagtgagctttttcctggtccttgacgtggtgtatttggtctatgagtcaaagcacctgcatgaaggcgctaagagcgagacagcggaggaacttaagaaggtggcccaggaactggaagaaaaactgaacatcttgaataacaattacaagattctacaggctgatcaggaactgtag

SEQ ID NO: 179282 - DNA, 483 bp, synthetic construct
  misc_feature 1..483: note = Description of Artificial Sequence: Synthetic coding sequence
  source 1..483: mol_type = other DNA
atggagggcgccgccctgctgcgggtgagcgtgctgtgcatctggatgtcggcgctatttcttggggttggcgtccgggccgaggaagcaggagcgagggtgcagcaaaacgttcctagtgggactgacacaggagatccacagtccaaaccactgggcgactgggccgctggaacaatggaccccgaaagcagtatctttatcgaagacgccatcaagtacttcaaagagaaggtgtcgacccaaaacctgctccttctgttaaccgacaacgaggcatggaatggctttgtcgccgctgccgagctgcccaggaatgaggccgacgaactgagaaaggccctggataatcttgccagacagatgattatgaaagataagaactggcatgataaaggacagcagtataggaattggtttctgaaagagttccctaggctaaaaagcgagttggaagacaacattcgccgcctgagagcctag

SEQ ID NO: 179283 - DNA, 426 bp, synthetic construct
  misc_feature 1..426: note = Description of Artificial Sequence: Synthetic coding sequence
  source 1..426: mol_type = other DNA
atggagggcgccgccctgctgcgggtgagcgtgctgtgcatctggatgagcgccctgttcctgggggttggcgtgcgggccgaagaggcaggcgctcgtgtacagcagaacgtgccttccggtaccgacaccggagatccgcaaagtaagccactgggcgactgggcagctggaactatggaccccggtccggccgggagccgcggagatagtggggagccatgcacccttaggcctgcatgcagaggccaacggcagcacggcggcgctagccgcattagtgctgagggcccagcacccatgccgagacggcgcacaccaagcaccgcccatcttcgcgtgcccaagaccagccgccgcaacctcctctgcatgcgagcagtaagccttctgaggatgccgctgtctatatctaggaagaagtag

SEQ ID NO: 179284 - DNA, 357 bp, synthetic construct
  misc_feature 1..357: note = Description of Artificial Sequence: Synthetic coding sequence
  source 1..357: mol_type = other DNA
atgcggttcaagagccacaccgtggagctgcggagcaccctgagccaacccctgttctcttgtagccggcgccgaccatgctctgacatggagggtgccgctctgcttcgggtaagcgtactgtgtatttggatgtccgctctcttccttggtgtgggcgttagagctgaagaagcgggggcccgagtgcaacagaatgtccccagcggaacagacacgggcgacccccaaagtaaacccctgggggactgggcagccggcactatggatccggagtcttctatctttatcgaggacgccattaagtattttaaagagaaggtgagtacacagaatctcctcctcctcctgacctag

SEQ ID NO: 179285 - DNA, 426 bp, synthetic construct
  misc_feature 1..426: note = Description of Artificial Sequence: Synthetic coding sequence
  source 1..426: mol_type = other DNA
atggagggcgccgccctgctgcgggtgagcgtgctgtgcatctggatgagcgcattgttcttaggggtgggtgtgcgggccgaagaggcgggtgcccgggttcagcaaaacgtgccttcggggaccgatactggcgacccccaaagcaagcctcttggtgattgggccgcaggtaccatggacccaggcccagccgggtctaggggagattcaggggaaccatgcacactgagacctgcttgccgtggccagcgacagcatggcggggcctcaaggatttcagcagaggggcctgccccaatgcctaggagaaggaccccgtctaccgcgcacttgagagttcctaagacttctaggcggaatctgctgtgtatgcgcgctgtgtccctgctgcgaatgcccctctctattagccggaaaaaatag

SEQ ID NO: 179286 - DNA, 1014 bp, synthetic construct
  misc_feature 1..1014: note = Description of Artificial Sequence: Synthetic coding sequence
  source 1..1014: mol_type = other DNA
atgaaccccgagagcagcatcttcatcgaggactacctgaagtactttcaggatcaagtcagtcgcgagaatctgctgcaactcctgactgatgatgaggcttggaatggtttcgttgcagctgcggaacttccacgtgatgaagctgatgagcttaggaaggcactgaataagctggcgagtcacatggtcatgaaagacaaaaaccggcacgacaaggaccagcaacatcggcagtggtttttaaaagaattcccgaggctaaaacgcgaactggaggaccacatcagaaagttgcgcgccctggccgaggaagtggaacaagtgcaccgaggtacaacaattgccaatgtagtgagcaactccgttggcacaacttctggaatactcacgctattgggcctggggttagctcctttcacagaaggtatctcctttgtgctcctggacaccgggatgggcctcggcgctgccgcggctgtcgccggcataacgtgtagcgtagtggaattggtcaacaagctacgggcacgggcccaggctagaaacctcgaccagtctggtaccaacgtggctaaggtgatgaaggaattcgtgggcggtaacacgcctaatgtcctgacactagtggacaattggtaccaggtaacgcaggggatcgggcgaaacattcgcgcaatccggcgggcaagagccaaccctcagctgggcgcgtacgcaccacccccccacatcattggacgtatttcagcggaaggtggggagcaggtagaacgggtggtcgaagggccagctcaggccatgtcacgcggcacgatgatcgttggcgctgccactggagggatcctcctcctgttagatgtagtatctctggcctacgagtctaaacacctgctggaaggggccaaatcggaatccgcagaggaattaaagaaaagagctcaggaactcgaaggcaagctgaactttctgaccaaaatacatgagatgctgcaaccaggccaggatcagtag

SEQ ID NO: 179287 - DNA, 1014 bp, synthetic construct
  misc_feature 1..1014: note = Description of Artificial Sequence: Synthetic coding sequence
  source 1..1014: mol_type = other DNA
atgaaccccgagagcagcatcttcatcgaggactacctgaagtactttcaggaccaggtctcacgagagaacctcctccagcttttgacagatgacgaggcttggaacgggttcgtggctgctgctgagctgcctagagatgaggctgatgagctgcgtaaggcattgaacaagttggcctctcatatggtcatgaaggataaaaacaggcatgataaggaccaacagcaccggcagtggttcctgaaagagttcccaagactgaagagagaactggaggaccacatccggaagttgagggcgctggccgaggaggtagaacaggtgcatagaggaaccacaatcgcaaacgtagtgtctaatagtgtagggacgacatcaggtatccttaccctcctgggcctgggattggctcctttcacggagggtattagtttcgtgctcctagacacagggatgggcctgggcgctgccgccgccgtagctggcattacctgtagcgtggtagaactggtaaacaagctccgagctcgcgcccaagctaggaatctggatcagtcgggtacgaacgtcgctaaagtaatgaaggaattcgttggaggtaatactcctaatgtcttgacactggtcgacaactggtatcaggtgacccagggcatcggtagaaatatccgtgccatcagacgtgctcgggctaacccacaactcggtgcctacgcccctcccccccatattatcggccgcatcagcgctgagggaggagagcaggtcgagcgtgtggtggaggggcccgctcaggctatgtcccgcggaaccatgattgtgggtgccgccaccggaggcattctgttactactagatgtcgtgtccctggcttatgaaagtaagcatctgcttgagggagcaaagtccgagagtgcggaagaactgaagaaaagggcgcaagagctggagggaaaacttaatttcctgactaagattcatgaaatgctgcagcctggacaggaccaatag

SEQ ID NO: 179288 - DNA, 1350 bp, synthetic construct
  misc_feature 1..1350: note = Description of Artificial Sequence: Synthetic coding sequence
  source 1..1350: mol_type = other DNA
atgcacagctggacctgggacccccacagcagcgagcagctggacctagcccagtccctgtccgaagaagaccccttgagttccctgagagggtccatacagccccagccccccgcggaagcccccgataagggtgggagtcaagccaacaatgatcccggaggctgggatcccgggtgttcttcctcccaggtgctcggaaggaccagggggccctgcctgggagttcgggtccgggaggaggaagccggaacccgagtgaaggagaacttacctgtctggaccgtgaccggtgaactccaagggaagcccctgggaaaccccgccgccggcacaatgaatcctgaatcctctattttcatcgaggactatctcaagtatttccaagatcaggtgagtcgagaaaaccttctccagttactgactgatgatgaggcttggaatggctttgttgccgccgcagagctgccaagggacgaggccgacgaattaagaaaagccctgaacaaactggcatctcacatggtgatgaaagacaagaatcgccacgataaagaccagcagcaccgccagtggtttctcaaagagttcccacgcctgaaaagagagctggaagaccatattcgaaaacttcgcgccctggctgaagaagtggaacaggtgcatcggggaactaccatagccaacgtggtaagcaattcagtgggcaccaccagcggcatattgaccctgctcggcctgggccttgctccgtttactgagggcatctctttcgttctgttagataccggaatgggactgggagcagctgcagcagtcgctgggatcacctgttccgtggtggagttggttaataagctgagagccagagcccaagcacgaaacctcgatcaatccggaacgaacgtcgcaaaggttatgaaggagttcgtgggcggtaatactcctaacgttctcacgcttgtcgacaactggtatcaagtgacccagggaattggccgaaacatccgggctatacgccgggcacgagctaatccccagttgggagcctacgcccctccccctcacattataggccggatctctgccgagggaggagagcaagtggaaagggttgtcgagggccctgctcaggccatgtcacggggcacaatgatcgttggagctgctaccgggggaattctccttcttctcgacgtggttagtctggcttacgagtctaaacacctgttggaaggcgcgaaaagcgaatccgctgaggagctcaagaaaagggcgcaggaactggaaggtaaattaaactttcttactaagatccacgagatgcttcagcccggccaagaccaatag

SEQ ID NO: 179289 - DNA, 225 bp, synthetic construct
  misc_feature 1..225: note = Description of Artificial Sequence: Synthetic coding sequence
  source 1..225: mol_type = other DNA
atgaaccccgagagcagcatcttcatcgaggactacctgaagtacttccaggaccaggtgtcccgagagaacctgctgcagctcctgactgacgacgaagcttggaacggctttgtagcggccgcagagctaccccgcgatgaagctgacgagctccggaaggcgctgaataagcttgcctctcacatggtcatgaaggataagaaccgtcatgacaaggattag

SEQ ID NO: 179290 - DNA, 387 bp, synthetic construct
  misc_feature 1..387: note = Description of Artificial Sequence: Synthetic coding sequence
  source 1..387: mol_type = other DNA
atgaaccccgagagcagcatcttcatcgaggactacctgaagtacttccaggaccaagtctcaagggaaaatttattgcagctgctgactgacgatgaggcttggaacggtttcgtggctgccgcagaactgcccagggatgaagccgatgagctcagaaaagctctgaataagctggcatcccacatggttatgaaggacaaaaacagacacgacaaagaccagcagcacaggcagtggttcttgaaggagttccctcgcctgaagcgggagctcgaagaccacattcggaaacttagggccctggctgaagaagtagaacaggtccatagggggacaactatcgccaacgtggtctctaattctgttggaacaacttccggctag

SEQ ID NO: 179291 - DNA, 1209 bp, synthetic construct
  misc_feature 1..1209: note = Description of Artificial Sequence: Synthetic coding sequence
  source 1..1209: mol_type = other DNA
atgggcctgggccagggctggggctgggaggccagctgcttcgcctgcctgattaggtcgtgctgccaggttgtgacatttacattcccattcggatttcagggaatcagccaaagcttggagaatgtgagcggttattatgccgacgcaaggcttgaggtaggctcaacccagctccggactgccggtagttgctcccacagcttcaagcgatcttttctggagaaaaagaggttcacagaggaggcaacaaaatactttcgagaacgcgtgagtccagtgcacctgcagatactgttgactaacaacgaagcctggaagagatttgtgactgccgccgaacttcccagagatgaggcagatgccctgtacgaagcgctgaaaaagctaagaacctacgctgccatcgaagacgagtatgtgcagcagaaagacgagcagtttcgcgagtggtttctgaaggaattccctcaggtcaaaagaaaaattcaggaaagcattgaaaagctccgggctctggccaatggcattgaagaagtgcatcggggatgtacaatttccaatgtcgtatcatcttccactggggccgcgagcggtatcatgtcactggccggcctggttctcgcaccgttcaccgcaggaacctccctggcgctgacagccgccggtgtgggcttgggtgctgccagcgccgtgacaggcatcactacttccatcgtggagcactcctatacttcctccgccgaagcagaggcgtcaaggctgacagccacttccatcgatagactaaaggtgttcaaggaggttatgcgggatatcacacccaatcttctcagtctcttgaacaattattacgaagctacccagaccatcggctccgaaatcagagcaatacgacaagctcgtgcgcgagccaggctgcctgtcaccacgtggcggattagtgctggctcaggaggtcaggcggaacgcactatcgcagggactacccgagccgtatctcggggggcacgcattctgtctgccactacatccggcatttttctggcacttgacgtagttaacctcgtatacgagagcaaacacctgcatgaaggagctaagtccgcttcagcggaggagctgagaaggcaggctcaggaactggaagaaaatctgatggagctgacgcagatttaccagcgattaaacccctgtcatactcactag

SEQ ID NO: 179292 - DNA, 609 bp, synthetic construct
  misc_feature 1..609: note = Description of Artificial Sequence: Synthetic coding sequence
  source 1..609: mol_type = other DNA
atgagcctggccggcctggtgctggcccccttcaccgccggcacctccctggctctcaccgccgctggcgtgggtctcggcgccgcttctgcagtgaccggaatcaccactagcattgttgagcactcatacacatcatctgcagaagccgaggcgtccagactgactgcaaccagcatcgataggttgaaggttttcaaagaagtgatgcgcgatattacacccaaccttctgtctttacttaacaattattacgaggcaacccagactatcggcagcgaaatccgtgctattagacaagccagggcacgtgccaggctgccagtgacaacctggcgcatatctgccgggtctggagggcaagctgaacggaccattgcagggacgacacgcgccgtgagcagaggtgcacgaattctaagtgctacgacatccggaattttcctggccctcgatgtcgtcaatctggtttacgaaagcaagcacctgcacgagggggctaagtctgcttccgctgaggagctcagacggcaggcacaggagctcgaggaaaacctgatggagttgacgcagatctatcagcgcctgaacccttgccatactcattag

SEQ ID NO: 179293 - DNA, 609 bp, synthetic construct
  misc_feature 1..609: note = Description of Artificial Sequence: Synthetic coding sequence
  source 1..609: mol_type = other DNA
atgagcctggccggcctggtgctggcccccttcaccgccggcacctcgctcgcgctcactgcggccggcgtgggcttaggcgccgcctcagccgtgactggtatcacaaccagcatcgtggaacacagttatactagtagcgcagaagccgaggcgtctcggctgacggccacatcaatcgacaggctgaaagtgtttaaagaggtcatgagggacatcacccccaacctgctgtctcttctgaataactactacgaagcaactcaaacaattggctccgaaattcgggccatccgtcaggcccgcgctagggcccgcctgcccgttactacttggaggatttccgccggatccggcggccaagccgaacgcacaatcgctggcaccacaagagccgtgtcaagaggcgcaagaattctgagtgccacaacatccggaatctttctggctctggacgtggtcaacttggtgtacgaaagtaaacacctgcacgaaggcgccaaatctgcctccgcagaagagctgcgaagacaggcccaggaactcgaagagaaccttatggagctgacacagatttatcagcggctgaatccgtgtcacactcactag

SEQ ID NO: 179294 - DNA, 996 bp, synthetic construct
  misc_feature 1..996: note = Description of Artificial Sequence: Synthetic coding sequence
  source 1..996: mol_type = other DNA
atggacagcgagaagaagcggttcaccgaggaggccaccaagtacttcagagaacgcgtaagccccgtacatctgcagatcctgctgaccaacaacgaagcctggaaacgatttgtgaccgcagccgagctgccccgggacgaggctgacgctctgtatgaggccttgaagaagcttagaacctacgccgcgatcgaagacgaatatgtgcagcagaaggatgagcagttccgggaatggttcttaaaggagttcccacaggttaagcggaaaatccaggagtctatcgagaaactgagggcgctcgccaacggtatcgaagaggtccaccgcgggtgtactatctccaatgtggtgtcaagctccacaggcgccgcttctggcatcatgtccctggccggactggtgttagctccttttactgcaggcacctccctcgctctcactgcggccggggtaggtcttggtgcggcgtctgccgtgacaggtatcacgacaagcattgtcgagcactcttacacttcttctgcagaagctgaggcatcaaggctcactgccacctctattgacaggctcaaagtatttaaggaggtgatgcgcgacatcactcccaatttgctgtcactcctgaataactattatgaggcaacccaaactatcggttctgaaattcgggcgataagacaggccagagcccgggcgcggttaccagtgactacttggcggatctctgcagggagcggaggtcaggccgaacgaactatcgccggtacaacccgggccgtttccaggggagccagaattctgagtgcgacaaccagtggtatctttcttgcactcgatgttgttaatctggtttacgaatctaaacacctccacgaaggggccaagagcgcgtcggcagaggaactgcggaggcaggcgcaggaactggaggagaacctgatggaactgacccagatctaccagaggctaaatccgtgccacacccactag

SEQ ID NO: 179295 - DNA, 609 bp, synthetic construct
  misc_feature 1..609: note = Description of Artificial Sequence: Synthetic coding sequence
  source 1..609: mol_type = other DNA
atgagcctggccggcctggtgctggcccccttcaccgccggcacctcattagcgctgacggccgcaggggtaggcttgggcgccgctagtgcagttaccggaatcacaactagtattgtggagcactcctatacaagctccgccgaggcagaggcaagccgtctcaccgccacatcaattgaccgtcttaaagtttttaaggaagtgatgcgcgacatcacgcctaacttgttgtccttactgaacaactattacgaagccacgcaaaccatcggtagcgagattcgcgctatacggcaggcaagggcccgcgctcggcttcctgtcactacctggagaatatcagccggatcaggcggccaggccgaaagaaccatcgccggaactacacgggctgtcagccggggagctagaatcctgagcgctaccacatcagggatattcttagctctggacgtagtgaacttagtctatgaaagtaaacacctgcacgagggtgctaaatctgcttccgctgaggagctacgcagacaggctcaggagctcgaagaaaatctgatggagctaactcagatctatcagcgtttgaatccgtgtcacacccactag

SEQ ID NO: 179296 - DNA, 324 bp, synthetic construct
  misc_feature 1..324: note = Description of Artificial Sequence: Synthetic coding sequence
  source 1..324: mol_type = other DNA
atgggcagctgggtgcagctgatcaccagcgtgggcaccagcggcttgttcctaggggtgcgagtgagggaggagggggctggcatgagatgttccaagaccatccaggcaggacaatggctagactcttccaagggacctctgggaccttccccgccccccgtccccaccgccgggtattcctcgtcattttgcgtacactacgtaaacctgcttccgggggtgctggttctatcagtgactagccagtacccccacctttcgatggctctgtgtcagctggctgcacacgactggcctaggctctcctgtgtttgtgtttag

SEQ ID NO: 179297 - DNA, 1044 bp, synthetic construct
  misc_feature 1..1044: note = Description of Artificial Sequence: Synthetic coding sequence
  source 1..1044: mol_type = other DNA
atgggcagctgggtgcagctgatcaccagcgtgggcgtgcagcagaaccatcctggctggactgtggctgggcagttccaggaaaagaaaagattcacggaggaggttatagagtactttcaaaaaaaagtttctcctgttcatttaaaaatacttttaaccagcgatgaggcctggaagcgcttcgtgcgtgtggcagagttgcctcgggaggaggccgacgcactgtatgaagccctgaaaaaccttacaccttatgtggcaattgaggacaaggatatgcagcagaaagaacagcaatttagagaatggtttctcaaattcccccagatccgctggaagatccaggaatccatcgaaagattgagagttatcgctaacgaaatcgagaaagtgcaccgtggatgtgtaatcgcaaacgtcgtctccggtagtaccggaatactgagcgtaatcggtgtcatgctggccccatttactgctggccttagcctgagcattacagccgccggcgtgggcttgggcatagcatcagctacagctggaattgcatcttctattgtggaaaacacgtatactcgatccgccgagttgacggcttctcggctcaccgccacttccaccgaccagttagaagccctccgggatatcctgcgtgacattacaccgaacgtcttgagctttgctttggacttcgatgaggctaccaagatgattgccaatgatgtgcataccctccggaggagtaaagctaccgtgggaaggcctttaattgcttggcggtacgtgcccataaatgtcgttgagactctacggactcggggggctcccactcgcatcgtgaggaaggtggctagaaatttaggcaaagccacctcaggggtcctcgtggtgctggatgttgtcaacctggttcaggactcactcgacctgcataagggggcaaagagtgagtccgccgagtccctgagacagtgggctcaggagttggaggagaacctcaatgagctcacccatatacaccagtccctaaaggctggatag

SEQ ID NO: 179298 - DNA, 1053 bp, synthetic construct
  misc_feature 1..1053: note = Description of Artificial Sequence: Synthetic coding sequence
  source 1..1053: mol_type = other DNA
atggagggcgccgccctgctgaagatcttcgtggtgtgcatctgggtccaacaaaatcatcctggatggaccgtagccgggcaattccaagagaaaaagcgcttcacggaagaggttattgaatattttcagaagaaggtgtctcctgttcatttaaagatcctcctgacgtctgacgaggcttggaagcggttcgtgcgcgtcgctgagctgccaagggaggaggcagatgccttgtacgaagctctgaagaacctgacaccctacgtcgcgatcgaagacaaagatatgcagcagaaggaacaacagttcagggagtggtttctcaaatttccacaaattagatggaagattcaggagagcattgagcggttaagggttattgccaatgaaatcgagaaggttcaccggggctgtgtgatcgccaacgttgtgtcaggatcaacaggcattctgtcagtgattggcgtgatgctggccccttttacggccggattgtcgctcagcataaccgccgccggggtcggcctgggtatagcatccgctacagcgggaatagcaagcagtatcgtggagaacacatatacccgttctgccgagctgacagcctcaaggcttacagcgacgtccactgatcaacttgaagctttacgcgatatactccgcgatattacacccaatgtgttgtcctttgcactcgattttgacgaggcaacgaagatgattgctaatgatgtgcacacacttcgacgaagcaaggccactgtgggccggccgcttatcgcctggcgctacgtacctatcaatgtcgtggagacactgagaactcggggggcccccacacggatcgtccgaaaggtcgctagaaatctcggcaaagccacaagcggtgtgttggtcgtgctggacgttgtgaatctggtacaggactcgctcgacctccataagggggccaaatcagaatccgccgagtctctcagacagtgggcgcaggagctcgaggagaatctgaatgaattgacgcacatccaccaatcactaaaagctggctag

SEQ ID NO: 179299 - DNA, 393 bp, synthetic construct
  misc_feature 1..393: note = Description of Artificial Sequence: Synthetic coding sequence
  source 1..393: mol_type = other DNA
atggagggcgccgccctgctgaagatcttcgtggtgtgcatctgggttcaacaaaatcaccctggctggaccgtagccggtcagttccaggaaaagaaaaggttcacagaagaggttattgagtactttcaaaaaaaagtatctccagttcacctcaaaatactgctgacgagcgatgaagcttggaaacggttcgtcagggtggctgagcttcccagagaagaagcggacgccctgtatgaggcgctgaaaaatctgaccccatacgttgcaattgaggacaaagacatgcagcagaaggagcaacaattcagagaatggttcttaaaggtgagcagcaaccaaatggaagattcaggcgttcataggaaggcttcctgccactgtaaatag

SEQ ID NO: 179300 - DNA, 384 bp, synthetic construct
  misc_feature 1..384: note = Description of Artificial Sequence: Synthetic coding sequence
  source 1..384: mol_type = other DNA
atgggcagctgggtgcagctgatcaccagcgtgggcgtgcagcagaaccatcccggctggaccgtggccgggcagttccaggaaaagaagaggtttacggaggaggtcatcgagtatttccagaagaaagttagcccagtgcacttgaagattttactaacaagtgatgaggcatggaagcgctttgtcagggtggccgagcttccgagggaggaagccgacgctttgtatgaggccctgaagaatctcactccctacgtggccattgaagataaggatatgcagcagaaagagcaacaatttagagaatggtttcttaaagtgagtagcaaccagatggaggattccggcgtgcaccgaaaggcctcgtgtcactgtaagtag

SEQ ID NO: 179301 - DNA, 198 bp, synthetic construct
  misc_feature 1..198: note = Description of Artificial Sequence: Synthetic coding sequence
  source 1..198: mol_type = other DNA
atgggcagctgggtgcagctgatcaccagcgtgggcgtgcagcagaaccacccggggtggactgtggctgggcagtttcaggagaaaaagcggttcacagaggaggttattgagtacttccagaagaaggtatccccagttcacctaaaaattctgcttaccagcgatgaagcctggaaacgttttgtgagagtgtag

SEQ ID NO: 179302 - DNA, 384 bp, synthetic construct
  misc_feature 1..384: note = Description of Artificial Sequence: Synthetic coding sequence
  source 1..384: mol_type = other DNA
atgggcagctgggtgcagctgatcaccagcgtgggcgtgcagcagaaccaccctggatggacagtagctggtcagttccaggagaagaagagatttaccgaagaagtcatcgagtacttccagaaaaaggtctcacccgttcatctgaagattctgctgacatcagatgaggcctggaaacgcttcgtgcgcgtagccgaacttcctagggaggaagccgacgcactttatgaggctcttaagaacttgaccccatacgtggcaattgaggacaaggacatgcaacagaaagaacagcagttccgggaatggtttttgaaggtctcatccaatcagatggaagactctggtgtgcataggaaggcgagttgtcactgcaaatag

SEQ ID NO: 179303 - DNA, 183 bp, synthetic construct
  misc_feature 1..183: note = Description of Artificial Sequence: Synthetic coding sequence
  source 1..183: mol_type = other DNA
atgggcagctgggtgcagctgatcaccagcgtgggcgtgcagcagaatcatcctggatggactgtggctggacagttccaagagaaaaagagatttacggaggaggtgatcgagtatttccagaagaaagttagccccgtgcatcttaagattttgttaacctctgatgaagcttggaagtag

SEQ ID NO: 179304 - DNA, 219 bp, synthetic construct
  misc_feature 1..219: note = Description of Artificial Sequence: Synthetic coding sequence
  source 1..219: mol_type = other DNA
atgggcagctgggtgcagctgatcaccagcgtgggcgtgcagcagaaccatcctggttggaccgtggcaggacagttccaggagaagaagcgcttcaccgaggaggtgatcgagtattttcaaaagaaggtgtccccagttcatttgaagatcttactgacttctgacgaagcttggaaaagattcgtgagagttgcggagctgcccagagaagaatag

SEQ ID NO: 179305 - DNA, 213 bp, synthetic construct
  misc_feature 1..213: note = Description of Artificial Sequence: Synthetic coding sequence
  source 1..213: mol_type = other DNA
atgggcagctgggtgcagctgatcaccagcgtgggcgtgcagcagaatcaccccggctggaccgtagcaggtcagtttcaggaaaaaaagaggttcactgaagaagtaatcgagtactttcaaaagaaggtgagccccgtccatctcaaaattcttttgacttccgatgaggcttggaaaaggttcgtgagagtggcagagttgccacgctag

SEQ ID NO: 179306 - DNA, 1302 bp, synthetic construct
  misc_feature 1..1302: note = Description of Artificial Sequence: Synthetic coding sequence
  source 1..1302: mol_type = other DNA
atgccctgcggcaagcagggcaacctgcaggtgcccggcagcaaggtcctacctggtttaggtgaagggtgcaaagagatgtggttgcgcaaggtgatttacgggggggaagtgtggggtaagtcccctgaacccgagttcccaagtcttgtcaacctttgtcaatcctggaagatcaacaatctgatgtctactgtgcactctgacgaggcagggatgctctcttatttcctgttcgaggaacttatgaggtgcgacaaagatagcatgcctgatggtaatttgtctgaagaggaaaaacttttcctgtcttacttccccctgcacaaatttgagctggagcaaaacatcaaagaactgaataccctggccgatcaggttgacactactcatgaactccttacaaagacctccttggttgccagtagcagtggggccgtcagtggggtaatgaacatactggggctggccctcgcacctgtgaccgccggtggcagcctaatgcttagtgcaaccggaacagggctgggcgctgcagctgctataacaaacattgtgaccaacgtgctggagaacagatccaacagcgcagcacgcgataaggcatccagactcggacccctcacgacttctcacgaggctttcggaggaatcaactggtcagagatcgaggccgccggtttttgtgttaacaagtgtgtcaaggccatccagggcataaaggatctacatgcctaccagatggccaaaagtaactcaggattcatggcgatggtgaaaaacttcgttgcgaagcgccacattcccttttggaccgcacgcggtgttcaacgggctttcgaaggcactactttagcgatgacaaatggagcctgggttatgggagcagctggcgcggggttcctcctcatgaaggatatgtcctctttcctgcaatcctggaaacacttggaagatggtgcgcgtaccgaaacagccgaggagctgagggctttggctaagaaactggagcaggagctcgatcgactgactcagcaccaccggcatttaccccagaaggcaagccaaacttgctcttccagcaggggcagagctgttcgggggagccgcgtcgttaaaccagaaggatcaagatctccactgccctggcccgtcgtcgaacaccaacctcgcttagggccgggtgtcgctttacgaacgcccaaaaggaccgtctctgcgccaaggatgttgggtcatcaaccagcacctcctgccccggctaggaagggtcgccaggccccaggtcgacatcgacagtag

SEQ ID NO: 179307 - DNA, 1032 bp, synthetic construct
  misc_feature 1..1032: note = Description of Artificial Sequence: Synthetic coding sequence
  source 1..1032: mol_type = other DNA
atggacaaccaggccgagcgggagagcgaggccggcgtgggcctgcagcgggacgaggatgatgcacccttgtgcgaggatgtggaactccaggatggcgacttgagccctgaggagaaaatatttttgagagagttccccagattgaaagaagaccttaaagggaatatcgataaattgcgggccttggctgacgacattgacaaaacccataaaaagttcactaaggccaacatggtggctactagtacggcagtcatcagtggcgtgatgtctctgcttggtctggcgctggccccagccacaggggggggctcactgctcttgtcaaccgccgggcagggccttgccaccgccgcgggcgtcacttctattgtctccgggacactggaacggtcaaaaaacaaggaggcacaggctcgagcagaggacatcttaccgacctacgatcaggaagaccgggaagacgaagaagaaaaagccgactatgtgaccgctgcagggaagatcatttataacctccgcaatactctgaaatatgccaagaagaacgttcgtgccttctggaagctcagggcaaacccaaggctggctaatgcgactaaacggttgctgactacaggccaggtgagctccaggtctcgggtgcaagtccaaaaagcctttgcgggaaccacccttgctatgacaaagaacgctcgcgtgcttgggggagtgatgtctgccttcagcctgggatatgatttggctacattgtcaaaggagtggaaacatctgaaggagggagcgcgcacaaaattcgccgaagaactgcgcgccaaggcgctggagctggagcgcaaactcacggaactcacccaactgtacaagagtctgcagcagaaggtgcgatcacgtgctaggggtgtggggaaggatctcactggaacatgtgaaaccgaggcatactggaaagaactccgggagcacgtatggatgtggttatggctttgtgtttgcctttgcgtttgcgtttacgtgcagtttacatag

SEQ ID NO: 179308 - DNA, 540 bp, synthetic construct
  misc_feature 1..540: note = Description of Artificial Sequence: Synthetic coding sequence
  source 1..540: mol_type = other DNA
atgttcaaggtgatccagcggagcgtgggccccgccagcctgagcctgttgacctttaaagtgtatgccgctccgaagaaagactcaccccccaaaaatagcgtcaaagtggacgaactctcactgtatagcgtccccgaaggacaatcaaagtatgttgaggaggcccgcagccagctggaagaatcgatttcacagcttagacactactgtgagccatacactacctggtgccagaccgccatgactatatctaaaatgcacttgcttttttttcccaggcttggcgtcattgggttcgctgggctgatcggactgctcctagcaaggggatccaaaatcaagaagttggtgtacccacccggattcatgggtttggccgcttccctatattacccccaacaggcaattgtctttgcccaggttagcggcgaacgactgtacgattgggggctcagggggtacatcgtgattgaagacctttggaaagaaaatttccagaagccaggaaatgttaagaacagccctgggaccaaatag

SEQ ID NO: 179309 - DNA, 597 bp, synthetic construct
  misc_feature 1..597: note = Description of Artificial Sequence: Synthetic coding sequence
  source 1..597: mol_type = other DNA
atgttcaaggtgatccagcggagcgtgggccccgccagcctgagcctgcttacctttaaggtatatgcagcccctaaaaaggacagtcctcctaaaaactcagtcaaagtggatgagctctcactgtactccgtccctgaaggccagtctaagtatgtggaagaggcaagaagccagctggaggaatccatatcccagctccgccattactgtgagccttacaccacttggtgccaagaaacatattcccaaaccaaaccaaagatgcaatctctcgtgcagtggggcctggattcgtatgattacctacagaacgctccccccggcttctttccgcggctgggcgtgattgggtttgccggtttaatagggctacttctcgcacgcggctccaagattaaaaaattggtttatcccccaggctttatggggctcgcagcgagtctgtactacccccaacaggcaatcgttttcgctcaggtcagcggggagcgtctttacgactggggtctgagaggctacatcgttatcgaagatctctggaaggagaatttccagaagcctggcaatgtaaagaactcacctggcaccaagtag

SEQ ID NO: 179310 - DNA, 537 bp, synthetic construct
  misc_feature 1..537: note = Description of Artificial Sequence: Synthetic coding sequence
  source 1..537: mol_type = other DNA
gtgtacgccgcccccaagaaggacagcccccccaagaacagcgtgaaggtagacgaattgagtctgtactctgtgcctgagggccagtccaagtacgttgaagaagcccggtcacaactcgaagagagcatttcgcagctcagacattactgcgagccttacactacctggtgtcaagaaacctattctcagaccaagcctaaaatgcaaagccttgtgcaatgggggttagactcttacgactacctgcagaacgccccaccaggtttcttcccacggctgggcgtgataggcttcgcagggctcatagggctgctccttgctagagggtccaaaattaaaaagctggtatatccgcccggtttcatgggcctggccgcaagcctctactaccctcagcaggcaattgtttttgcccaggtgtccggcgaacgtctttatgattgggggctgcggggatacattgtaattgaggatctttggaaggaaaatttccagaagccaggtaacgttaaaaactcccctggcaccaagtag

SEQ ID NO: 179311 - DNA, 1332 bp, synthetic construct
  misc_feature 1..1332: note = Description of Artificial Sequence: Synthetic coding sequence
  source 1..1332: mol_type = other DNA
atggaccggctgggccccttcagcaacgaccccagcgacaagcccccgtgcagaggctgctcgtcttacctcatggagccatacatcaagtgcgcagaatgtggtcctccccccttcttcctctgccttcagtgttttacacgggggtttgaatacaaaaagcaccagagcgatcacacctatgagattatgaccagtgacttccccgtactggatccctcttggaccgcccaggaggagatggctctgcttgaagccgtcatggactgcggcttcggcaattggcaggatgtggctaaccaaatgtgcaccaaaacaaaggaagagtgcgaaaagcactatatgaaacacttcattaataaccccttatttgccagcacgctgctcaatcttaagcaggcagaggaggctaaaacggctgacactgctatcccttttcacagtacagatgatccgccccgtcctacttttgacagcctcctgtctagagatatggccgggtacatgcctgcaagagcggatttcatcgaggaatttgataactatgccgagtgggacctgagggatattgactttgtagaggacgactccgacatcctgcacgctctgaagatggctgtggtcgacatttaccacagccggctcaaggagaggcagaggcggaaaaaaattattcgagaccatggattgatcaacctgcggaagttccagcttatggagcggaggtatcctaaagaagttcaggatctgtacgagaccatgagacggttcgcccggattgtgggtccagtggaacatgacaaatttatagaaagtcacgcactagaatttgaactgagaagagaaatcaagcgcctgcaagagtaccgcactgccggcatcacaaatttctgctcagcacgcacatatgaccacctgaaaaaaacgcgcgaggaggaaaggcttaaaaggacaatgctttctgaggtcttgcagtatattcaggactcttcagcatgccagcaatggctgcgacggcaggcggacatagactccgggttaagcccttccataccaatggcttccaacagtgggcggcgttccgccccacctctcaacctgactgggctcccaggtaccgaaaaactcaacgagaaagagaaggaactttgtcaaatggtgaggctcgtgcccggggcatacttagagtataaatcggctctactcaacgagtgcaacaaacaagggggtctcagactcgcccaggcaagggcattgattaaaatcgacgttaacaagacaaggaagatatatgattttctcatcagagagggctacattactaaaggatag

SEQ ID NO: 179312 - DNA, 978 bp, synthetic construct
  misc_feature 1..978: note = Description of Artificial Sequence: Synthetic coding sequence
  source 1..978: mol_type = other DNA
atggtgccccgggaggcccccgagagcgcccagtgcctgtgcccctctctgactataccgaatgcgaaggacgttctccggaagaggcacaaacgacgcagcagacagcaccagcggttcatggcccggaaggcccttttgcaggaacagggcctcttaagtatgccacctgagccagggtctagcccgctccctacaccgtttggcgcagctaccgctaccgaagccgcgtctagcggcaaacagtgtctgagagctggttctggaagcgccccttgctcaaggagaccggctcccggcaaggcttctgggcctctgcctagcaaatgcgtggcgattgactgtgaaatggtaggcactgggccgcgtgggcgcgtgtcagaactggcgcggtgttccatcgtcagctatcacggaaacgttctctacgacaagtatatcagacccgagatgcctattgccgattaccgtacccgatggtccggaatcacaaggcagcatatgagaaaagcagtgcctttccaggttgcccaaaaggagattctgaagttgttgaaaggaaaggttgtggtcgggcacgcgctgcataatgactttcaggctttgaagtatgtccacccacgcagtcagacccgagacacaacatatgtgccgaattttcttagcgagcccggcctgcatacccgggcgcgcgtatctctcaaggatctcgccttgcagctgctgcacaaaaaaatccaggtcgggcaacatggtcactcgagtgtcgaggacgcaaccactgctatggagctctatcggttggtggaagtccagtgggagcaacaggaggccagatctttgtggacttgcccagaagacagggaaccagacagcagcaccgacatggagcagtatatggaagatcaatattggcctgacgacctagcacatggttcgaggggcggggctagggaggctcaggaccggcggaactag

SEQ ID NO: 179313 - DNA, 984 bp, synthetic construct
  misc_feature 1..984: note = Description of Artificial Sequence: Synthetic coding sequence
  source 1..984: mol_type = other DNA
atggtgccccgggaggcccccgagagcgcccagtgcctgtgcccctcactgaccattcctaatgcaaaagatgtcctgaggaagcgccacaagcgacggtcgagacagcatcagcgcttcatggcccggaaagctctcctgcaagagcaaggtttactatcgatgcctccagagcccggaagcagccccttacccacccctttcggagccgcgactgccactgaagctgctagctccgggaaacagtgcctcagggccggctccggctctgctccatgttcccgccgtccagcaccaggtaaggcttcaggccccctgcctagtaagtgtgtcgcaattgattgcgaaatggttggaaccgggccacggggacgcgtttcagagctggcgaggtgctccattgtaagctaccacgggaacgttttatacgacaaatacatacggcccgaaatgccaattgcagactatagaactcgctggtccgggattacccggcagcacatgagaaaagccgtgccctttcaagtggctcaaaaggaaattcttaaactactgaaggggaaggttgttgtcggtcacgccttgcataatgacttccaagccctgaaatacgttcaccctcgatcacagacgcgtgatacaacgtatgtacccaactttctctccgaacccggactgcacacaagagctcgcgtgtctctgaaggatctggccctgcaactgcttcataagaagatccaggtcggccaacacgggcattcaagcgtagaggacgccactacagcgatggaactctacaggctcgtagaagtacaatgggagcagcaggaggcgaggtccctatggacatgtcccgaagaccgggaacccgatagtagcactgatatggagcagtatatggaagaccaatccacccaatactgggctttaaaacagaagagtgagaagcaggactccggtcttaattccggcgctttcgtatag

SEQ ID NO: 179314 - DNA, 1515 bp, synthetic construct
  misc_feature 1..1515: note = Description of Artificial Sequence: Synthetic coding sequence
  source 1..1515: mol_type = other DNA
atgcccaccgtggaggagctgtaccggaactacggcatcctggccgacgctaccgaacaggtggggcagcacaaggacgcttaccaggtgattctcgacggtgtgaaggggggaactaaggagaagcgcctcgctgcgcagttcatccccaaattcttcaagcacttccctgagctggccgactccgctatcaacgcccagttggacctgtgcgaagatgaagatgtgtctatacggcgccaggctattaaggaactgcctcagtttgcgaccggcgaaaatctaccaagggtagcagacatcttgacgcagttgctgcagactgacgacagtgccgagtttaacctcgttaataatgcgttgctgtccatttttaagatggacgccaagggtacgctgggtggattgtttagccaaatactgcagggcgaagatatcgtgagagagcgcgcaataaagttcctctccactaagctcaagaccctcccagatgaagtgctcaccaaagaggttgaagaactgattctcacagaatctaaaaaggtgctggaagatgtgactggggaggagtttgtgctgtttatgaaaatcctgtctgggctgaagtccctgcaaactgtgagcggccgtcaacaactagtcgaacttgtggctgaacaggctgatctagaacagaccttcaacccatcagatcccgattgcgtagacagactcctccaatgcactcgtcaggctgttccactgttctccaagaacgtgcactctacccgcttcgtgacctatttttgcgagcaagtactcccgaatctgggcacactgaccacgcctgtggaaggactagatatacaactagaggtgcttaaactgcttgccgaaatgtcctctttctgcggcgacatggaaaaactggagacaaacttacggaagttgtttgataagctcttagagtatatgcccctgccaccagaagaagctgagaatggtgagaatgccggtaatgaagagcctaaattgcagttttcctatgtcgaatgtctgctgtattcattccaccagctcggacgcaagctccccgactttctgaccgccaagcttaacgccgagaaactcaaggacttcaaaattaggctacagtattttgcccgcggcttgcaggtctatattcggcagctgcggctggcgcttcaagggaaaaccggtgaggctcttaagacagaggagaacaaaattaaagtggtagcactgaaaatcacaaacaacatcaatgtgcttatcaaggatctgtttcacatcccacctagctataagtcaacagtaacattaagctggaaacctgtgcaaaaagttgagatcggacagaaacgggcctctgaagataccaccagcggtagtccgcctaaaaagtcgagcgccggccctaaaagagacgcccggcagatttacaatcccccgagcggcaagtattcaagcaatcttggaaactttaactatgagaggtctctacagggtaagtag

SEQ ID NO: 179315 - DNA, 1353 bp, synthetic construct
  misc_feature 1..1353: note = Description of Artificial Sequence: Synthetic coding sequence
  source 1..1353: mol_type = other DNA
atgcccaccgtggaggagctgtaccggaactacggcatcctggccgacgccactgaacaggtggggcagatccgtcgacaagcaattaaagagctgcctcagtttgccacgggagagaatttaccccgtgtggctgacatcctgacccagctgctccagacggatgattctgccgagttcaatttggtgaacaacgcgctcctgagcattttcaagatggacgctaagggtaccttaggaggcttgttttcgcagatcttgcagggtgaagacatcgtgcgggagcgggccatcaagttccttagcacaaagctgaagacgttaccagacgaggtccttacaaaggaagtcgaagaactgatcctcacggagagcaaaaaagtccttgaggatgtaaccggcgaggagttcgtgctctttatgaagattctgtcagggttgaagtccctacaaactgtgtctgggaggcagcaactcgtggagctggtcgctgagcaggctgatctggagcaaaccttcaacccttccgacccggactgcgtagatagattactgcagtgcacacggcaggccgtccccctgtttagcaagaacgtccactcgactcggttcgttacgtatttctgcgagcaggtgctccccaatcttggaacccttacaaccccggttgagggcctggatattcagctcgaagttttgaagctgttggctgagatgagctcattttgtggcgatatggagaagctcgaaactaacctgcgcaaattgtttgacaagttgctcgaatacatgccactgcctccggaggaggccgaaaacggggagaatgctgggaacgaggagcctaaactccaattcagctacgttgagtgtctgctgtattcttttcatcagctggggagaaaactgcctgatttcctgactgccaaactgaacgcggaaaaactcaaggactttaaaatacgtctgcagtacttcgcacgcggtttacaggtatatatccgccaacttaggttggccctccagggaaaaacaggggaggctctcaaaaccgaggaaaataaaattaaggtcgtcgcccttaaaatcactaataatatcaatgtgttaataaaagacctgtttcacattccacccagctacaaatccactgtgacactctcctggaaacccgtgcagaaggtggagattggacagaagcgggctagtgaggacaccacatctggatccccccccaaaaagtcctccgcaggacctaaaagagatgccagacagatctataaccctccaagcggcaaatactccagtaacctcggcaatttcaactacgagagaagtttacagggaaaatag

SEQ ID NO: 179316 - DNA, 1575 bp, synthetic construct
  misc_feature 1..1575: note = Description of Artificial Sequence: Synthetic coding sequence
  source 1..1575: mol_type = other DNA
atgcccaccgtggaggagctgtaccggaactacggcatcctggccgacgcaactgagcaggtgggccagcacaaagacgcgtatcaggttattctagacggtgtcaaggggggcactaaggagaaaaggttggcagcacaatttataccaaagttctttaagcacttcccagagctggcggactctgccattaatgcgcagctcgatctctgtgaggacgaggatgtatccattagacgtcaagccataaaggaacttccacagtttgcaactggggaaaatctgcctcgcgttgccgatatcttgactcaactgctgcagacagacgactctgctgaatttaaccttgttaacaacgctctcctttcaatttttaaaatggacgcgaaaggtacactaggcggtttatttagccaaatcttgcagggagaggatattgtccgggagagagcaattaaatttctgagcaccaaacttaagacattgcccgacgaagtgctgacaaaggaagtggaggagcttattttgaccgagtctaaaaaggtgcttgaggatgtcacaggcgaggaattcgttctgttcatgaaaatcctgtctggattgaagtccttgcaaactgtatcaggtcggcaacagctggtcgagctagtcgctgaacaggctgatctggaacagacattcaacccctccgatcccgattgcgtggacaggctcctgcagtgtacacgtcaagctgtgcctttgtttagtaagaacgtccactccacgaggtttgtgacctacttttgcgagcaggtgctgcccaacctcgggactttgacgacccctgttgagggcctcgatatccaattggaagtccttaaactgctcgctgagatgtccagcttttgcggtgacatggagaagttggaaactaacctgcgcaagcttttcgacaaacttctggaatacatgccactgccccccgaggaagcggagaacggtgagaacgccggcaatgaagaacctaaactccaattctcgtatgtagaatgcctgctctactccttccaccaactgggaaggaagttaccagattttttgaccgctaaactcaacgccgagaagctgaaggacttcaagattagactccagtattttgcccgaggcctgcaggtgtatatccgtcagctgcggctggccctgcaggggaaaaccggcgaggcccttaaaacagaagagaacaagatcaaggtagttgccctgaagatcacaaacaatattaatgtgctcatcaaagatctgtttcacataccacccagttacaagtctaccgttaccctttcttggaagccggtacagaaggtggaaatcggacagaagagagccagcgaagatacaacctcaggatcaccccccaagaaatcgagcgctggtccaaaaagagatgctcgacagatttacaatccaccatccggcaagtatagttccaatttggggaacttcaattacgagcagagaggggcttttcggggaagcaggggggggcggggatggggcacacggggtaaccgatccagaggccggctttattag

SEQ ID NO: 179317 - DNA, 1533 bp, synthetic construct
  misc_feature 1..1533: note = Description of Artificial Sequence: Synthetic coding sequence
  source 1..1533: mol_type = other DNA
atgcccaccgtggaggagctgtaccggaactacggcatcctggccgacgcaaccgaacaagtcgggcagcacaaggatgcatatcaagtgatcctcgatggggttaaagggggaaccaaggaaaaacgccttgccgctcaatttatacccaagttcttcaaacattttcctgaactagcagacagcgccattaatgctcagctggatctatgcgaggatgaagacgtatctatccggcgtcaggctatcaaggagcttccccagttcgcaaccggcgaaaatttgcctcgggtcgccgatatcttgacacaattgctgcagacggacgactctgcagaattcaatctggtgaataatgccctgctgtccatcttcaagatggacgcgaaagggacattaggagggctcttctctcagattctgcagggcgaggatattgttagggagcgggctataaagtttctctcaacaaaactcaaaaccctgcctgacgaagttttgaccaaagaagtggaggaattaattctgactgagagcaaaaaggttcttgaggacgtgacgggtgaggagttcgttctgttcatgaagatactctccggcctgaagagcctccagaccgtttctggaaggcagcagctggttgagttggtcgccgaacaggcggacctcgagcagacttttaacccatcagaccccgactgcgtagacaggctcctgcagtgtacacgacaggctgtgcccttgttcagcaaaaatgttcacagcacaagatttgtgacctatttctgcgagcaggtcctcccaaacctagggactctgacaaccccagtcgaaggattagatattcagctggaagttctcaagctactggcggaaatgagttctttttgtggggacatggaaaagctggaaaccaaccttcggaaactgttcgacaagctgctggaatatatgcctcttcctcctgaagaagctgaaaacggggaaaacgccggcaatgaggagcccaaacttcaattttcctacgtggaatgtctgctttatagcttccatcaactgggcaggaaacttcctgattttctgactgcaaaactcaacgctgagaagttgaaagacttcaaaatcaggttacagtattttgccagagggcttcaggtgtacattagacaactcagattagccctgcaaggtaagacaggcgaagccctgaaaaccgaggagaacaagattaaggtggttgccttgaaaatcacaaataatatcaacgtgctcatcaaggacctgtttcatatccccccttcttataagagtactgtcacgctgagttggaagccagttcagaaggttgagattggccaaaagagggctagcgaggacactacatcaggctccccccctaaaaaaagttccgcgggccctaagagagacgccagacagatatacaatccaccctctggcaaatactctagcaatctgggaaactttaactacggcgaacgcttcaggctcggcacgagaaatatgcgtgactag

SEQ ID NO: 179318 - DNA, 1089 bp, synthetic construct
  misc_feature 1..1089: note = Description of Artificial Sequence: Synthetic coding sequence
  source 1..1089: mol_type = other DNA
atgcaggccgagcggggcgcccggggcggccggggccggcggcccgggcgcggaagaccggggggggaccgtcactctgaaagacctggcgctgccgcggccgtggccagaggaggagggggtggcgggggaggcgacggcgggggcaggagagggcgtgggagaggccgcggatttcgaggcgctcgaggaggccgaggcgggggaggtgcgcccagggggtcaaggcgggagccaggaggttggggagcaggggcttcagcccccgtggaagacgactctgatgcagaaacctacggagaagagaatgacgagcaggggaactacagtaagagaaaaatagtgagcaattgggatcggtaccaggatatagagaaggaggtaaacaacgagtccggcgagagccagagggggactgatttcagcgttttactaagcagcgccggcgacagcttttcccagtttcgctttgccgaggaaaaagagtgggacagcgaggcttcctgccctaagcagaacagcgccttctacgtggatagtgaattacttgtgcgagccttacaggagctccccctttgcttacgattaaatgtagccgccgaactggtgcagggcacagtacctctggaagttccacaggtgaaacctaagcggacagacgatggcaaaggattgggtatgcagttgaagggaccacttggcccaggcggtaggggccccattttcgagctcaaaagcgtggctgccggctgtccagtcctcttgggcaaagataacccaagtccaggtcccagtagagactcccagaagccaacatctcctctccaatcagccggggaccaccttgaggaagagttggatctactgttgaacctggacgcccccattaaagaaggagacaacatactgcccgatcagacatcgcaggatctgaagtccaaggaagatggagaagtcgtccaggaggaggaggtttgtgccaagccgtccgtgacagaggagaaaaacatggaaccggagcagccatctactagcaaaaatgtgacagaagaggagttagaggactggttggactccatgattagctag

SEQ ID NO: 179319 - DNA, 4125 bp, synthetic construct
  misc_feature 1..4125: note = Description of Artificial Sequence: Synthetic coding sequence
  source 1..4125: mol_type = other DNA
atgagcagcagcttcttcaaccccagcttcgccttcagcagccacttcgaccccgatggagcacctctgagcgagttgtcttggcctagttccttagccgtggtggcagtaagctttagtggcctgttcgccgttattgtgctcatgctggcatgtctgtgttgcaaaaagggaggaattggatttaaggagttcgaaaatgcggaaggtgacgaatatgctgccgacctcgctcagggttcaccagctactgccgcccaaaacggacctgacgtttacgtcctgcctctgacagaagtgtccctgccaatggccaaacagcccgggagaagcgtccaacttcttaaatcaactgacgtcggcagacacagtctgttgtatctcaaggagataggaaggggatggttcggcaaagtcttccttggcgaggtcaactccggcattagctctgctcaggtggtggtcaaagagctgcaggcttccgctagtgtacaagagcaaatgcagttccttgaggaagtgcagccttacagggcccttaagcacagcaatctgctccagtgcctcgcgcagtgtgctgaagtgactccttatctgcttgttatggagttctgcccgttgggtgatttaaagggatacctgaggagttgtcgcgtggccgaatctatggccccagaccccaggacccttcagcggatggcctgtgaagtggcatgcggcgtcttacacctgcaccgcaacaacttcgtacatagcgacctggccctgcgcaattgtttactaaccgccgacctcacagtgaagatcggagattatggattggcacattgcaaataccgggaagattactttgttaccgctgatcagctgtgggtgcctcttcggtggattgcccccgaactggtggacgaagtccactcaaatctgctggtcgtggatcagacgaagtctggcaatgtctggtcgttaggagttaccatttgggagctcttcgaactgggtacacaaccatatccacaacactcagaccagcaggtccttgcgtatactgtgagagaacagcagttgaaactccccaagccccagttacagcttacgctttctgatcgctggtatgaggtgatgcagttttgctggctgcagccagaacagcgccctactgcagaggaagtccatttattgctgtcctatctatgcgccaaaggagccacagaggctgaagaggaattcgagcggagatggagatccttgagacccggcggcggaggtgtcggccccgggcccggagctgccgggcccatgctcggcggggtcgtggagctggccgcagcctcgtccttcccattgttggagcagtttgcaggggatggattccatgccgacggcgatgacgtgctgaccgtgacagagacttctcgaggcctgaactttgaatacaagtgggaggcgggaagaggggcggaggcatttccagctaccctttcccctggaaggaccgctaggttgcaggaactgtgcgcacctgatggcgccccgccaggggtggttccggtgctctctgcccattcaccgtcacttggatcagaatacttcattaggctggaggaagcagctccggctgcagggcatgacccggattgtgctgggtgcgctccaagtccgccagccaccgctgaccaagacgacgacagtgacggtagcacagccgcatccttagccatggagccgctactgggacatggtccccccgtagacgtgccatggggccggggggaccactatccccgccgctcgctggcccgggatccactctgccccagccggtcccccagcccatccgcagggccgctgagtctggccgaggggggcgctgaagacgccgactggggtgtggctgccttttgccctgctttttttgaggatcccctcgggacaagtccactgggaagttccggcgctccccccctccccctcacgggagaggatgagcttgaagaagttggcgcacggagggcggcacagcgcgggcattggaggtccaacgtgagcgccaacaacaattcagggtcccggtgccccgaaagttgggatcctgtgagcgcaggggggcacgctgagggatgtccatcgcccaagcagactccgcgtgcttcccccgagcccggataccctggggagccacttcttggtttgcaggccgcctctgcgcaagaacctggttgttgccccggtctgcctcatctctgtagcgcacagggactcgctccagccccatgccttgtgacaccgagctggaccgagactgcctcctctggcggcgatcacccccaggcggagccgaagttagccactgaggcggaaggaacaaccgggccaagactgcccctgccctcagtcccatccccctctcaggaaggcgcacctctcccatctgaagaagcctccgccccagacgccccggacgccctgccggactcacctacacctgcgacagggggggaagtctccgctattaagcttgcatccgctctgaacggcagtagttcttctccagaggtggaggcccccagctccgaggacgaagataccgccgaagcaactagcgggatatttacagacacgagtagtgacgggttgcaggcccgccgtccggatgtggtgcctgccttccgctccctacagaaacaggtgggcacccccgattctctggatagcctcgatatcccaagttcagccagcgatggcggctacgaagtttttagccccagcgccacgggacctagcggcggccaaccacgagcactcgattccggctacgatacggaaaactatgagtctcctgagttcgtgctgaaggaggcacaagaaggctgtgagccacaagcctttgcagagctggcatcagagggagagggccctggcccagaaaccagactctccacttcactcagcggtctgaacgagaaaaatccctatcgcgatagtgcctactttagtgacctcgaggccgaggccgaggccacttcaggaccagaaaaaaaatgcggaggagaccgcgcccccggaccagaactgggactgcccagcactggccagccgtcagaacaggtatgtctgcggcccggagttagcggcgaggctcagggttccgggcctggagaagtattacccccactactgcaattggagggctcttccccagaaccctcaacctgtccatctggcctggtccccgagccacccgagccccagggacctgccaaggttcgccctgggccatcaccctcctgctcacagttctttttgctgacccccgttccactgaggtccgaaggcaactctagcgagtttcagggtccccctggcttactgtctgggcctgcgccacagaaacggatgggcggacctggcacgccacgcgctcccctacgactggcacttcctggtttgcctgcggcactagagggccggcccgaggaggaagaggaagactccgaggatagcgacgaaagtgatgaggaactcaggtgttactctgtgcaggaaccttccgaggactctgaagaagaggcccctgcggtgccggtagtggtggctgagagccagtctgctcggaatctccgcagtctgctgaaaatgcccagcttactgtccgagacgttctgcgaggaccttgagaggaagaagaaagcagtctctttttttgacgacgttacagtgtacctctttgaccaggaatcacctactagggaactcggcgagccattccccggggcgaaggagtccccacctacatttctgcgcgggagccccgggtccccaagcgcacccaacaggccccagcaagcagacggttcccctaatgggtcgactgccgaggagggcgggggatttgcttgggatgacgattttccattaatgaccgcaaaagccgcttttgctatggccctggaccctgctgctccagcccctgctgccccaacccccactccagcgccattcagccgatttactgtgagtcccgctcctacttctaggttctcaatcacacatgtgtccgatagcgacgcagaaagtaaacgcggtcccgaagccggagccggtggagaaagcaaggaggcctag

SEQ ID NO: 179320 - DNA, 2640 bp, synthetic construct
  misc_feature 1..2640: note = Description of Artificial Sequence: Synthetic coding sequence
  source 1..2640: mol_type = other DNA
atgagcagcagcttcttcaaccccagcttcgccttcagcagccacttcgacccagacggcgccccgttatccgaattgagttggccatcctctctggccgttgtggccgtgtccttttcagggcttttcgctgttatcgttctgatgctcgcatgtctttgctgcaaaaaaggtggtattgggtttaaagagttcgagaacgctgaaggagatgagtacgctgcagatctcgcccagggctctccagctacagccgcacagaacggtcctgacgtatacgtgctccctctgacggaagtgtccttaccaatggcgaaacaacccggtcggtctgtgcagctcctcaaatcgaccgatgtgggtagacattccctgttgtatcttaaagaaatcggaagaggctggttcggtaaggtttttctcggggaggtgaatagcggcatttcatctgctcaggtggtggttaaggagctccaagccagcgcctccgtgcaagaacagatgcagttccttgaagaggttcaaccctaccgggccctaaagcattccaacctgctacagtgtcttgctcagtgcgcagaggtgaccccataccttctggtcatggaattctgtcctttgggagatctgaaggggtatctgcgaagctgtagggtcgctgagtccatggcccctgatccaaggaccctccagaggatggcttgcgaagtcgcatgcggtgtgctccatctccacagaaacaacttcgtacattctgatctcgcactccgcaattgtctgctgactgcagatctaacagtgaaaatcggggattatggcctggctcattgtaaatatagggaggattactttgtaacagccgatcagttgtgggtgccattgcgttggatcgctccagagctagtcgacgaagtgcacagcaacttgctggttgttgaccaaactaagtcaggcaatgtttggtcgctgggggtcacaatatgggagctcttcgaattgggcacccagccctatccccaacactctgaccagcaggtgctggcctacactgtccgagaacagcaactgaaactgccgaaaccccagctgcaactgaccttgtcagacaggtggtatgaagtaatgcagttctgttggttacaacctgagcaacggcccaccgctgaggaggttcacctgcttttaagctacctgtgtgcaaagggtgcaaccgaagcggaggaggagtttgaacggaggtggaggagcctcagacctggtggtggaggagttggaccagggcctggagcagccgggccaatgctgggcggagtggtggaattggctgccgccagttccttcccactgctggagcaatttgccggcgatggctttcacgcagatggggacgatgtgctgaccgaactgtgcgccccagatggggcccctccaggagtagtgcctgtgctcagcgcccattcccctagtctaggttccgagtacttcatcaggcttgaggaagcagcccctgccgcaggtcacgatcccgactgtgcaggttgtgccccgagcccccccgcaacagccgatcaggatgacgactccgacggctctacggcagcgagcctggcgatggagcccctcttgggacatggtcctcccgtggacgtcccttgggggagaggcgatcactacccaaggagaagtctggcccgtgaccctctctgtccgtccagatccccttcccccagtgccggaccactctctctggcggaaggcggcgcagaggatgccgactggggagtcgccgcgttttgccccgcgttttttgaggaccctctcgggactagtcccctcggaagcagtggcgcccctcctctgccattgacaggcgaagatgaactcgaggaagtcggagctagacgggccgctcagcgggggcactggcgtagcaatgtgtccgccaacaacaacagtggttcccgctgtcctgagtcatgggaccccgtctccgccggcggccacgcagaaggttgtccatcacccaagcagacaccccgggccagccccgagccggggtatccgggcgagccattgctcggcctgcaggccgccagtgcccaagagccaggctgctgtcctggacttccacacctgtgttcggcacagggcctcgctcctgctccgtgcttagtgacaccttcatggacggaaacagcatcatccggaggggaccatccacaagccgagccaaagctggccaccgaggccgagggaacgaccgggccaaggctcccgctgccttccgttccatcccctagtcaggagggcgctccactcccctcagaggaagccagtgcccccgacgctccagacgcactgcctgatagccccactccagccactggcggtgaagtgtctgctatcaaactggccagtgccctgaatggcagctccagcagcccagaggtagaggccccaagcagcgaagacgaagatactgcagaggcaacctcaggaatcttcacagacacctctagtgatggcttgcaggcccggcgcccggacgtggtccccgcttttcgctctcttcaaaagcagtggccccagagagaagaatctctgcctcgtctgtgtttgctcctgcggcccagagggtag

SEQ ID NO: 179321 - DNA, 3984 bp, synthetic construct
  misc_feature 1..3984: note = Description of Artificial Sequence: Synthetic coding sequence
  source 1..3984: mol_type = other DNA
tgacaccaggtgaaggtgcagggctgctggggccggtggcggtggcaggagtttgaaaatgctgagggtgacgaatatgccgccgatctggctcaggggtcacctgcgaccgctgcccagaacggtcccgacgtatatgtcctccccctgaccgaggtgagcctacccatggctaagcaacccgggagatctgtccaactgctgaagtctacagacgtgggacggcactccctcctgtacctgaaagaaatcggcagaggctggttcggaaaggtctttttgggagaggttaactctggaatcagtagcgctcaggtggtggtgaaagagctccaagcttcagcttccgttcaagaacagatgcagtttctggaggaggtccagccctacagggccctcaagcactccaatttgctgcagtgtctagctcaatgcgccgaagtgaccccatacctgctagtcatggagttttgtccactgggcgatttaaagggctaccttaggagctgccgggtggcagaatccatggcaccggacccccggacgctgcagaggatggcatgcgaggtcgcttgtggcgttctgcacctccatcgaaacaactttgtgcactccgacctcgctctgaggaattgcctactgactgccgatttgacagtgaagatcggagactacgggttggcccactgcaaatatcgcgaggactacttcgtgactgccgaccagctatgggtgcctctgaggtggatcgcccccgagctggtggatgaggtgcattccaatcttctggtagtagatcagaccaagtcaggcaacgtatggtccctgggcgtaaccatctgggagctgttcgaacttggcacgcagccctaccctcagcacagtgaccagcaggtactcgcctataccgtaagggagcagcagctcaaacttccaaaaccacagctgcagttaaccctcagcgatcgctggtacgaagtgatgcaattttgctggttgcagcccgaacaaagacctaccgcggaggaagtccacctgctgcttagctacttatgtgccaagggcgccacagaagcggaggaagaatttgagagaaggtggcgcagcctccggcccggtggcggcggagtgggccctggtccaggcgcggccggacctatgcttgggggggttgtcgagctggcagccgcctctagtttccccctcctggagcagtttgcaggcgatggatttcatgcagatggagatgacgtgctcaccgttactgagacatcccgcggcctaaactttgaatataaatgggaagccggtaggggagctgaggcatttcctgccacactgtctcctggcagaacagcacggcttcaggagctgtgcgcccccgacggtgctccccctggggttgtgcccgttctgtcggcccactccccttcattagggagcgagtattttattcggcttgaggaggctgccccggcagccggccatgaccctgactgtgctgggtgtgctcctagcccccctgcaactgctgatcaagatgacgactctgacggatctactgccgcaagcttggccatggagccattgctgggccacggaccacccgttgacgtcccctggggccgaggcgatcactatccccggcgatcactggcccgcgacccactgtgtccaagcagatcaccaagtccctccgcaggacccctgagcctcgcagaggggggagccgaggatgcagactggggggtggctgctttctgcccagcctttttcgaggatccgctcggaacaagcccacttggttctagtggagccccacccttgcccctcacaggtgaggacgagctggaagaggtgggcgctcgacgggctgctcagaggggtcactggcgatcaaacgtgagtgctaacaacaacagcgggtcacggtgcccggagagctgggaccccgtaagtgcaggtgggcatgccgaggggtgtccttctcccaagcagacccctagggcaagccccgagcctggatatccaggcgagccactattggggctccaggctgccagtgcccaggagcccgggtgctgtccagggctgccacatctatgtagtgcccaaggcctggctcctgctccttgtctagttacgccatcttggacggagacagcaagttcaggtggcgatcatccgcaagccgagcccaagctggccaccgaagccgaaggcactactggtccacgcctaccactgccgagcgtgccatctcctagccaggaaggcgcccccctgccaagtgaggaggcatccgcccctgacgcaccagacgccctgcctgactctcctacacccgcaacaggaggggaggtctccgctatcaagttagcaagcgcgctgaatggatcatcatcatccccagaagtggaggccccctcctctgaagacgaagacactgctgaggccacttctggtatcttcaccgacacgtccagcgacggcttgcaggcgcgtcgacctgacgtcgtgcctgcatttcgctcccttcagaaacaagtaggaactcctgactcattagattccctggatatcccttcctcagcctcagacgggggctacgaggtcttctcaccaagcgccacaggacccagcggggggcagccccgagccttagactctggatacgacacggaaaactatgagagccctgagttcgtcctgaaagaagcccaagagggttgcgaaccccaagccttcgccgaactcgctagcgaaggagagggacctggccctgaaacccgtctttccaccagtcttagcgggcttaatgaaaagaacccctatagggatagtgcttacttttccgatctggaagccgaggctgaggccaccagcggccctgagaagaaatgtggtggggacagggcccctggccctgagctgggattaccctccacaggtcagccgtccgagcaggtgtgtttgagaccaggggtctccggggaagcacagggctccggacccggagaggttctccctcccctgctccagttggaggggtcaagtcctgagcccagcacatgcccatctggactagtccccgagccgcccgagccccagggacctgccaaggttcgacccgggccttctcccagctgcagtcagttttttctgctcacaccagttcccctgcgctccgaaggcaattcaagtgagttccaggggcctcccggtttgttgagcggcccggcaccccagaagaggatgggtggacccgggaccccccgcgcccctctgagactggcccttcctggcctcccagcagctctggaaggcagaccagaggaggaggaagaggactctgaagattctgacgagagcgatgaggagctgcggtgctatagtgttcaggaacccagcgaagattctgaggaggaggcccccgcagttcctgtcgttgtcgctgagtctcaatccgccaggaacctaaggtctttgctgaaaatgccatcactgctgtccgaaacattctgcgaggatctcgaaagaaagaagaaagcagtgtctttctttgatgacgttacggtctatttgtttgatcaggaaagccctactcgcgagttgggggaaccattcccaggagccaaggaatcgccccccactttcctgagaggcagccctgggagccctagtgcacctaatcgcccacagcaagccgatggctcccccaatggcagcaccgctgaggaggggggtggattcgcctgggacgacgacttccccctgatgactgcaaaagcggcatttgcaatggcgttggatcctgctgcccccgcgcccgccgcccccactcccacccccgcccctttctcacggtttactgtgtcgccagctcccacatctcgcttttcgatcactcacgtatccgattctgacgcggagtcaaaacggggcccagaggcaggcgctgggggtgagtcaaaagaagcctag

SEQ ID NO: 179322 - DNA, 417 bp, synthetic construct
  misc_feature 1..417: note = Description of Artificial Sequence: Synthetic coding sequence
  source 1..417: mol_type = other DNA
atggaggaggaggccgagaccgaggagcagcagcggttcagctaccagcagcggctgaaagcagccgttcactacactgtcggctgtctctgtgaagaggtggctctggacaaggagatgcagttttcaaagcagactatcgcagctatatctgagctgacctttcgccaatgcgaaaactttgccaaggacttggagatgttcgcccggcacgctaagcgcaccactatcaacacggaggatgtaaaactgctggcccggcgatctaattcattgctgaagtatataaccgataagtctgaggagatcgctcagataaatctggaacgaaaggctcaaaagaagaaaaaaagtgaggatggcagcaaaaactctaggcagcctgccgaggccggtgtcgtggagtctgagaattag

SEQ ID NO: 179323 - DNA, 495 bp, synthetic construct
  misc_feature 1..495: note = Description of Artificial Sequence: Synthetic coding sequence
  source 1..495: mol_type = other DNA
atggaggaggaggccgagaccgaggagcagcagcggttcagctaccaacagcgactgaaggcggctgtgcactatactgtcggctgtttgtgtgaagaggttgcattagataaggagatgcagttctccaaacagactatagccgctatctcggaactaacattcaggcagtgtgagaatttcgcaaaggatttggagatgtttgcacggcatgctaagagaaccaccattaacaccgaagacgtgaagctgctggcgcggcgttcaaactctctccacatgcaggaggctgccggcatccgaaaatcctccttattgacctttctggcctggtggtttgagtggacatctcaggccagcgccggcccactgattggggaagaggccagagaggtggcgcggagacaggagggagcccccccccagcagtccgctcgccgggatcgaatgccgtgccggaatttcttctggaaaacattctcttcctgcaagtag

SEQ ID NO: 179324 - DNA, 234 bp, synthetic construct
  misc_feature 1..234: note = Description of Artificial Sequence: Synthetic coding sequence
  source 1..234: mol_type = other DNA
atggaggaggaggccgagaccgaggagcagcagcggttcagctaccagcagagattgaaggccgccgtacactacacggtgggatgcctctgcgaagaggtggcgcttgacaaggagatgcaattctctaaacagaccattgcggcaatctcagagctgacctttcgtcaatgtgagaattttgccaaagatctcgagatgtttgcctctatatgccgaaaacgacaggagtag

SEQ ID NO: 179325 - DNA, 921 bp, synthetic construct
  misc_feature 1..921: note = Description of Artificial Sequence: Synthetic coding sequence
  source 1..921: mol_type = other DNA
atgagcaacgtgaacctgagcgtgagcgacttctggcgggtgatgatgcgggtgtgttggcttgtgcggcaggatagtagacatcagaggatcaggctccctcatttggaggccgtggtgatcggcaggggcccagagacgaagatcaccgataaaaaatgtagccggcagcaggttcaactaaaagcagagtgcaacaaggggtatgtcaaagtaaagcaggtcggcgtgaatcccacaagtatcgactccgtggttatcgggaaggatcaggaagtgaagctccagccgggccaagtcttgcacatggttaatgaactctatccatatatcgttgagtttgaggaagaagcgaagaacccaggcttagagactcacaggaagcgaaaaaggtctgggaacagcgacagcatagagcgggatgcggcacaagaagcagaagccgggaccggactggagcccggatctaattctggacagtgctctgtgcccctgaagaagggcaaggatgcgccaatcaagaaggagagtctcgggcattggagccagggcctgaaaatttccatgcaggatccaaaaatgcaggtttacaaggacgaacaagtggtggtgatcaaggacaaataccctaaagctaggtaccactggttggtcttgccttggacaagtattagctctctcaaagccgttgctcgtgaacatcttgagcttttgaaacatatgcacaccgtaggagagaaggtcatcgttgacttcgccggaagtagtaaactgaggtttcggctcggctaccatgcgatccccagcatgagccacgtgcacctgcacgtgatctcacaagacttcgactcaccctgccttaaaaataaaaaacactggaatagtttcaacactgaatacttcctggagagccaggaatag

SEQ ID NO: 179326 - DNA, 1014 bp, synthetic construct
  misc_feature 1..1014: note = Description of Artificial Sequence: Synthetic coding sequence
  source 1..1014: mol_type = other DNA
atgagcaacgtgaacctgagcgtgagcgacttctggcgggtgatgatgcgagtttgttggctggttcgccaggactcgcggcatcagcggatccgcctcccccatcttgaggcggttgtgattggaagggggccagagaccaagatcacagacaaaaagtgtagtcggcaacaggtccagttaaaggccgaatgtaataagggttatgtcaaagttaagcaagtgggagtgaacccaacctccatcgacagtgtggtgattggcaaagatcaagaagtcaagctgcagccagggcaggttcttcacatggtgaacgagctctacccttacatcgtggagttcgaggaagaggcaaaaaatccaggattggaaactcaccgtaaacgtaagcgcagcggcaattctgacagtatcgagagggacgcagctcaggaggccgaggccgggacaggcctggagcccggctctaactccggacaatgctcagtgccattgaaaaaggggaaagacgcacccatcaaaaaaaaagtgtacaaagacgaacaagtcgtcgttatcaaagataagtacccgaaagcacgctatcactggctggtcctcccctggaccagcatttcatcattgaaggccgtagccagggagcacctggaactgttgaaacacatgcacaccgtgggtgagaaagtcatcgtcgattttgcaggttccagcaagctgcgttttcggctgggctatcatgctattcctagcatgtcacatgtgcatcttcacgtgatcagccaggactttgattccccctgcctgaagaataagaagcactggaacagctttaataccgaatattttctggaatcccaagctgtgattgaaatggtgcaggaggcggggcgggtgacagttcgcgacggtatgcccgagctgctcaagcttccactgcgctgtcatgaatgtcagcaactcttacccagcataccacaactgaaagagcatttaagaaaacactggactcaatag

SEQ ID NO: 179327 - DNA, 1029 bp, synthetic construct
  misc_feature 1..1029: note = Description of Artificial Sequence: Synthetic coding sequence
  source 1..1029: mol_type = other DNA
atgatgcgggtgtgctggctggtgcggcaggacagccggcaccagcgaataaggctacctcatctggaggccgttgtgattggccgagggcctgagactaagatcactgataaaaaatgctcaagacagcaggttcagctgaaggcggaatgtaataagggctacgtgaaggtgaagcaggtgggggtgaatcccacttctattgatagcgttgtaattggcaaggatcaggaggttaagctccagcctggacaggttttgcacatggtcaatgagttgtacccatacatcgtggaatttgaggaggaagccaagaatcccgggctggaaacccatcggaagcgaaagaggagcggcaattccgattcaatagagagggatgctgctcaggaggcagaggccggtactggtctcgaaccaggttcaaactcaggtcagtgctctgtgccactgaaaaaaggcaaggacgccccaattaagaaggaatccctgggccactggtctcagggccttaagattagcatgcaagaccccaagatgcaggtctacaaagacgaacaagtggtggtcattaaggacaaatatcctaaagcccggtaccactggctggtgctaccatggaccagtatcagctccttgaaggccgtcgcacgcgaacaccttgagctgttgaagcacatgcacaccgtcggcgagaaagttattgtggactttgcaggcagttctaagctgaggttccgacttggatatcatgcaatcccatcgatgtcccacgttcacctgcatgtgatctcacaggatttcgactctccttgtctcaagaacaaaaaacactggaattcttttaacactgaatatttcttggaatcacaggcagtaattgaaatggtgcaggaggcaggccgcgtgactgtgcgggatggtatgccggaattgctcaagcttccattgcgatgccacgaatgccagcagctgctacccagtatccctcaactcaaggagcatttgcgtaagcactggacacagtag

SEQ ID NO: 179328 - DNA, 1071 bp, synthetic construct
  misc_feature 1..1071: note = Description of Artificial Sequence: Synthetic coding sequence
  source 1..1071: mol_type = other DNA
atgagcaacgtgaacctgagcgtgagcgacttctggcgggtgatgatgagagtgtgttggctagtacgccaagatagcaggcaccagcggattcgactgccgcacctggaagccgtggtgattggccggggcccagagactaaaattactgacaaaaaatgttcacgccagcaagtgcaactgaaggctgagtgcaacaaggggtatgtgaaggtcaagcaggtaggagttaatcctacctccatcgactctgttgtgatcggtaaagatcaggaagtaaagctgcagccgggccaggttctccatatggtaaacgaactgtacccctatattgtggagttcgaggaagaagctaaaaatcccggactggaaacccacagaaaacgcaagcgctccggtaacagtgacagtatcgagcgcgatgccgcccaggaggcggaagcgggtacaggcctcgaaccaggctccaacagcggtcaatgctcagtgcctctgaagaagggcaaagacgctccaattaaaaaagagtctttaggtcattggtctcagggtctgaagatctccatgcaagatccgaagatgcaggtttacaaggatgaacaggtggtggttattaaggataagtacccaaaggctaggtaccactggctggtactaccatggacgagcatttctagcctaaaagccgttgctcgggagcacctcgaattattgaagcacatgcatactgtcggagaaaaggtcatagttgacttcgccggctcgagtaagttaaggttcaggttgggataccacgctataccaagtatgtcacacgtccaccttcatgtgatcagccaggattttgattcaccttgccttaaaaacaagaaacattggaacagcttcaacacggaatattttctggaaagtcaagccgtcatagagatggtccaggaggctggcagagtaaccgtgagggatggcatgccagaactgctcaaactacctttgcgttgccatgagtgccagcagctgctcccaagtatcccgcagttaaaggagcacctccggaagcactggacccaatag

SEQ ID NO: 179329 - DNA, 921 bp, synthetic construct
  misc_feature 1..921: note = Description of Artificial Sequence: Synthetic coding sequence
  source 1..921: mol_type = other DNA
atgagcaacgtgaacctgagcgtgagcgacttctggcgggtgatgatgcgggtgtgctggctcgtcaggcaagattcacgacaccagcgaatacggctgccccacctcgaagctgtggttattgggcggggccccgaaaccaaaattaccgataagaagtgcagcaggcagcaagtgcagctcaaggcagagtgtaacaagggctatgttaaggttaaacaagtcggcgtcaatcctaccagtattgactccgtagtgatcggaaaagaccaagaagtcaagcttcagcctggccaagtgttgcacatggttaatgagctgtacccctatattgtggagttcgaggaggaggccaaaaacccgggccttgaaacccacaggaagcgtaagagaagcggaaattcagacagcattgaacgggatgccgcccaggaagctgaagccggcaccggtctggagcccgggtctaattccggccagtgttcggtacctcttaagaagggtaaggatgccccgatcaagaaggagagtctagggcactggtctcaggggctgaagatttctatgcaagaccctaagatgcaagtgtacaaggatgagcaggttgtggtgattaaagataagtatccaaaggcccggtatcattggctggtgcttccgtggacatctatctcatcccttaaggccgtcgctagagagcacctcgagctgctgaaacacatgcacactgtgggggagaaggtgattgtggactttgcaggatcttctaagttacggtttcgcctgggttaccatgccattccctcaatgtcacacgtccacttacatgtgatctcccaagattttgactccccatgcctgaagaataaaaaacattggaattcctttaatactgaatactttctggagagccaggagtag

SEQ ID NO: 179330 - DNA, 855 bp, synthetic construct
  misc_feature 1..855: note = Description of Artificial Sequence: Synthetic coding sequence
  source 1..855: mol_type = other DNA
atgagcaacgtgaacctgagcgtgagcgacttctggcgggtgatgatgcgcgtttgctggctggtcagacaggatagccggcaccagcggattaggcttccccatctggaagccgtggtgatcggtcgcggtcctgaaacaaaaatcacagacaagaaatgtagtagacagcaggtccagctgaaggccgaatgtaacaagggctatgtcaaggtgaagcaagtcggtgtgaatcctaccagcatcgattctgtggtgatcggaaaggatcaggaagtcaagctgcagccgggccaagtcctgcatatggaatccttgggtcactggtcccagggtctgaagattagtatgcaagatccaaagatgcaggtctacaaggatgagcaggtggttgtgattaaagacaagtatccgaaggcccggtaccattggctagtgctgccatggacctccatatcctctctgaaggcagttgctagggagcatctcgagctgctgaagcacatgcacacagtgggggagaaggtgatcgtcgacttcgcaggctcatcgaaacttaggtttaggttggggtatcatgccatccctagcatgtcccatgtacatctccacgtcatatcccaggacttcgactccccatgcctgaagaacaagaagcattggaactcatttaatacagaatacttcctggagtctcaggccgtgatcgagatggttcaagaggcgggccgcgtcacagtgcgggacggcatgcccgaattgcttaaactccctctccggtgccacgagtgtcaacagcttttacccagcatcccacagctgaaggaacatctgcggaaacactggacacagtag

SEQ ID NO: 179331 - DNA, 579 bp, synthetic construct
  misc_feature 1..579: note = Description of Artificial Sequence: Synthetic coding sequence
  source 1..579: mol_type = other DNA
atgatgcgggtgtgctggctggtgcggcaggacagccggcaccagaggatcagactgccccacctcgaagctgtagttatcggccgcgggcctgaaacaaagataacggacaagaaatgtagcagacagcaagtccagctaaaggctgagtgcaacaaaggctatgtgaaagtcaaacaggtcggggttaatccaaccagtattgacagcgtggtgattggcaaagaccaggaggttaaattgcagcctggacaggtcctgcacatggtgaatgagctctatccatatattgtggagtttgaggaagaggctaaaaatcccggcctcgaaacgcacagaaaaaggaaacgttctgggaactcagactcaatcgagagagacgccgcgcaggaagcggaagcagggaccgggctggagcctgggagtaactccggccagtgctcagttcctctgaagaagggaaaagacgcccccatcaagaaggagagcctcgggcattggtcccaaggtctgaagatttccatgcaggatccgaaaatgcagccatgtacctcatcttgtgaccaacctggcttctag

SEQ ID NO: 179332 - DNA, 1029 bp, synthetic construct
  misc_feature 1..1029: note = Description of Artificial Sequence: Synthetic coding sequence
  source 1..1029: mol_type = other DNA
atgatgcgggtgtgctggctggtgcggcaggacagccggcaccagcgcatccggcttcctcatcttgaagccgtcgtcattgggcgcggccccgaaacgaaaatcaccgataaaaaatgttcccgacagcaggtgcaactgaaggccgaatgcaacaagggctacgttaaagtgaaacaggtgggcgttaacccgaccagcatcgactccgtggtaataggcaaggaccaggaagttaaactgcagcccgggcaggtgctgcatatggttaacgagctgtatccatacattgtggagtttgaggaagaggccaagaatcctggactggaaacccatagaaaacgcaagcgctccggaaatagcgactccattgaacgagacgctgctcaggaggccgaagctggcaccgggctggagccaggatctaatagcggacagtgttcagtgcccctgaagaaggggaaggatgcacctatcaagaaggagtctcttgggcactggtctcaaggtttgaagatttccatgcaggaccccaaaatgcaagtctataaagatgaacaggtcgtggtaataaaagacaagtaccccaaggcccggtatcattggttagtccttccatggacctcgatctcatccctaaaagctgtcgctcgagagcatcttgaactactcaagcatatgcatacagtcggagaaaaggttatcgtagacttcgccggttccagcaagttaaggttccggctgggttaccacgccatcccctctatgtcccatgtacacctgcacgtgatttcccaagacttcgattccccatgcctcaagaacaagaaacattggaactcttttaatacggaatattttctggagagccaagccgttatcgagatggtgcaggaggctggcagagtgactgtgagagacggaatgccagagctgttgaaattgccactccgatgccacgaatgccaacagctgctgccgagcattcctcaactgaaagagcacctgaggaagcattggacgcaatag

SEQ ID NO: 179333 - DNA, 909 bp, synthetic construct
  misc_feature 1..909: note = Description of Artificial Sequence: Synthetic coding sequence
  source 1..909: mol_type = other DNA
atgagcaacgtgaacctgagcgtgagcgacttctggcgggtgatgatgcgcgtctgttggcttgtgagacaggactctaggcaccagagaataagactcccgcatctggaggccgtcgtaattggacgcggtcctgagacaaagatcaccgataagaaatgtagtcgtcagcaggagttcgaagaggaggcaaaaaaccctgggctcgaaacacatcgcaagcgtaaacggtctggaaactctgattctattgaacgagacgcagcgcaggaagccgaagccggcaccgggttagagcccggatcaaattccgggcagtgctcagtgccgctgaaaaaaggcaaggacgcacctattaaaaaagagagcctgggacactggtctcagggactcaaaatctctatgcaggaccccaagatgcaggtgtacaaagacgagcaggtcgtcgtgatcaaggataaatacccgaaagcccgctaccattggctggttctgccctggaccagtattagcagtttgaaggcagtcgcgcgcgaacacttggaactgctgaaacatatgcatactgttggagagaaagttatcgtggacttcgccggcagctcgaagttaagatttcgtctgggttaccacgcgatcccatctatgagccacgttcatttgcacgtcatctcacaagacttcgatagcccctgcctcaagaacaagaagcactggaattcatttaacacggaatacttcctcgaatctcaagccgtgattgaaatggtacaagaagccggtagggtgaccgtgagggatggcatgcctgagctactgaagttacctttacgctgccacgagtgccaacaactgttgccgagtattcctcagctgaaggagcatctgcggaagcactggactcagtag

SEQ ID NO: 179334 - DNA, 1029 bp, synthetic construct
  misc_feature 1..1029: note = Description of Artificial Sequence: Synthetic coding sequence
  source 1..1029: mol_type = other DNA
atgatgcgggtgtgctggctggtgcggcaggacagccggcaccagcggattagactgccacatctggaggccgtcgtgattgggcgaggccctgaaaccaagattactgacaagaaatgctctaggcaacaggtccagctgaaggcggagtgcaacaaggggtacgtcaaagtcaagcaggtgggggtgaaccccacctctatagactccgtggtgatagggaaagaccaggaagtcaaactccagcccggccaggtcctacacatggtcaatgagctgtatccttacatagtagagttcgaggaagaagccaaaaatccaggactggaaacccaccgcaaacgcaagcgttcaggaaactcagatagtattgagagggatgcagcccaggaggctgaagcaggcaccgggctggagcctggctcaaactccggacagtgttcagtgcctctgaagaagggtaaggacgctcccatcaagaaagaatctctgggacactggagccagggcttaaaaatttccatgcaggaccctaagatgcaggtgtataaggatgagcaagtggtggtcattaaggataaatatcccaaggcgcgataccactggctggtgttgccttggacgagcatatcctcactaaaagctgttgcacgtgagcacctggagttacttaagcacatgcatacagtgggagagaaagtgattgtcgattttgccgggagcagtaagctccggtttcgactaggataccacgctatcccatccatgagccacgtccacctgcatgttatcagccaggatttcgactccccatgcctgaaaaataagaaacactggaattcctttaacactgagtatttcctggagtcccaggcggtgatcgaaatggtgcaggaagctgggagggttacagtaagagacgggatgcccgaacttctcaagctgcctcttcgatgccatgagtgccagcagttgctcccttctatcccccagctgaaagagcacctccggaagcattggacccaatag

SEQ ID NO: 179335 - DNA, 687 bp, synthetic construct
  misc_feature 1..687: note = Description of Artificial Sequence: Synthetic coding sequence
  source 1..687: mol_type = other DNA
atgtacatcatcgcccagtgcgtgggcgccatcgtggccaccgccattctgagtggaatcacgagtagcctcaccggcaactcgctcggaaggaacgacctggccgacggcgtcaattccggtcagggcctcggaattgaaataatcggcacccttcaattggtactgtgcgtacttgcaacaaccgatagaaggcgcagagacttaggagggagtgcccctttagcgatagggttaagtgtcgcgctggggcaccttctggccattgactacactggctgcgggattaacccggcgagatccttcgggtctgccgtgatcacccataatttctccaatcactggatcttttgggtgggtcccttcataggtggagctcttgcagttttgatttatgatttcatccttgccccgaggtcctccgatctgaccgaccgggttaaggtctggactagtgggcaggttgaggagtacgatttggacgcagacgatataaacagtagaagtttccttggcactaaaatctaccaatttacccacagtttggaggtcgtggaagaggtcaaagagcgtgatcctcccgcgtcacgtccgtcggagcatgacggccgatgcgcacgcaagtctcctctagccccgaagctgttaaccgactcccccgcacaggtacctggaattctgccttag

SEQ ID NO: 179336 - DNA, 810 bp, synthetic construct
  misc_feature 1..810: note = Description of Artificial Sequence: Synthetic coding sequence
  source 1..810: mol_type = other DNA
atggccagcgagttcaagaagaagctgttctggcgggccgtggtggccgaatttctggccacaaccctctttgtgtttatctctatcgggagcgcccttggatttaaatatcccgtgggaaacaaccaaaccgcagttcaggataatgtgaaggttagtcttgcattcggcctgtccatcgccactctggcccagtcagtcggccacatttctggtgcgcacttaaatcccgccgtgaccctggggttgctgttatcctgtcagatctcaatctttcgggccttgatgtatattatagcccagtgcgtaggtgcaatagtcgccaccgcaatcttgagcgggatcacaagttctctgaccggaaacagtttgggacggaacgacctggctgacggtgttaatagcggccagggactgggcatagagattattggcaccctgcagctggtcctgtgcgtgttagccaccacggatcgacgacggagagatctcggagggtcagcccctctggccattggcctgtccgtggcactgggccacctcctcgctattgactatacaggctgtggaattaaccctgcacggtcctttgggtccgctgtcatcactcacaacttttctaatcattggattttttgggtggggccctttatcgggggagctttggcagtgcttatttacgatttcattctggcaccgcgttcttccgacttaactgatcgcgtgaaagtttggacctcaggacaggtggaagagtatgatctagacgccgacgatatcaactcgcgggtggaaatgaaaccaaagtag

SEQ ID NO: 179337 - DNA, 657 bp, synthetic construct
  misc_feature 1..657: note = Description of Artificial Sequence: Synthetic coding sequence
  source 1..657: mol_type = other DNA
atgttctggaccttcggctacgaggccgtgagccccgccggcccctcgcatctgttcgcatccttacttctaggggtcctgctgacgattacgttcatgccaggggctcgcccccttcctctagtgctggttccccagaacacactcgcttggatgcagttagatgcaaaggcacctgcccatccacgccccctgcagttattgggtagggtgggtccagggagtcgccaactggccgatggcgtgaactctggacaaggactgggaatcgaaatcataggtaccctgcaacttgtcctctgcgtacttgcgacaacagaccggcggaggagggatctgggtggcagcgcccctctagccattggactaagtgtggcactggggcatctgcttgcgattgactataccggctgtggtatcaatccagctagaagctttgggagcgctgtgattacccacaactttagtaaccattggatcttctgggttgggccttttatagggggggctctggcagtcctcatctatgacttcatcctcgcacccagatcctctgacctcactgacagagtgaaggtctggacttctggtcaagtggaggaatacgacctcgacgctgatgacataaactcacgggtggaaatgaagccaaaatag

SEQ ID NO: 179338 - DNA, 465 bp, synthetic construct
  misc_feature 1..465: note = Description of Artificial Sequence: Synthetic coding sequence
  source 1..465: mol_type = other DNA
atgcagagcggcatgggctggaacgtgctggacttctggctggccgacggggtgaattcgggtcaaggccttggcattgaaatcatcgggactttacagctcgtgctttgcgtattggctaccactgaccgccgtaggagggacctggggggctcagctcctttagctattgggctatctgtggctcttggccatctcctggccatcgattatacagggtgtgggatcaatcccgctcggagtttcggaagcgctgtcatcacccacaatttttctaaccactggatcttctgggtggggccatttattggtggtgccctggctgtcttaatatatgatttcatcttagcgccacgcagtagcgacctcacggacagagtgaaggtatggacatcaggccaagtggaggagtatgacttggatgccgatgacataaacagccgcgtagaaatgaaacctaaatag

SEQ ID NO: 179339 - DNA, 765 bp, synthetic construct
  misc_feature 1..765: note = Description of Artificial Sequence: Synthetic coding sequence
  source 1..765: mol_type = other DNA
atggccagcgagttcaagaagaagctgttctggcgggccgtggtggcggagttccttgccactacacttttcgttttcatctctattgggtccgcgcttggctttaaatacccagttggcaataaccagacggccgttcaagacaacgtgaaagtgagcctggcattcgggctgtccatagccaccctagcccagtctgtcggccatatttccggagcccatttaaatcccgcagttacccttggtctactcttgagctgtcagataagcatagttgcaaccgccatcctcagtggtattacaagttccctgacgggcaacagcctcggccggaacgatttggccgatggcgtgaacagtggccagggattaggaattgagattatcggcaccctccagttggttttgtgcgtactggccacaactgacagacgaaggcgtgatcttgggggcagtgcaccgctcgctatagggctgagtgttgcgctcgggcacctgttggccattgattacactggttgtggaatcaatcccgccaggagcttcggttctgcagtcattacccataacttttcaaatcactggattttttgggtgggcccatttattggcggagcattggcagtgctgatatacgacttcatactggctccccgcagcagcgatctgacagatagggtaaaagtatggacctccggacaggtagaggagtacgaccttgatgccgacgatatcaacagccgcgttgaaatgaaaccgaagtag

SEQ ID NO: 179340 - DNA, 990 bp, synthetic construct
  misc_feature 1..990: note = Description of Artificial Sequence: Synthetic coding sequence
  source 1..990: mol_type = other DNA
atgtgccaggtgggctgcttcctgaagaccccccggttccccatctgggtggtttgttctgaaagccacttctctattcttttttcactccagccagggctcctgagggactggcggaccgagcggctgtttgatctgtactattatgatggattggcgaaccagcaggagcagatcaggctcaccatcgataccacccaaaccatttcagaggataccgataatgatttggtaccccctttggagctgtgcatcagaactaatatagggagcgcgctcggcttcaagtatcctgtgggtaacaaccagacagctgtgcaggataacgtgaaggtgtctctggcattcggcctgagcatcgccactcttgcccagtcagttggacatataagtggagctcacttgaatcccgccgtcacactcgggcttctgctcagttgccaaatcagcattttcagggccctcatgtatatcatcgcacaatgtgttggcgctattgtagctactgctattctgtctggtatcacctcatccctgacaggcaattccctgggcaggaacgacctggcagatggggtcaattccgggcaaggccttggcatagagatcatcgggactctgcagttggttctgtgtgtgctggctaccactgatcgacgcagaagggaccttggtggatctgctcccctggccatcggcctgagcgtggctctcgggcacctgctggccatcgactataccggatgcggaatcaatccagcccgcagctttggaagtgccgtaatcacacataacttctctaaccattggattttttgggtcggaccttttattggaggagccctcgcagtgctaatttacgactttatcctggctcctaggtcatcagacctgactgatcgagttaaagtgtggaccagtggacaggtcgaggagtatgacctggacgctgatgacatcaattctcgcgttgagatgaagcctaagtag

SEQ ID NO: 179341 - DNA, 561 bp, synthetic construct
  misc_feature 1..561: note = Description of Artificial Sequence: Synthetic coding sequence
  source 1..561: mol_type = other DNA
atgcccggcgcccggcccctgcccctggtgctggtgccccagaacactctggcttggatgcagctggatgcaaaggcacctgctcatccccgacccctacagctgctggggcgcgttggacccgggagcaggcagctggccgatggcgtgaactctggacagggcctggggatcgaaatcatcggtaccctccagctagtcctgtgtgtgcttgccacgaccgaccgcaggcgtcgagacctcggcggctccgcaccgctggctattggcctttccgtcgccctgggacacttattggctattgattatactgggtgtggcataaaccccgcaagatcattcggctcagctgtgatcacacacaacttctctaaccattggatcttttgggtcggaccctttataggtggggccctggccgtgcttatttacgatttcatcctcgcaccacggagctctgatctcacagaccgtgtgaaagtttggacttctggccaggttgaggaatacgacctggatgcagacgacattaattcacgggttgaaatgaaacccaagtag

SEQ ID NO: 179342 - DNA, 816 bp, synthetic construct
  misc_feature 1..816: note = Description of Artificial Sequence: Synthetic coding sequence
  source 1..816: mol_type = other DNA
atgagccccctgctgggcctgcggagcgagctgcaggacacctgcacaagcctcggtttgatgctttcagttgtgcttcttatgggtttggccagggtcgtcgcgcgtcagcagctccatagacccgtggcccacgcatttgttctggagtttctggccacattccagctgtgctgttgcactcatgagctccagttgctctctgagcagcacccagcccaccccacctggacactcactttggtttattttttttctcttgtgcacggcctcacactcgtcgggacgagctctaacccatgtggagtcatgatgcagatgatgctgggcggcatgtccccagagaccggcgcggttagattgctcgctcaattggtttcagccctgtgcagtcgttattgcacgtccgcactctggtccctgggactcactcagtaccatgtgtctgaacgctcttttgcctgtaaaaacccgattagagttgatcttctgaaagcagtcatcaccgaggccgtttgtagtttcctttttcatagtgccctcctgcactttcaggaggtgcgcaccaaactgcggatacacctgctggctgcgcttatcactttcctggtgtatgctggaggcagcctgactggcgccgttttcaatcctgctctggcactttccctccatttcatgtgttttgacgaggcattcccgcagtttttcattgtttactggctcgcccctagtttgggcattttactcatgatcctgatgtttagttttttcttaccatggctgcacaacaatcacactatcaacaagaaggaatag

SEQ ID NO: 179343 - DNA, 888 bp, synthetic construct
  misc_feature 1..888: note = Description of Artificial Sequence: Synthetic coding sequence
  source 1..888: mol_type = other DNA
atggccggcctgaacgtgagcctgagcttcttcttcgccaccttcgcactgtgtgaggctgcacgacgagcttcgaaggccttgctgccggtgggcgcatacgaggtctttgctagggaagcgatgcggaccctcgtcgagttagggccttgggctggtgactttgggccagacctcttgctcacactgctctttttattgttcctcgcacacggtgtcacgctcgacggcgcttctgcaaaccccacagttagtctgcaggaattcttaatggcagagcagtcactgccagggacattgttgaagcttgccgcccagggcctcggtatgcaggccgcttgcaccctgatgcgattgtgctgggcttgggagctgtcagacctccacctgttacaatcccttatggcccagtcctgtagttccgccctacgtacctctgtgcctcatggcgcgttagtggaggcggcctgcgcattctgttttcatctcaccctactgcacctgagacactccccaccggcatattctgggccagcagtcgctctgctggttacggttactgcgtacacagcagggccttttacatctgccttcttcaacccggcactggccgcttcagtgacatttgcatgctccggccacactctccttgagtacgtgcaggtctactggttgggtccacttacagggatggtgctggcagtgttattacatcagggcagactgccccacctgtttcagaggaatctgttttacgggcagaagaataagtacagggccccaaggggcaaacctgctccggcttccggcgatacacagacaccagcaaaaggttcctctgtgagggagccaggcaggtctggcgtcgagggaccccattcctcatag

SEQ ID NO: 179344 - DNA, 798 bp, synthetic construct
  misc_feature 1..798: note = Description of Artificial Sequence: Synthetic coding sequence
  source 1..798: mol_type = other DNA
aaccagcccgcccccgccctgagcccccaggtgagctgccggcactcttctagcggcggtccagggcgatggcaggagttcctgatggcagaacaatctcttccgggtaccttgctgaaacttgcagctcaggggctgggcatgcaggcagcatgcaccctcatgcgcctttgctgggcatgggaactttccgacctgcacctacttcaatcccttatggcacagagctgtagctctgcacttagaacaagcgttccacacggtgcactcgtagaagccgcttgcgccttctgctttcatcttacactgctgcatctccggcactccccacccgcctacagcggaccagcagtggcacttctggttacagttactgcgtacacagccggtcccttcacatctgcgttcttcaaccccgctttggcagcctctgtgaccttcgcttgcagcgggcacactctgctggagtacgtccaggtctactggctgggacctttgactgaggagcagcatggggaagttatggagccacccctaggacctcggtcgggggactctgggccatggctccagcgcccccgctggagccctcatctgctgttacacttgctgtcagacactagactccatcttacggaagtaccggaaggccagttgggctcatacggtatccttgaagcattcttcagcttttgttggctgtacacaggtgaggtttccggtgccatgcctcagcccccccttgggggtaaggatcggagttggggcagcctacgacatcttgcattgcggtggtag

SEQ ID NO: 179345 - DNA, 924 bp, synthetic construct
  misc_feature 1..924: note = Description of Artificial Sequence: Synthetic coding sequence
  source 1..924: mol_type = other DNA
atggccggcctgaacgtgagcctgagcttcttcttcgccaccttcgctctctgtgaggcagcacggagggcaagcaaggcattgctccctgtgggagcatatgaggtgttcgctagagaagctgtcggcgcagtgcagctcggcccctgttgtctcgagatgcgcaccctggtcgagttaggcccctgggctggggacttcgggcctgacctgctcctaacacttctattcctgctgttcctggcgcacggcgtgacgctggatggcgccagcgcgaacccaactgtgagcctacaggagtttctcatggccgagcagtcattacccggcacactgttgaaactggctgctcaaggactgggtatgcaggctgcctgcacgcttatgagattgtgctgggcctgggagctgagcgaccttcatttactgcagtccctcatggcccagtcatgttcaagtgctctgcgcacaagtgtgccccacggtgccctggtggaagccgcttgcgccttctgcttccatctgaccctcctgcacttgcgtcacagtccccctgcatactctggcccagccgttgcactcttggttacggtaaccgcttataccgcaggccccttcacaagcgcttttttcaaccccgccctggcggccagcgtgacctttgcgtgttcaggtcatactttactggaatacgtgcaggtatattggcttggtccgctaactggcatggtacttgcggtactcctgcaccaggggaggctcccgcacctgttccagaggaatcttttttatgggcagaagaacaaatatcgggctcccagagggaaacccgccccagcaagcggcgacacccaaactccagccaagggtagctccgtgcgcgagccagggcgtagcggcgtggagggtccgcacagctcttag

SEQ ID NO: 179346 - DNA, 816 bp, synthetic construct
  misc_feature 1..816: note = Description of Artificial Sequence: Synthetic coding sequence
  source 1..816: mol_type = other DNA
atgtgggagctgcggagcatcgccttcagccgggccgtgttcgccgaattcctagccaccttgctattcgtcttttttggactcggttccgcacttaattggccccaagcactgccttcagtgcttcagattgcgatggcctttgggcttggaataggaacgttggttcaggctctggggcatatatcaggagctcacatcaaccctgccgtcaccgttgcctgccttgtgggctgccacgtgagtgttctaagggcagctttttacgtggctgcccagctgttgggggccgtggccggtgctgctcttctgcacgagattacccccgccgatatccgcggcgatctcgccgtgaacgctctctccaactccacaacggctgggcaagccgtgaccgttgagttgttcctaaccctgcagttggtgctgtgcatctttgcatcaaccgacgagcgaaggggagagaaccccgggacccccgctttaagcataggttttagtgtggccctcggccaccttctgggaatccactataccggttgcagcatgaatcctgccagatcactggccccagcagtggtgactggtaagttcgatgatcactgggtgttttggatcggccctttggtgggagcaattctggggtcactactgtataattatgtgctgtttcctcccgcaaagtctctatctgaaagattagcagttcttaaagggctggagcctgatactgactgggaagagagagaagtacgccggagacagtcagttgaattacacagcccccagtctctgccccgaggtactaaagcatag

SEQ ID NO: 179347 - DNA, 879 bp, synthetic construct
  misc_feature 1..879: note = Description of Artificial Sequence: Synthetic coding sequence
  source 1..879: mol_type = other DNA
atgggccggcagaaggagctggtgagccggtgcggcgagatgctgcatattcggtataggctcttaagacaggcactggcggagtgccttggtactttaatcttggtgatgtttggctgtggctccgtggcacaagtggtactgtctcgcgggacccatggcggatttttgacaatcaatctggccttcggttttgcggtaactctcgggatcctcatcgcagggcaggtctccggagcgcaccttaaccccgcggttacgttcgcaatgtgtttccttgccagggagccttggatcaaactgcccatctataccctcgcccaaaccttaggcgcttttctcggcgcaggaatcgtgttcggtttatattacgatgcgatctggcacttcgccgataaccaattgtttgtctcaggtcccaatggaaccgcaggaatcttcgccacataccccagtggacacctggacatgattaacggattcttcgatcagttcatcggtactgcttctctcattgtgtgtgttctggctatcgtcgacccctataataacccggtcccaaggggtctggaggcttttaccgttgggttagtcgtccttgttatcgggaccagtatgggctttaactctggctacgctgtcaacccggcacgtgattttggcccccggttgtttacagcactggcgggttggggatctgctgttttcaccacaggacagcattggtggtgggtcccgattgtgtcaccactgctcggatcgatagcgggtgtgtttgtctaccagctaatgattggatgccatctggagcagcctccaccttctaacgaggaagagaacgtgaagctggcgcacgtaaagcataaggagcaaatttag

SEQ ID NO: 179348 - DNA, 840 bp, synthetic construct
  misc_feature 1..840: note = Description of Artificial Sequence: Synthetic coding sequence
  source 1..840: mol_type = other DNA
atgggccggcagaaggagctggtgagccggtgcggcgagatgctgcacattcgctaccggctgctccgccaggctttggccgaatgccttggcacattgattcttgtaatgttcggctgtgggagcgtcgcccaggtggtgctgagcagaggaactcacggagggtttcttacaataaacctggcatttggcttcgccgttactttaggtatcctcatagcaggtcaggtttcaggggctcacttaaatcctgccgtgacctttgcgatgtgcttcttggccagggagccttggatcaagttacccatttatacccttgcgcagaccttgggggctttccttggcgccggaattgtatttggcctgtactacgatgccatctggcatttcgccgacaatcaacttttcgtgtctggtccaaatggtaccgccggcatcttcgctacttacccaagtgggcacttagacatgatcaacggtttctttgaccaggaccgacccgccctcgtcgtaggagcccatagagtgcctaccccaggcctgcattgcggctgtctcagagtgcctgcagacgatcgcctgccccctggggccgcccctacactacaaagaggtcgcgaatgtgaggcaggaccctgcgaggctcagggcgctgacttgagcggccaggggtcacccctgaggtgtccgggtctcgaacacccattaacggtccagggaccccttccacgctccccgctccatgatcccccattccaggcaaaggaacttcctatctaccctcaccccacaactgcccccagtggctttcctctcgatctggctcagattgctccgtag

SEQ ID NO: 179349 - DNA, 972 bp, synthetic construct
  misc_feature 1..972: note = Description of Artificial Sequence: Synthetic coding sequence
  source 1..972: mol_type = other DNA
atgagcgaccggcccaccgcccggcggtggggcaagtgcggccccctgtgtactcgggagaacatcatggtggcctttaaaggagtgtggacacaggccttctggaaagccgtgacagcagagttccttgcaatgcttatctttgttctgctttcactggggtccacgatcaattggggaggtaccgagaagcccctgcctgtggatatggtattgattagtctgtgtttcggcctttcaatcgctacaatggttcagtgtttcggtcacatcagcggcggccacataaatcccgccgtgacagtagcaatggtctgtacacgaaagatctccattgccaagtctgttttctatattgctgcccagtgtctcggggcaattattggcgccggcattctctacctcgtcaccccgccttctgtggtgggtggcttaggagtgacgatggtgcatggaaatctaaccgcgggccatggacttttggtcgagctcatcatcaccttccagctcgtatttactatattcgctagttgcgatagcaagaggaccgatgttactggttcgattgcactggcaatcggattttcagtggccataggccacctgtttgccattaattatacgggggctagcatgaaccccgcgcggagcttcggccccgccgtcataatggggaattgggaaaaccattggatttattgggttgggcctattattggggccgtgttggccgggggtctgtatgaatacgtgttctgtcctgacgtcgagttcaagaggcgttttaaagaggcgttctctaaagccgcccagcagaccaagggctcctatatggaggtggaagacaatcgttctcaagtcgagactgacgacctcattcttaagcccggcgtggttcatgtgatcgacgtggaccggggcgaagaaaagaaggggaaggatcagagcggagaagttctgagctcggtatag

SEQ ID NO: 179350 - DNA, 660 bp, synthetic construct
  misc_feature 1..660: note = Description of Artificial Sequence: Synthetic coding sequence
  source 1..660: mol_type = other DNA
tgcaccctggccggcgagggcatgagcgaccggcccaccgcccggcgatgggggaagtgcggccctctgtgcactagagagaacattatggtcgcctttaaaggcgtgtggacacaggcattctggaaagcagtgacagccgagtttcttgccatgctgattttcgtgctcttaagtctggggtctacaatcaattggggcggcacggaaaaaccccttcctgttgatatggttctgattagcctttgcttcggactgtccattgcaaccatggtgcagtgctttggccatatctctggcggccatataaaccctgctgtcacggttgcaatggtttgcactcgcaagatttcaattgctaagtcagtgttctatatagcagcccagtgtgtgggtcccataattggagctgtcttagcaggcggactgtatgaatacgttttctgtcccgacgtcgagtttaaacggcggttcaaggaggccttctctaaagccgcccagcagacgaaggggtcctacatggaggttgaggataataggagccaggtggagaccgacgaccttattctcaagcccggcgtcgtgcacgtcatagatgtggatcgaggtgaggagaagaaagggaaggatcagagcggggaggtactttccagcgtgtag

SEQ ID NO: 179351 - DNA, 912 bp, synthetic construct
  misc_feature 1..912: note = Description of Artificial Sequence: Synthetic coding sequence
  source 1..912: mol_type = other DNA
atgagcgaccggcccaccgcccggcggtggggcaagtgcggccccctgtgtactcgggaaaacattatggtggcattcaaaggtgtatggacccaggccttctggaaagccgtgaccgcggaatttctggccatgctgattttcgttctgttgtccctaggatccacaataaattggggcggaactgaaaagccacttcccgtggatatggttttgatctcactgtgtttcggacttagtatagccactatggtgtgtacccgcaagattagcatcgctaaaagtgttttctacatcgccgctcagtgtttaggcgccattataggcgcaggtatcctttatttggtgaccccaccctcagtggtgggaggactcggcgtgactatggttcacggaaatttgaccgcaggacacggtctgctggtggagctgatcatcacttttcaattggtgttcacaatttttgcaagttgtgactctaagcggaccgatgtcactggatccattgctctggccatcgggtttagcgtggcaatcggccacctctttgccattaattacaccggggcaagtatgaaccccgcaaggagcttcggccccgccgttatcatggggaactgggagaatcactggatttattgggtgggcccgatcatcggcgccgtgctcgccggtgggttgtacgagtatgtcttctgtcctgatgtggagttcaagcgccgattcaaggaggctttcagtaaagcagcccagcaaaccaaaggatcctacatggaagtcgaggacaaccggtctcaagtggagacagacgacctcatactgaaaccaggcgtggtccatgtgattgacgtcgaccggggggaggaaaaaaagggtaaagaccagagtggggaggtgctcagcagtgtttag

SEQ ID NO: 179352 - DNA, 849 bp, synthetic construct
  misc_feature 1..849: note = Description of Artificial Sequence: Synthetic coding sequence
  source 1..849: mol_type = other DNA
atggacgccgtggagcccggcggccggggctgggccagcatgctggcctgccggttatggaaagcgatctcaagagccttgtttgcagagttcctggctacagggctgtacgtgttcttcggtgttggctctgttatgaggtggccaaccgctctccccagcgtcctgcaaatcgctataacttttaatctggtgacggctatggctgtgcaagtgacttggaaggcatccggcgcccacgctaacccagcagtgactttagcatttctagttgggtcccatatcagcctgccccgcgccgtcgcttatgtggccgcgcaacttgtaggcgccacagtgggcgccgctttgttgtacggtgttatgcctggtgacatacgcgagaccttggggatcaatgttgtccgtaacagtgttagtaccggacaggctgtcgctgtggagctcctgctgaccctccagttggtgttgtgcgtcttcgctagcacggactccagacagaccagcggctccccagccacaatgattggcatttctgtggccctgggtcacctaattggcatccactttactgggtgctctatgaatcctgcccggtcttttggacctgccatcatcatcggcaagttcacagtccattgggtcttctgggtggggccactgatgggggctcttctcgcctcgctgatctacaattttgtactgttccctgatacgaaaactttggcccagaggctggctatccttaccggaaccgtggaggtcggcacaggcgcaggggctggcgcagaacctctgaagaaagagagccagccaggatccggggcggtcgagatggagagcgtctag

SEQ ID NO: 179353 - DNA, 1029 bp, synthetic construct
  misc_feature 1..1029: note = Description of Artificial Sequence: Synthetic coding sequence
  source 1..1029: mol_type = other DNA
atggtgcaggccagcggccaccggcggagcacccggggcagcaagatggtgtcctggagtgtcatcgccaagatacaggagattctgcagcgcaaaatggtgcgtgagtttctggccgagttcatgtctacatacgtgatgatggtgttcggactcggctctgttgcccacatggtcttaaacaaaaaatacgggagttatcttggcgtgaaccttggttttggatttggggtgaccatgggagtgcacgtggccggacgcatctctggggctcatatgaatgcggcagtgacctttgctaactgtgcgttgggtcgcgtcccatggcgaaagttccctgtttacgtcctggggcagttcctcggatccttcctcgcggccgccaccatctattctttattttacaccgctatcctgcacttttcaggcgggcagctgatggtgactggacccgtcgctaccgcaggcatttttgcgacctacttgccggaccacatgactttatggcgaggctttctgaatgaggcctggttgacgggtatgttacaattatgcctgttcgcaattactgatcaggaaaacaacccagctcttcccggcacagaagctctggttatcggcatcctcgtggtgataatcggtgttagtctgggtatgaacaccgggtatgccataaaccctagtagagacttgcctccacggatcttcactttcatcgctggatggggaaaacaggtgttttcaaacggtgaaaattggtggtgggtgcccgtagttgccccccttttgggtgcctatctgggcggcattatatatttggtgttcattgggagtacaatacctcgggagcctctaaagctggaggacagtgttgcctatgaagatcacgggatcaccgtgctacctaagatggggtcccatgagcctaccatcagtccactcacacctgtgtcagtcagccctgctaatcggagtagtgtccaccctgcgccacctctgcatgagtcaatggcacttgagcatttctag

SEQ ID NO: 179354 - DNA, 651 bp, synthetic construct
  misc_feature 1..651: note = Description of Artificial Sequence: Synthetic coding sequence
  source 1..651: mol_type = other DNA
atggtgctgaacaagaagtacggcagctacctgggcgtgaacctggggtttggcttcggggttactatgggagtgcacgtcgcaggacgaataagtggcgcccacatgaacgctgcagtgacctttgccaattgtgctctaggtcgggtgccttggcggaagttcccggtctacgtcctgggacaatttcttggcagtttcctcgcagcagccactatttattcactgttttatactgctattcttcatttctctggcggccagttgatggttacaggccccgtggctacggctggcattttcgcaacctatttgcccgatcacatgacgctgtggcgcgggttcctgaacgaagcttggctgacaggcatgcttcagctgtgtctctttgcgattaccgaccaggaaaataatccagccctaccaggaactgaggctctcgtcatcgggatcctggtggttatcattggtgtgagtctggggatgaatacaggctatgcaattaatccgtcccgtgatcttcctccacgtatctttaccttcatcgctgggtggggcaaacaggtgttccgatggcatcatctgcctggtctgcattggctgcaccaccccacaggagcacccgaaattggtggcttctgtggcgtttag

SEQ ID NO: 179355 - DNA, 582 bp, synthetic construct
  misc_feature 1..582: note = Description of Artificial Sequence: Synthetic coding sequence
  source 1..582: mol_type = other DNA
atgggctgggccaccttcaccgaccagggcgaggagggcctggagccaagtgggccttggaagacctcacacacccgcgcacatatgaatgccgcagttacctttgcgaattgtgccctgggcagggtgccctggcgcaaattcccagtgtacgtccttggacagttcctgggtagttttctggccgctgccactatctattccctcttttatacagccattttacatttttccggtggccaactcatggttactggtccagtagcaactgcggggatttttgctacctatctgccagatcatatgactctgtggcgtggtttcctgaacgaggcgtggctcacaggcatgttgcagctgtgtttgttcgccataacagatcaggaaaacaacccggccctcccaggaacagaggctctggtgattggtattcttgtagtaataatcggggtctcgttggggatgaataccggatatgctattaatcctagcagagatctacctccacgtatctttacgtttatcgccgggtgggggaagcaggtatttcgctactgcccatgtccagggccattcttgtag

SEQ ID NO: 179356 - DNA, 771 bp, synthetic construct
  misc_feature 1..771: note = Description of Artificial Sequence: Synthetic coding sequence
  source 1..771: mol_type = other DNA
atgggcagcggccactgcctgcggagcacccggggcagcaagatggtgtcatggagcgtgatcgccaagattcaagaaatactgcagaggaagatggtgagggagtttctcgctgaattcatgagcacctatgtgatgatggtgtttggattagggtcagtcgctcatatggttctgaataaaaagtacggctcgtatcttggggtgaacctggggttcggctttggagtgacaatgggcgttcatgtcgcgggaagaattagcggcgctcacatgaatgccgctgtgacgttcgccaactgcgccctcggacgggtcccatggaggaagttcccagtgtatgttctaggtcagttcctcggctcttttcttgcggctgccaccatctatagtctattttacaccgcgatcctgcatttctccggcggtcagctgatggtgactggccccgtcgccacagctggcattttcgctacctatcttcctgaccatatgactctctggcgtggattccttaacgaggcctggctgaccggaatgctccagctgtgcctttttgccattacagaccaggagaataatccagcgctgccgggaacagaagccttggtgatcgggattttggtggttattattggagtctctttgggcatgaataccggatatgcaattaatcctagccgcgatttgccacctcgcatattcacatttattgcaggctggggcaaacaggtgttcaggtactgcccttgcccaggtccattcctctag

SEQ ID NO: 179357 - DNA, 1026 bp, synthetic construct
  misc_feature 1..1026: note = Description of Artificial Sequence: Synthetic coding sequence
  source 1..1026: mol_type = other DNA
atgggcagcggccactgcctgcggagcacccggggcagcaagatggtgtcttggagcgtaatcgccaaaattcaggaaattctgcagcggaagatggtgagggaattcttagctgaattcatgagtacttacgtgatgatggtatttggccttggatcagtggcacacatggtactgaataagaagtatggaagctacctcggagttaacctaggttttgggttcggggtgacaatgggcgtgcacgtcgccggacgaatttctggagcccatatgaatgctgccgttacttttgctaactgtgcgttaggaagggtgccatggcgaaaattcccagtctatgtactgggacagtttctgggctctttcttggctgccgctacgatatacagcctgttctacactgcaatccttcattttagtggaggacagctgatggttactgggcccgtggccaccgcggggatattcgctacgtatctacctgaccacatgactctgtggaggggcttcctcaatgaagcctggctgacaggcatgttacagctgtgtcttttcgccatcaccgatcaggagaataatccggctttaccaggaaccgaggccctcgttatcgggattctggtagtcatcattggggtgagcctgggtatgaataccggttacgctataaatcccagccgggatctaccgccgcgaattttcacatttatcgccggttggggcaaacaagtcttctctaacggggagaactggtggtgggtccccgttgttgccccactgctgggcgcctacttaggcggtattatatacctggtcttcatcggatccaccatacctagagaacctttgaagctcgaggattcagtggcctacgaagaccatggcatcaccgtcctcccgaaaatgggatctcatgaaccaacgatcagtccactaactcccgtcagtgtttcaccagctaacaggagctccgtccatcccgcaccccccctgcacgaaagcatggccctggagcacttctag

SEQ ID NO: 179358 - DNA, 513 bp, synthetic construct
  misc_feature 1..513: note = Description of Artificial Sequence: Synthetic coding sequence
  source 1..513: mol_type = other DNA
atgaacgccgccgtgaccttcgccaactgcgccctgggccgggtgccatggaggaagttccccgtgtacgtgttggggcaatttcttggatctttcctggccgcagccaccatctactccctgttttatacagctatactccatttttctggcggccagctcatggttactggacccgtggctaccgccggcatcttcgcaacttatctccctgatcacatgactctctggcggggctttctcaatgaggcgtggttgactggtatgctgcagctatgtctttttgccataactgaccaggagaataatccagctctgccaggaaccgaagctctggtgattggcattctggtggtcataatcggagtatcgctcggcatgaatactggctacgccattaacccaagccgcgatctgcccccgcggattttcacatttattgctggttggggcaaacaggtttttagtaacggggagaactggtggtgggttcccgtggtagcaccactttag

SEQ ID NO: 179359 - DNA, 426 bp, synthetic construct
  misc_feature 1..426: note = Description of Artificial Sequence: Synthetic coding sequence
  source 1..426: mol_type = other DNA
ctgttctacaccgccatcctgcacttcagcggcggccagctgatggtaacaggaccagtcgcgacagcagggattttcgccacatacctgcctgaccacatgacactctggagagggtttcttaacgaagcctggctgaccggaatgctgcagctgtgtctctttgcaattacagaccaagaaaacaacccagcattgcctgggacagaggccttagtgattggtatactggtggtaatcataggtgtgtccctgggcatgaacaccgggtacgccatcaacccttccagggacctgccccccagaatcttcaccttcatcgccggctggggtaagcaggtttttcggtggcatcacctgcccggtctgcattggctgcatcatcctaccggagccccagaaatcggggggttctgcggagtatag

SEQ ID NO: 179360 - DNA, 498 bp, synthetic construct
  misc_feature 1..498: note = Description of Artificial Sequence: Synthetic coding sequence
  source 1..498: mol_type = other DNA
atgaacgccgccgtgaccttcgccaactgcgccctgggccgggtgccttggagaaaattcccagtctacgtattaggccagttcctggggtctttcctggctgcggcgactatttacagtctgttctatacagctatcctacattttagtggcggccagctgatggtgaccgggcccgttgccacagccggcatattcgcaacataccttcccgaccatatgactctttggagggggttcctgaacgaggcctggttaaccggcatgctccagctgtgtctgtttgccattactgatcaggagaacaaccccgctctcccgggcacagaggcgcttgttataggcattctggtagtgatcataggagtgtcattaggcatgaacacgggctacgcaattaacccgtccagagacctgcccccccgcatcttcacgtttattgcaggttggggaaaacaggtgttccgatattgtccctgtcctgggccttttctatag

SEQ ID NO: 179361 - DNA, 774 bp, synthetic construct
  misc_feature 1..774: note = Description of Artificial Sequence: Synthetic coding sequence
  source 1..774: mol_type = other DNA
atggtgcaggccagcggccaccggcggagcacccggggcagcaagatggtgtcctggagtgtgatcgctaagatccaggaaatactgcagcgtaagatggtgcgcgaattccttgctgaattcatgtccacatatgtgatgatggtgttcggtcttgggagcgttgcccatatggtgctcaataagaagtacgggtcatatctcggggtgaacctgggttttggatttggcgtgacgatgggtgtccacgtcgcaggccggatctctggcgcgcacatgaacgccgcagtgactttcgctaattgcgccctcgggcgagtgccctggcgcaaatttccagtttacgttttaggacaattcctgggttcctttttggctgccgcaacgatctactcacttttctacactgccatactccatttctcaggaggacagctaatggtgaccggtccggtggctacggccggaattttcgccacttacctgcctgatcatatgacactgtggagaggttttctcaatgaggcatggctaaccggaatgttgcagctttgcttgtttgcaattacagatcaagagaacaatcccgctctacctggcaccgaggcgctggtgataggtattttggttgtcatcattggagtgagcttaggaatgaacaccggctacgccataaaccctagccgggacctgccacctcggatctttacttttatcgccgggtgggggaagcaggtattccgctactgcccatgtcctgggccatttctttag

SEQ ID NO: 179362 - DNA, 426 bp, synthetic construct
  misc_feature 1..426: note = Description of Artificial Sequence: Synthetic coding sequence
  source 1..426: mol_type = other DNA
atgaacgccgccgtgaccttcgccaactgcgccctgggccgggtgccctggagaaagttccccgtctacgttctggggcagtttttgggtagtttcctggctgcggccacaatttattccctgttttacagcgtggctgaccgtgacgcccctgcagtctcattgcgtcaccatggtccaggcgagcagccgagcactgcaaggaatagaggcgccggggaccgacacccgcgcgggcatcaccgtggggtcccgtggcacgagcacagaatatgccaccagcccgtgccaggtcccgcccctcctcacctgcatctccattgctggctgggccagacaggcctccaggtgcttccactgccacggcctattcctctttccttcagtgttggcccactctgtgtagagggctggggagttatgtag

SEQ ID NO: 179363 - DNA, 1602 bp, synthetic construct
  misc_feature 1..1602: note = Description of Artificial Sequence: Synthetic coding sequence
  source 1..1602: mol_type = other DNA
atgggcagccggtgcctgaacccccccccccccgcccacagcgacactactgggaaggacagttttggtaacatacgaggagcggagactggccagggagcctctgcatgctcagtcacatcagcccgtgtcacctgcggcgccggatccgaaccgcattcacatcggaaccctggaatatctgcccaggtgggactggctccttcatatggcgcggcccgagggcgtcggaggcctttggccctccagcaaagcccacaggagcggcggcatgttggctggaactccacccggggcttgttgcccgcatctctgccagggaccgcctcctcacagagcgctagtgcaaccgcttccgcggctctgcctctaaaggttacgggccctctagcccgaaacccgacaccaccctggacagcagccgccgcattagcaacacgcggtcaaagacccgagaaaggtctcttccctggcccggcgccattctcccttggcaaacgtaaaagagggagggggcggacatgggagcgaagacgccgagtcagcattgagaccagtacgtgcttcagacccggttgcgagaggcttggagccgctgccggggcaaatttgtcccaactggcaagttcacagagacctttgagggaaagatgggtgttatacacaatcatcatggccgcagcaggagcccctgatgggatggaagagccgggcatggataccgaagcggaaaccgttgctaccgaggccccagcgaggcctgttaattgcctagaggctgaggctgccgcgggggccgcagccgaggattcgggagctgccagggggtccttgcaaccggcaccagcccagcccccaggggaccccgccgctcaggctagtgtgagtaacggagaagatgctggcggcggcgctggaagggaactggttgatctgaagatcatctggaacaagaccaagcacgatgtcaagtttcccttagattccactggctccgaactgaagcagaagatccactcgataaccggcctgccaccagcaatgcaaaaagttatgtacaaaggattggttccggaggacaagacgctccgggagattaaggtgaccagcggtgctaaaattatggtcgtgggcagcaccatcaatgatgtgcttgccgtgaataccccaaaggatgctgcccaacaagacgcgaaagccgaggagaacaagaaggagccgctctgtagacagaaacagcaccgcaaggtactggataaaggcaagcctgaggatgtgatgccctcagttaagggcgcacaagagagattgcccactgtcccattgtctggaatgtataataagtccggggggaaggttaggctgacctttaagctcgaacaggaccaactgtggattggaacaaaagagcggacagagaagttacctatgggctcgatcaagaacgttgtgagcgagccaatagaaggccacgaggattatcatatgatggcatttcagctggggccaaccgaagcgagttattactgggtgtactgggtgccaacccagtatgtggatgcaatcaaagacaccgtgctgggcaaatggcagtatttctag

SEQ ID NO: 179364 - DNA, 9198 bp, synthetic construct
  misc_feature 1..9198: note = Description of Artificial Sequence: Synthetic coding sequence
  source 1..9198: mol_type = other DNA
atggaggagaagcagcagatcatcctggccaaccaggacggcggcaccgtcgctggagcagctccaacattttttgtcatcctgaagcaacccggaaatggcaagactgatcaagggatcttagtcaccaatcaggatgcctgcgctctggcctcctccgtaagtagtcctgtgaagtccaagggcaagatctgtctgccagctgattgtacagtgggaggaattaccgtaactttagacaacaactcaatgtggaacgagttttaccaccggtcaactgagatgatcctcacaaagcagggccgtaggatgtttccatactgcaggtactggatcactgggctcgacagcaatctgaagtatatccttgtgatggatatctctcctgtcgataaccatagatataaatggaacgggcggtggtgggagccgagcggaaaagccgagccacacgtgctgggaagagtgtttattcacccggagtcgccgagcactggccattattggatgcaccagccagtcagcttctacaagcttaagctcacaaataatactctggatcaagaagggcatattattctgcactctatgcacagatacctgcccagattgcatttggttcctgccgagaaagccgtggaagtaatccaacttaatgggcccggcgtgcatacttttacattcccacaaaccgagttctttgcggtcacagcatatcagaacatacaaatcactcaactgaagattgattataaccccttcgctaaaggatttagagatgatggtctaaataataagccccaacgggatggcaagcaaaagaatagctctgatcaggagggtaacaacatatcatcctcctcaggccatcgagtaagactcaccgaggggcaggggagtgagattcagcccggagatctcgatcccctgtcacgagggcatgagacttctggtaagggtctcgaaaagacctcactgaatatcaagagagacttcttgggatttatggataccgacagcgccctgtcagaggttccacagctgaagcaggagatttcagagtgtctgatcgcttcgagcttcgaagacgactcccgggtggcttcccccttggatcagaatggctcctttaatgtggtgattaaagaagagccactggacgattatgactacgagttgggcgaatgcccagaaggcgtgacagtgaaacaggaggagactgacgaagagactgacgtctactctaacagcgacgacgacccaatcctagagaagcagctgaagcgccacaataaagtcgacaacccagaagccgatcatctgtcaagtaaatggctgccctcttcccctagcggagtcgccaaagcgaaaatgttcaagttagatacagggaaaatgcccgtggtgtatctcgagccctgtgccgtgacgaggagcaccgtgaaaatttctgaactccccgacaacatgctgtcaacgtcacgaaaagataaatctagcatgttagctgagctcgagtatctgcccacatacatcgaaaactcaaacgagaccgcattctgcctgggcaaagaaagcgagaatggccttcggaagcacagtcccgatctccgcgttgtgcaaaagtatcctctgctgaaggagccccagtggaagtatccagacatttcggacagcatctcaaccgagagaatactcgatgactctaaagattctgtcggggacagcctgagcgggaaggaggacttgggacgtaagaggactaccatgctcaaaatagccacagctgccaaagtggtcaacgccaaccagaatgcctctcccaatgtgccaggcaagagggggaggcctcggaaactgaagctatgtaaggcaggccgtcctcccaagaatactggaaaaagcctaatcagtacaaaaaatacccctgtatcgccaggaagcaccttccctgacgtgaaaccagaccttgaggacgtagacggcgtgctgtttgtctcattcgaaagtaaagaggctctggacattcatgcagtggatggcacaaccgaagaatcaagttccctccaggccagtactactaacgactctggatatcgcgcacggatcagccagttagagaaagagcttatcgaagacttgaaaaccttacggcacaaacaggtcattcatcctggcctgcaagaggttggcctgaagttgaattcggttgatcccactatgagtatagacctaaaatatctgggcgtgcagttgcccctggctccagcgacgtcattccccttctggaacctgacaggtaccaacccagctagccccgatgctggttttccttttgtttcccgtaccggcaaaactaacgattttactaagattaaaggttggcgtggcaaattccatagtgccagtgcctcccggaacgagggtggaaactccgagagcagtctcaagaaccggtctgcattctgctccgataaacttgatgagtacttggaaaatgagggaaaactaatggagacatccatgggcttttctagcaatgcccccacttcacccgtggtgtaccagctgcctacgaagtccacgtcgtatgtcaggaccctggacagtgtattaaagaagcagagtaccatatccccctcaacatcctactctctaaaaccacacagtgtccctccagtctcacggaaggccaaatctcaaaatcgccaggccacgttctctggtaggaccaaatcctcttacaagagcatacttccctatcctgtgtcacctaaacagaagtattctcacgttatcctcggggacaaagttactaaaaatagcagcggaatcattagcgagaaccaggccaacaacttcgtggtgccaaccctagatgagaacatctttcccaaacagatcagtctccggcaggcccagcagcagcagcagcagcagcaggggagtagaccacccggcctttccaagtcccaggtcaaactcatggacctcgaagattgtgccttatgggaaggtaagccgcggacgtatatcacagaggagcgggcagatgtttcattgaccacgttgttgactgcccaggccagtctcaagaccaagccaatccatacaatcatcagaaaaagggcccccccttgcaataatgacttctgccgtctgggttgcgtttgcagctcactagccttagagaagagacagcctgcgcactgcaggcgaccagactgcatgttcggttgcacatgtctcaaacgcaaagtggtcttggtgaaaggtggatcaaagaccaaacattttcagcggaaagccgcgcaccgagatccagtcttttacgacaccctcggcgaggaagctagggaggaagaggagggaataagggaagaagaagagcagttgaaggagaagaagaaacgcaagaagctggagtacactatctgtgagaccgagcctgaacagccagtgaggcactacccactatgggttaaggtggaaggtgaggtggatcctgagcccgtctatataccaaccccctctgtcatcgagccaatgaaacctctgctgttacctcagcccgaggtattgtcgccgactgtgaaagggaaactgctgacaggtataaagtctccacggtcctacacccccaagcccaaccccgtcattcgggaggaggataaggatcctgtgtatctctattttgaatcaatgatgacatgtgcacgcgtgcgggtgtacgaacgcaaaaaggaagaccagcggcagccctcttcatccagttccccatctccgagttttcagcagcagacttcttgccactctagccctgaaaaccataataacgcaaaggagccagactcggagcaacagcccctgaagcaactcacttgcgacctggaagatgactccgacaagctgcaggagaagtcatggaaatctagttgtaacgagggagaatcctcctccacgtcttacatgcaccaacggtcccccggcggccccaccaagctgatcgaaattatttcagactgcaactgggaggaggatagaaacaagatcctgagcattctctcgcagcacattaattctaatatgccgcagagtctgaaggtcggaagttttatcattgaactggcatcccaacggaaaagtcgcggggagaaaaatccacccgtgtactccagccgggtgaaaattagcatgcccagctgccaggatcaggacgacatggctgaaaaaagtgggtcagagaccccagacgggccattgtcaccgggtaaaatggaggacatcagcccagtgcaaacagatgctttagatagcgtccgtgagcgcctgcacggtggaaaaggtttgcccttctatgccggtctatctcccgcagggaaactggtggcgtataagcggaaaccatcctcctccaccagcggtttaatacaagtggcctctaacgccaaggtggccgcatctaggaaaccgcggacgttacttcccagcacatctaatagcaaaatggcctcttcgagcgggaccgcgaccaaccgccctggcaagaatctgaaggcatttgtgccggccaagagacctatagctgcccggccttccccgggaggggtgtttacgcaattcgttatgtctaaagtgggggcccttcagcagaaaatacccggcgtctcaacaccacaaacgctagccggcacacagaagtttagtatccggccctcccccgttatggttgtaactcccgtggtgtcctccgaaccagttcaggtctgttctcccgtgacagcggccgtaactaccaccaccccacaggttttcctggaaaacacgaccgccgtcacccctatgactgccatcagcgacgtggagacaaaggaaacaacctactcctccggcgccaccacaacaggcgtggtagaagtgagcgagactaatacatcaaccagtgtcacatccacgcagagcaccgcaactgtgaacctgaccaaaacaaccggtatcaccactcccgtggcctctgttgcattcccgaagagccttgtcgcaagccctagcacaataactttacccgtggcgtcaacagcctctacaagtctggtggttgtgactgccgcagcctctagttcaatggtcacgacccccaccagttctctggggagcgtccctataattcttagcgggatcaacggatccccgcctgtgtcacaaagaccggagaatgcagcgcaaataccagtagcaaccccacaggtgtctcctaacacagtgaagagagccggccctcgcctcctacttatccctgtgcaacaaggatcaccgacactgcgcccagtgagcaacacccagttacagggtcaccggatggtgctgcaacccgtaagatccccctcggggatgaatttgttccgccaccccaacggacaaattgttcagctgctgcctctgcaccagttaaggggctcaaacacccagcccaatctgcagcccgtgatgttccgaaatcctggaagtgttatgggaataagattacccgctccgagtaaaccatcggagacacctccatctagtacctcttcctctgcttttagcgtgatgaatcccgttattcaggctgttggctcgtcttctgctgtcaatgtgatcacccaggcgccaagccttcttagtagtggagcatcttttgtttcccaggccgggaccctaaccctaagaatctccccgccggagcctcaaagttttgcgagcaaaacagggagcgagaccaaaattacatatagcagcgggggtcagcctgtggggacagcttccctgatccccctgcagagcggctcttttgctttgctccagctccctgggcagaagccagttccctccagtatccttcaacacgtggcatctctgcagatgaagagggaatcacagaaccccgaccagaaggatgaaaccaacagtattaagcgggaacaggaaaccaaaaaagtcctgcagagtgagggggaggccgttgaccctgaggcaaatgtgatcaagcaaaatagtggggccgcgacaagcgaagagactctgaacgactcactggaagataggggggaccacctggacgaggaatgccttcccgaagagggctgcgcaaccgtaaagccgagcgagcacagctgcatcaccgggtcacacaccgaccaagattacaaggacgtgaacgaagaatatggggccaggaatagaaagtcaagtaaggagaaggtggccgtgctggaggtccgaacaatctccgaaaaggccagcaacaagaccgtgcagaacctcagcaaagtgcaacaccagaaacttggtgatgtgaaagttgagcagcagaaaggcttcgataatccagaggaaaactctagcgagttccccgtgaccttcaaagaggagagtaaattcgagctttctggatccaaagtaatggaacagcaatccaatctccagcctgaagccaaggaaaaagaatgcggggacagtttggagaaagatcgcgaacggtggaggaagcatcttaaaggaccgctgacccggaaatgcgtgggagcctctcaagagtgcaagaaggaggcagatgagcagctgattaaagaaacaaagacctgccaggagaactcggacgtctttcagcaggagcaaggcatctccgacctactcggcaagagcggaatcacagaagatgctcgagtcttaaaaacagagtgtgactcatggagtaggatctcaaatccatcggctttttctattgttcctcgcagggcagccaagagcagcagaggaaacggccatttccaggggcacttactcttaccaggagaacagatccagcctaagcaggagaaaaaaggaggtaggagctcagccgactttacggtgctggacctagaggaagacgacgaggatgataatgaaaagactgacgatagtatagatgaaatagtcgacgtcgtgtccgactaccagtccgaagaggtggacgacgttgagaagaataactgcgtggaatacatcgaagacgacgaagagcacgtggatattgaaaccgtggaagaactgtcagaagagatcaacgtggcacacctgaaaacgactgctgcccatactcaatcattcaaacaaccgagctgcacgcacatttctgctgacgagaaagctgcggaaagatccaggaaagcccccccaatccctttgaaactgaagcctgattactggagtgataaactgcagaaagaggctgaagccttcgcctactaccgtagaactcacactgcgaatgagcgcagacgtcggggggaaatgagagacctgtttgagaaactgaaaataacacttggtctgctccactccagcaaggtctccaaatcactcatactgactcgggcattctctgaaatacaagggctgactgatcaggcggataagctcatcggccagaaaaacctgttgacccggaaacggaatatcttgattcgaaaggtgtcgagcctgagcggcaagacagaggaagtggtgctcaagaagttagaatacatctacgctaagcagcaagccctggaggcgcagaagaggaaaaagaaaatggggagtgatgaatttgatattagcccacggatctcaaagcagcaagaaggatctagcgcgtcttctgtggatctgggccaaatgttcattaacaaccggagaggaaaacccctgatcctgagtcggaaaaaagatcaggcaacagaaaacacttcccctctgaatactccgcatacatctgctaacctggttatgacacctcaggggcagctgcttaccctcaagggccccctctttagcgggccggtggtcgctgtgtcacccgatctcttagagtccgacttaaagccccaggtcgccggctcagctgtggcactcccagaaaacgatgatctattcatgatgccccgtatcgtcaatgtcacctcgctggcgaccgagggcggcctcgttgatatggggggttctaagtatccccatgaagtgcccgacagcaagccatccgatcacctcaaggacacagtgcgtaacgaagacaattcactggaagataaaggccgaatttccagccgcggcaatagggacggacgagtaaccctcggtcccacgcaggtgtttctcgctaataaagattcaggatatcctcagattgttgacgtgtcaaacatgcaaaaagctcaagagtttctgcccaagaaaatttctggggacatgaggggcatccagtataagtggaaggagtcggaaagcagaggcgaacgggtaaaaagtaaggacagctctttccataagctgaaaatgaaggatctgaaggacagctctatcgagatggaactccgcaaagttactagcgccatagaagaggcagctctggactcctccgaactgctgaccaacatggaagatgaagatgataccgacgaaaccctcacctcgcttctgaacgagatagcattcttgaatcaacaactgaatgatgacagtgtgggtcttgcggaacttccatcatctatggacactgagtttccaggagacgccagacgcgcgtttatctccaaagtaccgcctggaagcagggctacattccaggtagagcatcttgggaccgggttgaaggagttgccagacgttcagggcgagtccgattcaatctcccccctgctactgcatcttgaggacgacgatttttctgaaaatgaaaaacagctggcggagccggcttctgagccagatgttcttaagattgtcatagactccgaaattaaggactccctgttgagtaataagaaggcaatcgatggcggaaagaacacctcagggcttcccgcggaaccagaatcagtgtctagcccacccaccctgcatatgaaaactgggctcgaaaattccaactcaaccgatacgctttggaggcccatgccgaaactggcacctctgggactaaaagttgctaatcctagttcagacgcagacgggcaatcactgaaggtgatgccatgtctggctccaatcgccgccaaagtgggcagcgtgggtcataaaatgaacttaacagggaatgaccaagaaggaagggagagcaaagtcatgccaactcttgcaccagttgttgcaaagttagggaactcaggcgcttcccctagttcggccggtaaatag

SEQ ID NO: 179365 - DNA, 888 bp, synthetic construct
  misc_feature 1..888: note = Description of Artificial Sequence: Synthetic coding sequence
  source 1..888: mol_type = other DNA
atgcagcccgagggcgccgagaagggcaagagcttcaagcagcggttggtgttgaagagctccttggccaaagagactctgtccgagttcctcgggacatttatccttatcgtgcttgggtgcggatgcgtggcacaggcaatccttagccggggtcgcttcggcggtgttatcaccatcaacgtgggcttttctatggctgtagcaatggccatctatgtcgctggaggcgtgtctggaggccacattaaccctgccgtgtcactcgctatgtgtctgtttgggaggatgaagtggtttaaattgcctttctacgtgggcgcccagttcctcggcgcattcgtgggcgcagcaacagtttttggtatatactatgatggcttaatgagctttgcagggggtaaattgctaattgtgggagagaacgcaaccgctcacatcttcgctacctacccggctccatatctcagtttggcaaacgcattcgcggatcaggtggtcgcaacaatgatcctccttattatcgtgtttgccatttttgatagcagaaatctcggggcacctcgagggctggagccgatagcaattgggctgctcattatagtaatcgcctctagtctgggcctaaactcaggatgtgcaatgaatccagcgcgtgatcttagccctcggctcttcactgccctggcaggctggggatttgaagtgttccgggccggtaacaatttctggtggatcccagtcgtggggccactggtgggtgccgtcattggcggactgatctacgtgctggtcattgagatccaccaccccgagccggattctgtttttaagacagaacaaagtgaagataagcctgaaaagtatgagctctccgtcattatgtag

SEQ ID NO: 179366 - DNA, 1992 bp, synthetic construct
  misc_feature 1..1992: note = Description of Artificial Sequence: Synthetic coding sequence
  source 1..1992: mol_type = other DNA
atgggccggtaccggatccgggtggccaccggcgcctggctgttctccggaagctataaccgagtgcagctatggcttgtcggaacaaggggagaggccgagctcgagctccagttgaggcctgcccgcggcgaagaggaagagttcgatcatgacgttgccgaggacctgggtttacttcagttcgttcgcttgcggaaacaccactggctcgtggatgatgcttggttctgcgataggattaccgtccagggccccggagcctgtgcggaggtcgcctttccatgctatagatgggtccagggggaggacatattgtctctgccggagggaactgcccggctgcccggggataacgcactagatatgttccagaagcatagagaaaaggagttgaaagatcgccagcagatctattgttgggctacctggaaggaggggcttcccctcaccattgccgctgaccgcaaagatgatctgcctcctaacatgcgattccatgaagaaaaacggcttgacttcgagtggactcttaaagccggtgcattggaaatggcactgaagagggtgtacacactgctctccagttggaactgtctggaggacttcgatcaaatcttttggggtcagaaatccgcgctggcagaaaaggtgagacagtgctggcaagacgatgaactgttcagttatcagttcttaaacggcgctaacccgatgttgctgaggagatccactagcctgccatcacgcctggttctgccctccggaatggaagaactccaggcccaactcgaaaaggagctacagaacgggtcccttttcgaagccgacttcattcttttggacgggattcccgccaacgtcattaggggagagaaacaatacttggccgcccctctggtgatgttaaagatggagccgaatggcaagcttcagcccatggtgatccagatccagcccccaaacccgtcttctcccactccaactttgtttctcccctctgacccccccctggcttggctcctcgccaagtcatgggtgcggaatagcgattttcagttacatgaaattcagtatcacctcctgaacacccacttagtggcagaagtgattgccgtggctaccatgcggtgtttacctggcctgcaccctatctttaaattcttaatccctcatatccgatacaccatggagattaatactcgtgccaggacccagctgatttccgacggaggaatctttgacaaggcagttagcaccggtggtggaggccatgtgcaactcctgcgccgagctgctgcccaattaacctattgttccttgtgccccccggacgacctggccgacaggggactcctcggtttgccaggtgccctgtatgcccatgatgccttgcgactgtgggagatcattgcacgatatgtggaaggaatcgtgcatttgttctaccagagagacgatatagtgaaaggggatcccgaactccaggcttggtgcagagagattactgaagtgggcctgtgccaggcacaagataggggctttcccgtaagcttccagagtcagagccagttgtgtcatttcctcaccatgtgcgtgtttacttgtacggcacagcatgctgctattaatcaggggcaactagattggtacgcatgggtacccaacgcgccatgtacaatgcgaatgccgcctcccaccactaaggaggatgtcaccatggcgactgtgatgggctcattgccagacgtgcgccaggcttgtttacaaatggcgatttcctggcacctgtcccgtaggcagccagacatggtccctctggggcatcataaggaaaaatatttcagcggaccgaaacccaaggccgttctaaaccagttccgcactgaccttgaaaagctcgagaaggagatcaccgcccgcaatgagcagcttgattggccatatgaatacttaaaaccgagttgcatcgaaaatagtgtgactatctag

SEQ ID NO: 179367 - DNA, 2106 bp, synthetic construct
  misc_feature 1..2106: note = Description of Artificial Sequence: Synthetic coding sequence
  source 1..2106: mol_type = other DNA
atggccacctacaaggtgcgggtggccaccggcaccgacctgctgtccggcacaagggatagcattagcctgacaatcgtcggcacacagggtgaaagccacaaacagctcttgaaccactttgggagagattttgccactggcgctgtgggccagtacaccgttcagtgccctcaggacctcggggagctcataattattaggctgcacaaagaacggtatgccttcttcccaaaggacccttggtattgcaactacgtgcagatctgcgcgcccaacggtcgcatctatcactttccagcctaccagtggatggatgggtatgagaccctcgcccttagggaggctacaggcaagacaacagccgatgattccttgcccgtgcttctcgagcatcgtaaggaagaaattcgcgctaaacaagatttctaccattggagggtcttcctgcctgggctgccctcgtacgttcatattcccagttaccggccgcccgtgcgtaggcatcgcaaccccaaccgtccagagtggaatggctacatcccgggttttccaattcttattaacttcaaggcaaccaagttcctcaacctgaatttgcggtactctttcctcaagacagcatcctttttcgtgcgactgggccctatggctctagcatttaaagtaaggggtcttcttgattgtaagcatagctggaagcgtctaaaagacatcagaaaaatctttcctggcaagaaatctgtggtctcggagtacgtggcagagcattgggcagaagacaccttcttcgggtaccagtacttgaatggggtcaatcctggtctgatacgccgatgtacacggattcctgataaattcccggtgacagatgacatggtggccccattcctgggcgagggcacttgtctgcaagcagaacttgagaaaggaaacatttatctagccgactaccgcataatggaggggattccaaccgtcgaactttccggacgcaaacagcaccattgcgctcccctgtgcctgctccacttcggtccagaagggaagatgatgcctatcgccattcaactgagccaaactcctggaccggactgtcccatcttcttacctagtgatagtgagtgggactggttgctcgcaaagacgtgggtaaggtatgccgaattttatagtcatgaagcaatcgcgcacctgcttgaaacacatctgattgctgaagccttttgtctcgcgctcctccgaaacctacctatgtgccaccctctgtataagctgttgatccctcatactcgctacacagtccaaatcaatagcatcggacgcgccgtcttactgaatgaggggggtctgagcgccaagggcatgtctctgggggtagagggatttgcaggggtgatggtgcgggccttgagcgaattaacctacgattccctgtacttacccaacgactttgtggagcggggtgtgcaggatctgccaggctactactacagagacgatagtctggcggtctggaacgccctggaaaaatatgtgactgagattattacctactactatccctctgatgcagccgtggagggtgatcctgagctccagagctgggtgcaagaaattttcaaggaatgtctcctcgggagggagagcagcggattccccagatgcttgagaactgtcccagaacttattcgctacgtaactatcgttatatatacctgctctgccaaacacgccgctgtgaacactgggcagatggaattcactgcctggatgcccaactttccagcttcaatgcggaatcccccgattcaaacgaaagggctaacaactctggagacctttatggacacacttccggacgttaagaccacctgtatcactcttcttgttctatggacgttgtcaagggaaccagacgacagaaggcccctggggcacttccccgacatacatttcgtggaggaggcaccacgacgttccatcgaagccttccgacagcgtctaaaccagattagccacgacattaggcagcggaataagtgcttgcctatcccttattattacttggaccctgtgctgattgagaacagcatctccatttag

SEQ ID NO: 179368 - DNA, 1989 bp, synthetic construct
  misc_feature 1..1989: note = Description of Artificial Sequence: Synthetic coding sequence
  source 1..1989: mol_type = other DNA
atgggcctgtaccggatccgggtgagcaccggcgccagcctgtacgcaggcagcaataaccaggtgcagctgtggcttgtgggacagcacggggaggctgcactcggtaaacggttgtggcctgctagaggaaaggaaacagagctgaaggtcgaggttcctgaatatctagggcccctcctgttcgtcaagttgcgcaaaaggcatctgttgaaggatgatgcatggttttgcaattggatctcagtgcagggacctggggctggagacgaagtacgcttcccatgctataggtgggtggagggcaacggggttctctccctcccagagggcacaggtcggaccgttggggaagaccctcagggcctgtttcaaaagcatcgagaagaagagctggaggagaggcgcaagctttaccggtggggcaactggaaagacggcctgatcttgaacatggctggagctaaactgtatgatctacctgtagacgaacggttcctggaagacaaaagggtggacttcgaagtctccctggccaagggtctggctgatctcgcaattaaggattccctgaacgtactgacctgctggaaagacctggatgatttcaacagaatcttttggtgcgggcagtcaaaactcgccgaaagagtgagagattcctggaaggaggacgcactttttgggtaccaatttcttaacggtgctaaccccgtggtcttacggaggtctgcccacctcccagcacgtctggtatttcctcccggcatggaagaattacaagcccagctggagaaagagctcgagggtgggacactttttgaggccgatttttctctgctggatggtataaaggcgaacgtcattctttgcagccagcaacacctggctgcacctctcgtcatgctgaagcttcagccagatggtaagttgctcccaatggtgatccaacttcagctgcccagaaccggttcacctcccccccctctgtttctgcccactgatcctcccatggcatggcttctcgcgaagtgttgggtccgcagctctgatttccagctgcatgagcttcagtcacatctcctgcgtggccatctgatggccgaggtaattgtggtcgctacaatgagatgtcttcccagcatacatcctatctttaaattgatcatcccacacctccgctataccttggaaataaacgtgcgggcgaggacaggcctggtatccgacatgggaatattcgaccagatcatgtccaccggtggcggcgggcacgtccagctgcttaaacaagccggggcctttctcacatactcaagcttctgccctccagatgatctggctgacagagggcttctcggcgtgaaatcatctttctacgctcaggacgccctgagactgtgggagattatataccgttacgtggaagggatcgtctcgctgcactacaagaccgatgttgcagtgaaggatgacccagagcttcaaacctggtgtagagagattactgagatcggacttcagggagctcaggatagaggctttccagtgtctctgcaagcacgagaccaggtgtgtcacttcgtcaccatgtgcatctttacatgcaccggtcaacacgcgtctgtccatttggggcaactggattggtattcatgggtaccaaatgccccatgtacaatgcggctaccacctcccaccacgaaagatgccaccttggaaactgtgatggctactctcccgaattttcaccaggcttctttgcagatgagtatcacatggcagttaggtaggaggcagcccgttatggtggcagttggccaacacgaagaggagtacttcagtggacctgagcccaaagcggtgcttaaaaaatttagagaggaactcgccgcccttgataaggagattgagattagaaacgcgaagctggatatgccctacgaatatctacgaccaagtgttgtggagaactcagtggcaatctag

SEQ ID NO: 179369 - DNA, 2055 bp, synthetic construct
  misc_feature 1..2055: note = Description of Artificial Sequence: Synthetic coding sequence
  source 1..2055: mol_type = other DNA
atgctgaagcggaacgagagccagtggctggcccagcggcggcggagtgagacttccctgagcaagatgggactctatcgcataagagtctctactggggcctctctatatgcgggctccaataaccaggtgcagttgtggctggtcggccagcatggagaagcggcactgggtaaaaggctttggccagcccggggaaaggaaacagaactcaaggttgaagtgccagaatacttaggcccattattgtttgtgaagcttcggaaaaggcatctcctcaaagatgacgcatggttttgcaactggatcagtgtgcaaggcccgggtgcgggggacgaggtccgcttcccttgttatcggtgggtggaggggaacggagtcctgtcccttccagagggtactggccgaactgtcggggaagacccacagggcctttttcagaaacatcgggaagaggagctcgaagagcgaaggaaactgtaccgctggggcaattggaaagatggtctcattctaaatatggctggcgccaaactgtacgatctcccagtggacgaacggtttttggaagacaaacgggtagactttgaggtcagtctggcgaaaggattggccgaccttgcgatcaaagactcactcaatgtgctgacatgctggaaggatctggacgacttcaacaggattttctggtgtgggcagtccaagctggcagaaagggtacgtgatagctggaaggaagacgcgctgtttggttaccagtttcttaacggcgctaaccccgttgttctgagacggagcgcacacctcccagctcgtctcgtgttccctccagggatggaggagctgcaagcgcagctagaaaaagagcttgagggcggtacattgtttgaagcagatttcagcttactcgacggcatcaaagccaacgtgatcctgtgtagccagcagcatctcgctgcccctctcgtcatgctgaagcttcagcccgacggcaaactgctcccaatggtaattcagctgcagctcccccgcaccggtagtcccccaccgccgcttttcctgcctacagacccacccatggcgtggctgctggccaaatgctgggtgcgctcttccgattttcagctgcacgagctccagtcacatctgttaaggggccacctgatggccgaggtgattgtagttgccactatgaggtgtcttccatcgatccatcctattttcaaattaattattccccatctccgctatacattggagattaacgttcgagctaggaccggcctggtgtccgacatgggcatttttgatcagatcatgagtacaggtggcggaggacacgtgcagctgctgaagcaagctggggctttcctgacctatagttctttttgcccacccgatgacttggccgaccgcgggttgctgggggtcaaatcttccttttatgcacaggatgcactgagactgtgggagattatttaccgatacgtggaggggatagtgtctctgcactacaaaaccgatgtggccgtcaaagacgaccccgagctccagacttggtgccgagagatcaccgaaatcgggctgcagggcgcacaggatcgtgggttcccagtgtcgctgcaggcccgagatcaagtttgtcactttgttaccatgtgcatttttacctgcaccggacagcatgcttctgtgcatttgggacaattagactggtacagctgggtaccaaatgccccttgcacaatgagactcccaccccctacgacgaaagacgcaaccctggaaactgtgatggccacattacccaatttccaccaggcatctctgcagatgagcatcacatggcagcttgggcggaggcagccggtgatggtcgcggtaggccagcacgaggaggagtacttttctggccccgaacccaaagccgttttaaagaaatttcgagaggagctggcagccttagacaaagaaattgagattagaaacgcaaagctcgacatgccttacgagtaccttagaccttccgtggttgagaactccgtagcaatatag

SEQ ID NO: 179370 - DNA, 1989 bp, synthetic construct
  misc_feature 1..1989: note = Description of Artificial Sequence: Synthetic coding sequence
  source 1..1989: mol_type = other DNA
atgggcctgtaccggatccgggtgagcaccggcgccagcctgtacgctggttctaacaatcaggtacagctgtggctggtgggacaacacggtgaggctgccctgggaaaaagattatggccagcaaggggaaaggagacggagttgaaggtggaggttccagaataccttgggccactgctgtttgttaagctgagaaaaaggcacttacttaaggacgacgcctggttttgtaactggatcagcgtccaggggccaggcgctggggatgaggttagattcccatgttacaggtgggtagagggcaatggcgttctttccctacccgagggcactgggagaaccgtcggcgaggatccccagggactttttcagaaacatagggaagaagaacttgaagagcggaggaaactctaccggtgggggaactggaaggacggactaattcttaatatggccggggccaaactgtacgatctccccgtcgatgagcgctttctggaggacaaaagggtcgacttcgaagtaagtttagcaaagggactcgcagacctggctatcaaagactcgctaaatgtcctcacctgctggaaggatctcgatgactttaaccggatcttttggtgtggccagtccaaactcgccgaaagagtgcgggatagctggaaggaggacgccctttttggataccagttcctgaatggcgccaaccccgtcgtgctaaggagatccgcacacctccctgcgcgactggtttttccaccgggtatggaggaactgcaagcccaattggagaaggaactcgaaggcggtactctcttcgaggccgattttagcctactagatggcattaaggccaatgtgatattatgctcccaacagcacctggcagccccgctggtgatgttgaaactccagcccgacggaaaactcctcccaatggttatccagctgcagcttccgaggactggttccccgccccctcctctgtttcttcctaccgacccacccatggcttggctgctggctaagtgctgggttcggagctccgactttcaactgcacgaactgcagagtcatcttttgaggggacaccttatggccgaggtgattgtagttgctaccatgcggtgccttccttcaatacatcccattttcaagctgattatacctcacctgcgctatacgcttgaaattaatgtccgtgcaaggacaggcttagtgtccgatatgggaatattcgatcagatcatgagcacaggaggtggtgggcacgttcagttactgaaacaagccggcgccttcctcacatacagcagcttttgccctcctgatgacttggcggacagagggctgctgggagtgaagagttctttctacgctcaagacgccttacgcttgtgggagatcatctacaggtatgtagaaggaatcgtgtcactccactataagacggatgttgcagtaaaggatgacccggaactgcagacatggtgccgcgagattaccgagattggactccagggggctcaggacaggggtttccctgtgagcctgcaggcccgcgatcaggtatgtcactttgtcaccatgtgcatttttacatgcaccggtcaacacgcttccgtgcacctaggtcaactcgattggtattcttgggtccccaacgccccttgtactatgcgccttcccccacctactaccaaagacgctaccttggagacagtcatggccacactgcctaatttccaccaagcgtccctgcagatgtccattacttggcagctcggacggcggcaacccgtgatggtcgccgtcggtcaacacgaggaggagtatttttccggtcctgagccaaaagccgtcctgaagaagttcagagaggaattggcagccttggacaaggaaatcgaaatcagaaatgccaaactcgacatgccctacgagtaccttcggccctctgtcgtggaaaacagcgtggccatttag

SEQ ID NO: 179371 - DNA, 486 bp, synthetic construct
  misc_feature 1..486: note = Description of Artificial Sequence: Synthetic coding sequence
  source 1..486: mol_type = other DNA
atggaccaggagaccgtgggcaacgtggtgctgctggccatcgtgaccttgatctctgtggttcagaatgggttttttgcgcacaaagtagagcacgagtctcggacccagaacggtcgctcattccaacggaccggtactctggcctttgaaagggtttacacagccaatcaaaattgtgtggatgcctaccccaccttccttgccgtgctgtggtcagccggattgttgtgtagccaagtcccagccgcctttgcaggattgatgtaccttttcgtcaggcaaaagtatttcgtcggatacctcggggaacgcacccaaagcacacctggttacattttcggaaagaggatcattctttttctgttcctcatgagtgttgccggcatatttaattattatctgatcttcttctttggttctgactttgagaattacataaaaacgatatcaacgaccatttcaccgttactgctcatcccctag

SEQ ID NO: 179372 - DNA, 2532 bp, synthetic construct
  misc_feature 1..2532: note = Description of Artificial Sequence: Synthetic coding sequence
  source 1..2532: mol_type = other DNA
atgccccggggcgccttccggccctgcctgcccgccctgtacttcgccttcctcacctgtccaaccccagagcagcggatgtctgggacccaggctccagatatccacctaggggagccagcccggggtactggctgcgttcggggaaagcaaactagtattagggttcaggattgcgggcggagagaagaagctagagcggcttcaagggagcttaggagagagaaagctcaagagcatccaagggagtcttgggctcacccacagccttatccggcccctcagccgctggctctgcggcctgaaacgcagccctgtccggcttgtaggagcagccctccagggcgcctgctactgcggcccgccttgcccggccatccatttctattgcctatcatggccgtgtatcggttgtgtgtaacaaccggcccatatctgagagccggaacactggacaacatctcagttaccctggtcggcacttgtggagagtcaccgaaacagcgtctagatcgtatgggtcgcgatttcgcccctggttctgtccagaaatacaaggtacgatgtaccgcagaactgggggagctactgcttcttcgagtgcataaggaacgctatgccttttttcggaaggattcttggtactgtagccgcatctgcgtgacagagcctgatgggtccgtcagccactttccctgctaccaatggattgagggatactgtacagtcgaactgcgaccaggtaccgcaaggaccatttgtcaggattccctccccctgctgcttgatcatcgcacaagggagctgcgcgcccgtcaggagtgctatcggtggaaaatctacgctccagggtttccctgtatggtagatgtcaacagttttcaggagatggaatcagacaaaaaattcgctctgaccaaaacgaccacctgtgtggaccaaggtgacagctccggtaataggtacctccccgggttccctatgaagattgacattccaagcttgatgtacatggagccaaacgtaaggtactccgccaccaagacaatctcgcttctgtttaacgctattcctgccagtttgggtatgaagcttcgagggctgctggatcgcaagggcagttggaagaagttggacgacatgcaaaatattttttggtgccataagactttcaccacaaaatacgttaccgaacattggtgtgaagatcacttttttggatatcagtacctgaatggagtgaatcctgttatgctgcattgtatctctagcctaccgagtaagctgcccgtcactaacgatatggtggctccactgttaggacaagacacctgcttgcagactgagttggagcggggaaacatttttctggccgactattggattctagccgaagctcccacccactgtttaaatgggcggcagcagtacgtggccgctccgttatgcctcctgtggctgtcccctcaaggtgccctggtgcctctggccattcaattgagtcagacacctggcccggattcccccatattcctgccaaccgactctgagtgggactggctgcttgccaagacctgggtccgcaacagcgagtttctggtgcatgaaaataacacacactttttgtgcacccatctcttgtgtgaggccttcgctatggccaccttaaggcaactcccgctgtgtcatcctatttataagctgcttctcccacataccaggtacacactacaagtgaacactattgcaagagccacccttctgaatcccgaaggtttggtcgaccaggtgacatcgatcgggagacagggtctcatttacctcatgtctactggtctcgctcactttacctacacaaacttttgcctgcccgattccctgagagcccgcggggtgttggcaatacccaattatcattaccgcgatgatggattgaagatctgggccgcaatcgagtcttttgtctcagaaatagtaggatattactatccaagtgatgcttccgtccaacaggactccgagctgcaggcatggaccggagaaatattcgctcaggcattcctgggcagagagtctagcgggtttcctagccggctctgtacgccaggcgaaatggtcaagttcttaaccgccataatttttaattgctccgcccagcacgccgcagtgaactcaggacagcatgattttggggcgtggatgccgaacgcccctagcagcatgcgccaaccacctccccagaccaagggaactaccacactgaagacatatcttgatactctgccagaggtgaatatatcttgcaataacctgttgctgttttggttggtttcgcaggagcccaaggatcaaaggccactcggtacataccccgatgagcactttacggaggaagcccctagacgatcaatagcagcgtttcagtctcgcttggcacagatatcccgagatattcaggaacgtaaccaagggcttgctcttccctacacctaccttgaccctcccttgattgagaactctgtgagcatttag

SEQ ID NO: 179373 - DNA, 2604 bp, synthetic construct
  misc_feature 1..2604: note = Description of Artificial Sequence: Synthetic coding sequence
  source 1..2604: mol_type = other DNA
atgggccggaaccggagctggggcaccctgggcagcggccggaccagcaccccggggcaccagagtggcccactgactcggagacgtgcagtttcgcaactttaccgacgatacctcctcttcagcatatcagcttccgacccaagtctgcgctccggtacccaggcccctgacatacacttgggggaacccgcccgtggcaccggatgcgtaaggggcaagcagactagcattcgcgtacaggactgcggtaggagggaggaggcacgggccgcctcccgtgagctgcgacgggaaaaagcacaggaacacccacgcgaaagctgggcgcatcctcagccctacccagctccacagccactcgccctgagacccgaaactcagccttgcccagcttgtaggagcagtccccccgggagactcctcttacgaccagccctacccggccaccctttcttgttgcctataatggccgtgtaccggctgtgtgtcaccactgggccatacttgcgagccgggacactggataatatttcagttacactggtcgggacttgcggcgaatcacctaagcaacggctcgatcgcatggggcgggactttgcacccggcagtgtgcagaaatacaaagttaggtgcacagcggagttgggcgagctgcttctgctgagagtgcataaagagagatacgctttttttagaaaagactcctggtactgttctaggatctgcgtcactgaacccgatgggtcagtgtcgcactttccatgctaccagtggattgaggggtattgcacggtagagttgcgccctggcaccgcccgcactatatgccaggacagccttccgttgttgttggaccatagaacaagggagttacgcgcacggcaggaatgttataggtggaagatttacgcccccgggtttccttgcatggtcgatgtgaatagtttccaggagatggagtctgataaaaagttcgccctgaccaagactacaacatgtgtagatcagggcgactcatccggcaacaggtacttgccgggattccccatgaaaatagatataccttccctgatgtacatggaaccaaatgtaaggtactcagctactaagacaatctccctgctttttaacgcaatcccagcctccctgggtatgaaattgaggggcctccttgatcgaaaagggagctggaaaaaattggacgatatgcagaacattttttggtgtcacaagaccttcacgactaagtacgttacagaacactggtgcgaagatcatttttttggataccagtatctgaacggcgtgaaccccgttatgttgcattgcatcagtagcctcccctctaaattaccagtgacgaacgatatggtagcgccactccttggccaggatacatgtctccaaacagaactggaaaggggaaacatcttcttagccgactactggatcttggccgaggcacctacgcattgtctgaatggacgccagcagtatgttgcggcccctctgtgtctcttgtggctgagcccacaaggagctctggtaccactggctatccagctgtcccagactccgggccctgattctccaatttttctacctactgacagcgaatgggactggttgcttgcaaagacgtgggtaagaaactccgagttcttggtccacgaaaacaatacccatttcctgtgtacgcacctgctgtgcgaagctttcgccatggccacattgcgacaactgccactgtgtcaccccatttacaagcttctcctgccccacacccgttacaccctgcaggtcaacacaatcgcccgagcaacccttctgaaccccgagggcctcgtagaccaggttactagcattgggaggcaaggactgatctatttgatgagcacgggattagcccatttcacctacaccaatttttgtctccccgactctcttagagcccgaggggtgctggccatacccaattaccactaccgggacgacggactgaaaatttgggccgctattgagtcctttgtgtccgaaatcgtgggatactattatcccagtgacgcttccgttcaacaagattccgagctgcaagcttggacaggagagatctttgctcaggctttccttggtagggagagctccggcttcccctcacgcctgtgtactcctggtgaaatggtgaagtttctcactgccatcatttttaattgttcggcccagcacgccgccgttaacagtggacagcacgatttcggggcctggatgccaaatgctccatcaagcatgagacaaccccccccccagacaaaaggaaccacaaccctcaaaacgtatctcgacacgcttcccgaggttaatatctcctgcaacaatttgctgttgttctggctcgtgtcccaagaacccaaagaccaacgacccttagggacttatcctgatgagcatttcaccgaggaggccccccgccggagcatcgcggcttttcagtcgcggttagctcagattagtcgcgatattcaagaacgcaatcagggcttagccctgccttatacgtacctcgatccccccctcattgaaaattctgtcagtatctag

SEQ ID NO: 179374 - DNA, 2136 bp, synthetic construct
  misc_feature 1..2136: note = Description of Artificial Sequence: Synthetic coding sequence
  source 1..2136: mol_type = other DNA
atggccgtgtaccggctgtgcgtgaccaccggcccctacctgcgggcaggcacgcttgacaacattagcgtgaccctggtgggcacatgcggagagagccccaagcagaggctcgaccgaatgggacgagatttcgcccccggcagcgtacagaaatataaagtcaggtgtactgctgagctgggagagctgttactgctgagagtgcataaggagagatacgcatttttcagaaaggattcatggtactgctcacgcatttgtgtcacagaaccggacggcagtgtgtctcattttccttgctatcagtggattgaaggttactgtaccgtggaacttagacccgggacagcccgcaccatttgtcaggactccctcccactgctcttggatcatcggacacgggagctgcgggctcgccaggagtgctatcggtggaagatttatgctcctggcttcccctgcatggtggatgtaaattcattccaggaaatggagtctgacaagaagttcgctctgaccaaaaccaccacctgcgtggatcagggggacagctctggaaacagatacttgcctggttttccaatgaaaattgacattccgagcttgatgtacatggaaccaaatgttcgttactccgcaacaaagacaatctccctcctgtttaacgccatccctgcaagtctgggcatgaagctcagaggccttcttgatagaaaaggaagttggaagaagctcgacgatatgcagaacattttttggtgccataagacatttaccactaaatatgtgacggagcattggtgtgaggatcactttttcgggtatcagtatctgaatggcgtgaaccccgttatgctgcactgtatcagctccctgccctcgaagctgcccgtgacaaatgacatggtggcccccctcctcgggcaggatacatgtcttcagactgagttagagcgcggcaacatctttctggccgattattggatcctggctgaagccccgactcattgcctaaacgggagacagcaatacgtcgccgccccattatgcctactgtggctttcaccacagggtgcccttgtgcctcttgctattcaactgagtcagacccctggacctgattctccgatatttcttcccacagattcagaatgggactggctcctcgcaaagacttgggtaagaaatagcgagtttctggtccatgagaataatacccatttcttgtgcactcatctgctttgtgaggcgttcgctatggctactctgcggcaacttcccttgtgtcatcccatttacaaactgctgcttccccatacccggtacacgctccaggtcaatacaattgcgagagcaacattactgaatcccgaaggcctggtggaccaagtcaccagtatcggcagacagggattaatttatctcatgagtacaggcctggcacattttacctatacaaatttctgcctcccagacagtttacgcgctcggggtgtgcttgctatcccgaactaccactatcgcgacgacggcttgaagatttgggctgccattgaatctttcgttagcgagatagtcgggtattactacccctctgatgcttccgtgcagcaagatagtgaactgcaggcttggactggcgagatcttcgctcaagcatttctgggccgggagagctcaggattcccctctcgcttatgcacgcccggcgagatggtgaaatttttaacagctatcatctttaactgttccgcgcagcatgccgccgtgaattccggtcaacatgattttggagcttggatgcccaacgcccccagcagcatgcggcagcctcccccccagactaaaggcacaactaccttgaagacctatctggataccctgccagaagtgaacatatcatgtaataaccttctccttttctggctggtctcccaagaacccaaagatcagcgccccctcggaacctacccagacgaacactttacggaggaggcgccccgtaggagcatcgctgctttccagtccagattagcgcagatttcccgtgacattcaggagcgtaatcaaggcctcgcactgccctacacgtatttagacccccctttaatcgaaaacagtgtaagcatttag

SEQ ID NO: 179375 - DNA, 759 bp, synthetic construct
  misc_feature 1..759: note = Description of Artificial Sequence: Synthetic coding sequence
  source 1..759: mol_type = other DNA
atggagccccagagcatgaagggccagaagcggcccttcggcggcccttggcgccttaaggttcttggcggcccaccttggcttagaagaaccctgcccaagctcgggcgaccgaaggaagcacccgttgcccggatgagcacccagagtacgcaccccttgaaacccgaggctccaagactacctcctggcattccggaatctccatcttgccagagaagacacacactgccagcgagtgagttccgttgcctgactcccgaagatgccgtatctgcgttcgagattgagcgcgaggcttttattagtgtgctgggagtgtgccccttataccttgacgagattcgacacttcctgacgttgtgccctgagctctctctagggtggttcgaagagggatgcctggtagctttcatcataggcagcctctgggacaaggaacgcctcatgcaggaaagcctcacactgcaccggtcaggcgggcatatcgcgcatctgcatgtgctggcggttcatagagcgttccgccaacagggacgggggcccatccttctctggcggtatctgcatcatctgggcagccagccagctgtgagacgcgcggcccttatgtgtgaagacgcccttgtgcccttctatgagagatttagtttccacgccgtggggccatgcgctatcactgtgggatccctgacctttatggagctgcattgttccctgagagggcacccatttcttaggaggaatagcggatgctag

SEQ ID NO: 179376 - DNA, 624 bp, synthetic construct
  misc_feature 1..624: note = Description of Artificial Sequence: Synthetic coding sequence
  source 1..624: mol_type = other DNA
atgagcacccagagcacccaccccctgaagcccgaggccccccggctaccccccggtatcccagaatctccatcatgtcagcgcaggcacactctaccagcatctgagtttaggtgcctcaccccagaagatgctgtgtcagccttcgagattgaaagagaagctttcatatcggtactgggagtgtgtcccctatatcttgacgaaatccgccattttctcacattgtgcccagaactgagtctgggctggtttgaggagggatgcctggttgcgttcattatcggaagtttgtgggacaaagaacggctgatgcaagagagcctgactttacaccgatccggcggccatatcgcccatctgcacgtattagccgtgcatcgcgcctttcgacagcaaggtcgcggacctatcctcctgtggcggtacctgcaccaccttggctctcaaccagctgtccggcgcgccgccttgatgtgtgaggacgcccttgtgccattttacgagcggttcagtttccacgccgtgggtccttgtgcaatcaccgttggctccctgacatttatggagctacactgctccctgcgggggcacccatttctgagaagaaattctggatgttag

SEQ ID NO: 179377 - DNA, 1536 bp, synthetic construct
  misc_feature 1..1536: note = Description of Artificial Sequence: Synthetic coding sequence
  source 1..1536: mol_type = other DNA
atggtgctgctggccgccgccgtgtgcaccaaggccggcaaggccatcgtgagccgacagtttgtcgagatgacgcgcacgcgaatagaaggcctcttggccgcgtttccaaaacttatgaataccggaaagcaacacactttcgtcgagaccgagagcgtcaggtacgtgtaccaaccaatggagaaattatacatggttctgatcactaccaaaaacagcaacattctggaggatctcgaaaccttgcgactatttagtcgggtgatcccagagtactgcagggctctggaggagaatgaaattagtgagcactgctttgacctaattttcgctttcgacgaaattgtggccctggggtatagagagaatgtcaatctagcccaaatccggacattcaccgaaatggatagccacgaggaaaaagtgtttagagccgtccgcgagacccaggagcgagaagccaaagcagagatgcggagaaaagccaaggagttgcagcaagcacgaagagacgccgaacgacagggcaaaaaagcacccgggtttggtggatttggctcatctgccgtgtccggggggtcaacggcggcgatgattacagagaccatcatcgagacagataaacccaaggtggcccccgccccagcaagacctagtgggccttctaaagccctgaaactgggcgccaagggtaaggaggtcgacaactttgtggacaagctaaagagcgaaggggaaaccattatgagctcgagcatgggcaagaggacttcagaggccaccaagatgcacgcccctcccatcaacatggagagcgtacatatgaagatcgaagagaaaatcactctgacttgcggccgtgatggtgggctccaaaacatggagctccatggcatgatcatgctgaggatttctgacgacaagtatggacggattagattacatgtcgagaacgaggacaaaaaaggcgtgcagctgcagacacaccctaatgtcgacaagaaattattcacagccgagtctctcatcgggctgaagaaccccgaaaagtccttcccagttaacagtgacgtgggcgtgcttaagtggcggttacagactacagaagagtcattcattcctctcactatcaattgctggccctctgaaagtggtaatggctgtgatgttaacattgagtacgagctgcaggaagacaatctcgagttgaacgatgtggtgattactatacccttgcctagtggagtaggtgccccggtgattggggagattgatggcgaataccgacacgatagtcgaagaaacactcttgagtggtgcttgccagtcatcgacgccaagaataaatctggcagcctcgagttttcgatagccgggcagcctaacgatttttttcctgtccaggtaagctttgtgagcaagaagaactattgcaacatccaggtcactaaggtcacccaagtcgatggaaacagtccagtcaggttcagcaccgaaactaccttcctggtggataagtacgagatcctgtag

SEQ ID NO: 179378 - DNA, 1659 bp, synthetic construct
  misc_feature 1..1659: note = Description of Artificial Sequence: Synthetic coding sequence
  source 1..1659: mol_type = other DNA
atggccgagtgcaacctggtggccatcctgatcagcagcatcgacaaccctctcgataaaaacctggacaacgggggaaatagttgcctggactttcggccgctcaacagcttcagccagccacaggtgctgctcgctgcagccgtgtgtacaaaggctggcaaggcaatcgtgtccagacagttcgttgaaatgaccagaactagaatcgagggactccttgcagcctttcctaaactcatgaacactggcaaacagcacaccttcgtggaaaccgaatctgtgcgatatgtctaccaacctatggaaaaactgtatatggtgttgataaccactaagaattccaacattctcgaagaccttgagacactccgactcttctcccgcgtgataccagaatattgccgagccctcgaggagaacgaaataagcgaacattgcttcgacttgattttcgctttcgatgaaatagttgcgctgggatatagagagaatgtgaatttagcccagatccgaacatttaccgaaatggactctcacgaggagaaggtgttcagggcagtacgcgagacccaagaaagggaggcgaaggccgagatgcgtcgtaaggccaaagaactccagcaggctagacgcgacgctgagcggcagggaaagaaggcccctggatttggaggtttcggaagtagcgctgtttctggtggctctaccgcggcaatgattacagagacgatcatcgaaaccgataagccaaaggtagctccagctcccgccaggccctcaggccctagcaaagcactcaaacttggggccaaaggaaaagaagtcgacaattttgtggacaaactgaagagcgaaggagagacaataatgtcctccagcatggggaagcgcacaagtgaggctaccaagatgcatgcccctcctatcaatatggagagcgttcatatgaagatagaagaaaagatcacccttacttgcggcagagatggaggactgcaaaacatggagctgcacggaatgatcatgcttagaatctctgatgataagtacggccgaattcgactccatgtggagaatgaagacaagaagggggtccagctccagacgcatcctaacgtggacaagaaactgtttactgccgaaagccttatcggcctaaaaaacccggagaagtccttcccagttaattccgacgtgggcgtgctgaagtggcgactgcaaacaacagaagagtctttcatccccttgactataaattgttggccttcagaaagcggcaacggttgcgatgtgaacatcgagtacgaactgcaggaggacaaccttgaactaaatgatgtggtcatcacaattccgctgccctcgggcgtgggggcccccgtgattggggagattgatggcgagtatcggcacgacagccgccgtaacacactggaatggtgccttcccgtgatcgacgccaagaataaatctggttccctcgaattctccatagcaggacagcctaacgacttcttccccgtgcaggttagctttgtttcgaaaaagaactactgtaatatccaggtgacgaaagtcactcaggtggacggcaactctccggttagattctctactgaaacaaccttccttgttgacaaatatgagattctttag

SEQ ID NO: 179379 - DNA, 1272 bp, synthetic construct
  misc_feature 1..1272: note = Description of Artificial Sequence: Synthetic coding sequence
  source 1..1272: mol_type = other DNA
atgatccccgagtactgccgggccctggaggagaacgagatcagcgagcactgttttgacttgatcttcgcgttcgatgagatcgtcgccctgggatatagagagaacgtgaacctagctcaaataagaactttcaccgagatggatagtcacgaagaaaaagtgttccgggcagtcagagagactcaggaacgtgaggcaaaggcggaaatgcgcagaaaagcgaaagagctgcagcaggctcgacgcgatgcagaacgccaaggaaagaaggcaccagggttcggcgggtttgggtccagcgcagtctcaggcggtagcactgctgcaatgattaccgaaactataatagaaacagacaaaccaaaagtggcacctgcccccgcacggcctagcggcccatctaaggccttaaagttaggcgcaaaggggaaggaagtcgacaacttcgtggacaagctgaagtctgagggagaaacaatcatgagttctagcatgggaaaacgcacctctgaggcgaccaagatgcatgccccccccattaatatggagagtgtccacatgaaaatagaggaaaaaatcacactcacctgcggcagagacggtggacttcagaacatggagctgcacggtatgattatgcttcgcatcagcgacgataagtatggccgcatccggctgcatgtcgagaacgaggacaagaaaggggtacaattgcagacccatccaaatgtagacaagaagctgttcaccgctgaaagcctcataggcttgaagaatcccgagaagtcattcccagtgaactccgacgtgggcgtcttgaaatggcgactgcagacaacagaggaaagcttcatccctctcactattaattgctggcccagcgaatccgggaatggatgtgatgtgaacatagaatacgaattgcaggaggataatctggaattaaatgacgttgtgatcacaattccactgccctcaggagtaggcgcccctgtcatcggggaaatcgatggcgagtaccgacatgactcccgaaggaatactctggagtggtgtttgcctgtgatcgacgccaaaaacaaaagcggttcactagaattttccatcgcggggcagccaaatgacttcttcccagtacaagtcagttttgtatctaagaaaaactactgcaatatccaggtaaccaaggtcacgcaggtcgatggcaattctcctgtgcgcttctcaactgagaccacctttctcgtggataaatacgaaatcctgtag

SEQ ID NO: 179380 - DNA, 570 bp, synthetic construct
  misc_feature 1..570: note = Description of Artificial Sequence: Synthetic coding sequence
  source 1..570: mol_type = other DNA
atggtgctgctggccgccgccgtgtgcaccaaggccggcaaggccattgtgtcaagacaatttgttgagatgacgagaacccggatcgaaggccttctggccgccttcccaaagctgatgaacaccgggaagcagcatacattcgttgagaccgagagcgtaaggtacgtctatcagcctatggaaaagctgtatatggtgctgataacgactaagaacagcaacatccttgaggatctggagacccttagattgttttcaagggtgatcccagaatactgtcgggccttggaagagaacgaaatcagcgagcactgctttgatttgattttcgccttcgacgaaatcgtagcccttggttacagagagaatgtaaatctagcccaaatccgtaccttcaccgagatggatagtcatgaggagaaagttttccgcgcggtgcgagaaacccaggaaagagaggcaaaggccgagatgcggcggaaagcgaaggaacttcaacaggctcagtccgtgggaatcaccggaatgtcacaccacgcccagctgctgttgtactttaatccttag

SEQ ID NO: 179381 - DNA, 2223 bp, synthetic construct
  misc_feature 1..2223: note = Description of Artificial Sequence: Synthetic coding sequence
  source 1..2223: mol_type = other DNA
atgaccgtgaagctggacttcgaggagtgcctgaaggacagcccccggtttcgggccagtatcgaactcgtggaggcagaggtcagtgagttagagacgcgactggagaagcttctcaagcttggcacagggttgcttgagagcggccgccattacctcgctgcctccagggccttcgttgtgggaatctgcgatttagctagactgggtccacccgaacccatgatggcagaatgcctggagaagtttaccgtgtccttaaatcataaactggattcccatgctgagttgcttgatgccacacagcacacactgcaacagcaaatccagacgctggtaaaagagggtctgcgcggtttccgagaggccagaagagacttctggagaggagcagaaagtcttgaggccgcgttaacccataacgccgaagtgccaaggcggcgagcgcaggaagcggaggaggctggcgcagccctcagaactgcacgtgctggatataggggcagagcattggactatgccctgcagataaatgtcatcgaggataaacgaaagtttgatatcatggaatttgtgcttaggcttgtggaggcccaggcaacccactttcagcagggacacgaggagcttagtcgactctcacagtatcgtaaggagttaggagcccagctgcaccagctggtgctgaactccgctcgtgagaagcgtgatatggaacagcgacatgtgttgctcaaacaaaaggagttgggaggcgaagagcccgagcccagtcttcgggaaggacctggcggtttggtgatggaagggcacttgttcaagagagcaagcaatgcctttaagacatggagccgtcgatggttcacaatccagtccaatcagctggtgtatcaaaaaaagtataaagatcccgttaccgtggtggtggacgacctgagactttgcacagtaaaattgtgcccagatagcgagaggcgattttgctttgaagttgtctcaacgtccaagtcttgtttgctccaggctgacagcgaacgactgctacagctgtgggtgagtgccgtacagtcatcaatcgcgtcagcttttagccaagccagactagacgatagtcccagaggccccgggcaaggctccggccaccttgcgatagggtccgctgctaccttgggctctgggggaatggcaagaggtcgcgaaccagggggtgtcggacacgtggtcgcccaggtccagtccgttgatggtaacgcacagtgctgtgattgcagggagcctgctccggagtgggcttccatcaatctgggcgttacactgtgcatccagtgttcgggaatccataggtcactcggggtgcactttagtaaagtaaggagtctgaccctggattcctgggaacctgaactggtgaaactgatgtgcgagctagggaatgtgatcatcaatcagatctacgaggcgcgggtggaggccatggctgtcaagaaaccaggaccttcctgtagccgccaggagaaggaagcctggattcacgctaaatacgtggagaagaaatttctcacaaagctgcctgaaatacgcgggcggagaggcgggcgggggcggccccgtgggcagcccccagtgcctccgaagccaagcatccgtccccgaccagggtcacttcggtcaaagcccgagccccctagtgaagatctgggttcactgcacccaggcgccctgctatttagagctagcggccacccccccagtctgccgacgatggcggacgctcttgctcacggggccgacgtgaattgggtgaacggaggtcaggataatgctacccctttaatacaggccactgccgcaaattcactgctggcttgtgagttcctgttacagaatggcgccaacgttaatcaggctgatagcgcaggccgtgggccactccaccatgctacaatccttggacacactggcctggcttgtctgttcttaaaaaggggggccgacctcggcgctcgggattccgaggggcgcgatcccctaacaatcgctatggaaacagccaacgcagatatagtgacattactgagactcgccaagatgcgggaggccgaagctgcgcagggacaagccggagacgaaacatacctagacatttttagagactttagtttaatggcttccgacgatcctgaaaaactcagccgtcggtcccatgatctccacacgctgtag

SEQ ID NO: 179382 - DNA, 2337 bp, synthetic construct
  misc_feature 1..2337: note = Description of Artificial Sequence: Synthetic coding sequence
  source 1..2337: mol_type = other DNA
atgaagatgaccgtggacttcgaggagtgcctgaaggacagcccccgatttagagccgccctagaggaggtcgaaggcgacgtggctgaactggaactgaagctggacaaactcgtgaagctctgcatcgccatgattgatacgggcaaggccttttgcgtggccaataagcagtttatgaacggaatccgcgatctggctcagtacagtagtaacgacgctgtggtggagacctcgcttaccaaattctcagactccttgcaagaaatgattaactttcatactatcctcttcgatcagacacagaggagtatcaaagcccagctgcagaacttcgtgaaggaagatctgcgtaaattcaaagatgccaagaagcagtttgaaaaggttagcgaagaaaaagaaaacgcactcgtgaaaaatgcccaggttcaacggaacaaacagcatgaagtcgaggaggccaccaatatcctcaccgctactcgaaagtgcttcaggcacatagccctggattatgtgttgcaaatcaatgtacttcagtctaagagaaggtccgaaatcctgaagtcaatgctgtcctttatgtatgcccatctcgccttcttccaccaagggtacgacctcttctctgaattgggaccttatatgaaggatctgggtgcccaactggataggctggtggtagatgcagctaaagaaaagcgagagatggagcaaaagcacagcacaatccaacagaaagacttcagttccgacgactcgaagctggagtacaatgtggacgcggccaacggtattgttatggagggctacttatttaaacgggcctctaatgcttttaagacttggaacaggcggtggttttcgatccagaataatcagctcgtgtatcaaaagaagtttaaagataacccaactgtggtggtagaagatcttaggctgtgtacagtaaagcactgcgaggacatcgagagaagattctgtttcgaggtagtgtctccaaccaagagttgcatgctccaggcagatagcgagaaactgagacaggcgtggatcaaggcggtacagacgtcgatcgcaaccgcttatcgcgaaaagggtgacgaatccgagaagctggataaaaagtcttctcccagtactggtagcctggattctggcaacgagtctaaggagaaacttctgaaaggcgagtcagctcttcaacgagtgcaatgcattcctggcaatgcctcatgttgtgattgtggattggccgacccacgttgggcgtctatcaacctggggatcaccctgtgtatcgaatgtagcgggatacatagaagcctaggtgttcacttctcgaaagtccgctcactcaccctggacacatgggagccagaactgttaaagttgatgtgtgaactgggcaacgatgtaatcaatagggtctatgaagctaatgtggagaaaatgggcatcaagaagccgcagccaggccaacggcaggaaaaagaagcctacatccgtgccaagtacgttgagagaaaattcgtcgacaagtactccatatccctgtcacctcctgagcaacaaaagaaatttgtctccaaaagtagcgaagagaagcgcctgagtatatccaagttcggccccggggatcaagtcagggcttccgcgcagagctctgtgcggtcgaatgatagcggcatacagcagtccagcgatgatggcagagagtcactgccatccacagtgagtgcaaatagcctctacgagccagagggagagcggcaagactctagcatgttcctggactccaaacacctgaacccaggtttgcaactttatcgtgcctcatacgaaaagaatctgcctaagatggccgaagcccttgcgcacggggcggatgtcaattgggctaactcagaggaaaacaaggccaccccgttgatccaggcagtgctcgggggcagtctggtgacatgtgagtttttgctacagaatggcgccaacgttaatcagagggacgttcaaggccggggtccccttcaccacgccactgtccttggtcacactgggcaagtgtgcctgtttcttaaaagaggggccaatcagcacgcaactgacgaggaaggcaaggatcccctgtcaattgccgtcgaggctgctaacgctgacattgttacattattgcggctggccagaatgaacgaggaaatgagagagtctgagggcctgtatggccagcccggggatgagacttaccaagatatttttcgcgatttctcacagatggccagtaataaccccgagaagctaaacagatttcagcaggacagtcagaagttttag

SEQ ID NO: 179383 - DNA, 3618 bp, synthetic construct
  misc_feature 1..3618: note = Description of Artificial Sequence: Synthetic coding sequence
  source 1..3618: mol_type = other DNA
atgaccaagaaggaggagcccccccccagccgggtgccccgggccgtgcgcgtcgcctcattgctgtccgagggcgaggaactctcaggtgacgaccagggcgatgaggaagaagacgatcacgcctacgaaggcgtacctaacggtggctggcatacctcctctctgagcctcagtctgccttctactatcgccgccccccatcctatggacggacctcccgggggatccaccccagttactcctgtgatcaaagctggttggctcgacaagaatcctccacaaggcagttacatctaccagaaacgttgggtgaggctcgatactgatcacctgaggtatttcgatagtaacaaggacgcatattctaagcgttttatctccgtggcatgtatatctcacgtagctgccatcggagatcagaaatttgaagtcatcactaacaataggacatttgcctttagggcagagagcgatgtggagcgaaaagagtggatgcaggctctgcagcaggctatggctgagcagagggctcgtgcgcggttgtcaagtgcttatctgctcggcgtgcccggcagcgaacaaccagatcgtgctggctctcttgaactgcggggctttaaaaacaaattatatgtggccgtcgtgggcgataaggttcagctctacaagaaccttgaggagtaccacttaggcattggtatcaccttcattgacatgtcagtgggaaacgtgaaagaggtggatcggcggtctttcgacttaacaaccccttatcggatcttcagtttcagcgccgactctgaacttgaaaaagaacaatggcttgaagccatgcagggagcgatcgccgaggcactgagcacaagcgaggttgccgagaggatttgggctgcagctcccaaccggttttgtgccgactgcggagccccccaaccagactgggccagcatcaacctctgtgtggttatctgtaagcgctgcgcgggtgaacaccgcggcttaggtgctggcgtgtctaaggtccgatctctcaagatggatcggaaagtatggaccgaaacactgattgaactttttctgcagctaggaaatggcgccggtaaccgattttgggccgccaatgtgcctcctagtgaagccctccagccatcatcatccccatccactagacgctgccatctggaggctaaatatcgcgaggggaagtatcgaaggtaccatccattgttcgggaatcaagaggagctggacaaggcactctgtgcagccgttaccaccacagatctcgcagaaacccaagctcttctcggctgcggtgccggcatcaactgtttttccggcgacccagaggcacccacacccttggctctggcagagcaggctggccagactctccaaatggaatttctccggaacaatagaaccacagaagtgcctcgtctcgacagtatgaaaccgcttgaaaagcactatagcgtggtcctgccaactgtctcccactcggggtttctgtataagacagcgtctgccggtaagctgttgcaggatcggcgcgccagggaggaattctctagacgctggtgcgttctgggggacggagttttgtcatacttcgagaatgaacgcgctgtcacccccaacggcgaaattcgagcttcagagatcgtctgtcttgcggtgcccccacccgacacccatgggtttgaacacacctttgaagtgtacacggagggcgaacgcctctatctttttgggctcgagtccgccgagcaggcccatgaatgggttaaatgtatcgccaaagcgtttgtacctccactggccgaagatctgctggcccgagacttcgagaggctggggcggctgccatacaaagctggcctttccttgcaacgggctcaagaaggttggttctccctgtctggatccgagctcagggccgtttttcctgaaggcccctgcgaagagccccttcagttaagaaaactccaagagctgtccatccagggggactctgaaaaccaggtgcttgtactggtagaacggcggaggactttgtacatccagggcgagcggaggctggatttcatgggctggctaggcgccatccagaaagctgcggcttccatgggggatacgctctcagaacagcagctgggagatagcgacatcccagtcatcgtctaccgctgtgtggattatataactcagtgtggactcactagtgagggaatttacaggaaatgtggccagacttcaaaaactcagcgccttcttgaatctctgaggcaagacgctcgctctgtacacctgaaggagggtgagcaacatgtggacgatgtcagcagcgcgctaaaacgcttcctgcgggacctgccggatggcctgttcacacgtgctcagcgcctgacctggctcgaagctagtgagatcgaggacgaagaggagaaggtttctaggtatcgcgagcttttggtaaggctgccgccagtgaaccgtgcaacagtgaaggcactcatcagtcacctctattgcgtgcagtgtttttctgacacgaatcagatgaatgtgcacaacctggccatcgtgttcgggccaacgctgttccagacggatgggcaggactacaaggccggaagggtagttgaagacctaattaatcactacgtggtagtcttctccgttgacgaagaggagctacgcaagcagagagaggagatcactgcaattgtcaagatgcgtgtggctgggactgcatcaggcacccagcatgctggggacttcatatgtactgtgtaccttgaagagaagaaagccgagacagagcagcacatcaaggttcccgctagcatgacagcagaagagctcaccttagaaatcctcgatagacgcaatgtggggattcgcgagaaagattattggacctgctttgaagtcaacgaacgagaagaggccgaacgtcctctccacttcgccgaaaaggtcttgccgatcctccacggcctgggaactgatagccatctggtagtgaaaaagcaccaggcaatggaggctatgctgctgtacttggcctcacgcgtaggggataccaagcacggaatgatgaaattccgcgaggacaggagcttgctcggcctgggcctcccttcagggggcttccacgatcgctactttatactaaattcttcctgtttgcgcctttataaggaggtgcgcagtcaaaggccttggagcggcgcccctgagaccagccacagacccgaaaaagaatggccaatcaaaagcctcaaggtgtatctgggcgttaagaagaagctgcggccaccaacctgttgggggtttaccgttgtccatgagacagagaaacacgaaaaacagcaatggtatctgtgctgtgatacccagatggaactgagagagtggtttgcaacattcttgtttgttcagcatgatggtcttgtctggccaagcgagcctagtcgcgtgagtagagccgtgcccgaggtgcgcctgggctctgtaagccttatccccctgagaggatccgagaatgagatgcgccgcagcgtggcagccttcaccgcggaccccctaagtttgctgagaaatgtatag

SEQ ID NO: 179384 - DNA, 1884 bp, synthetic construct
  misc_feature 1..1884: note = Description of Artificial Sequence: Synthetic coding sequence
  source 1..1884: mol_type = other DNA
aagtgctgggccgtgtgggtgggcgccgtgtggaccgagggcgcctggcagcctcgcgttggcgtgatctgtgggctgaagggcagaatgacattgtctggttctcgcggacaggaggaaccgccccctagtcgggtgccccgtgctgtgagagtcgcatccttgctgtccgaaggtgaggaactgtccggagatgaccaaggagatgaggaagaggatgatcatgcctacgagggcgttcctaacggcggatggcatacctctagcctgagtctttcattgccgtccaccatcgccgcccctcaccccatggatggccccccaggaggctccaccccggttaccccagtaatcaaagcaggatggcttgacaaaaacccaccccagggcagttacatataccaaaagcgctgggtgcggctcgatacggatcacctacgctattttgattcgaacaaagatgcttattctaaacgctttatttcggtcgcttgcatcagtcacgtggccgccatcggcgaccagaagttcgaagtgattaccaacaaccgtaccttcgcatttcgcgcggaatcagacgtggaacgtaaggagtggatgcaggcactgcagcaagccatggccgaacagagggctagggcccggctgtcttctgcctatctgctgggtgtccccggttccgagcagcctgaccgtgctggcagcttagaattgcggggcttcaagaacaaactgtatgtagccgtggtgggcgacaaagtgcaactgtataagaacctggaggagtaccaccttggaattggaataacttttatcgacatgtccgtgggtaacgtcaaagaagtggacaggagaagcttcgacctgacaaccccttatcggatatttagcttcagcgccgatagtgaactggaaaaggaacaatggttagaggccatgcagggagccatagctgaagcattgtcaacatctgaggtcgctgagcgtatatgggcggcagcaccaaataggttctgtgccgattgcggggcccctcagcctgactgggccagcattaacctctgcgtagtaatatgcaaaagatgtgccggagagcacagaggactgggtgctggcgtttccaaggtgcgtagtctgaaaatggataggaaagtgtggaccgagacactcatagaacttttcctgcagttgggcaatggggccggaaaccggttttgggcagccaacgtccctccttcagaggccctgcagccttcctccagcccaagcacacgccgctgccatctcgaggctaagtatagagagggtaaataccgacgctaccacccactgttcggtaatcaggaggagctcgataaagcgctttgcgctgctgtgaccaccaccgacctggcagaaactcaggcactcctcggatgtggagccggcattaactgcttctccggggatcccgaagcccctactcccctggccctggctgaacaagccggccagactcttcaaatggagttcctcaggaacaaccgaaccactgaagtccctaggcttgattccatgaaaccattggagaagcattacagcgtggtgttaccaaccgtgagccattctggatttctgtacaaaacagccagcgccggaaaactcctgcaagacagaagggcacgggaggaattcagccggcggtggtgcgtgctgggagatggtgtgctgagttacttcgagaatgaacgcgccgtaacacccaatggtgagattagggcaagcgaaatcgtgtgtctcgccgtaccaccacctgacacccacgggttcgagcatacgttcgaagtttacactgaaggggaacgcctgtatctctgggctggcgagtgcggcgcaggtagctag

SEQ ID NO: 179385 - DNA, 4320 bp, synthetic construct
  misc_feature 1..4320: note = Description of Artificial Sequence: Synthetic coding sequence
  source 1..4320: mol_type = other DNA
atggccgaggccggcgacgccgccctgagcgtggccgagtggctgcgagcccttcacctagaacagtacaccggattgtttgagcagcacggactggtctgggccactgagtgccaaggtctgagcgacacacgcctgatggatatgggaatgctcctcccagggcatagaagacgtatcttggcgggactgctgagggcccacacctctcccgccccagcccccaggcctacccccaggcccgttcctatgaagcgacatatttttcggtcccctcctgtgcctgcgaccccccccgagccattgcccactaccactgaggacgagggcttgcccgccgctcctcccattccaccaaggagaagttgtctgccgcccacctgctttaccacaccgtctaccgccgctcccgaccctgtgctgccccccctaccagccaagaggcatctcgccgagctgtcagtcccacctgtgccacctaggactggtcccccccggctgctggtttccctgcccaccaaagaagaggagagcctgctccccagcttgtcttccccacctcagcctcagtcagaggagccactgagcactttgccacagggcccaccacagccccccagccctcccccctgcccacccgaaataccacctaaacccgtgcggctatttcccgagtttgacgatagtgactacgatgaagtgcccgaagaggggccaggggcgccggcccgggtaatgaccaagaaggaagagccgcctccctcccgtgtccctcgggctgtgcgggtggcatctctgttatccgagggggaggaactgagtggcgatgatcagggagatgaggaggaggacgaccatgcgtacgaaggagttcctaatggcggatggcacacaagctctctttcgttgtctttgccatccacgatagccgcccctcaccctatggatggtccacctgggggctcaacacccgtcacgccagtaattaaagcggggtggttagacaaaaacccccctcaggggtcttatatttatcagaaacggtgggttcgattagatactgatcacttgcgttatttcgactcaaacaaggatgcgtattcaaagcgattcatttcagtcgcctgcataagccacgtggctgcaatcggggaccagaaattcgaagtaatcaccaataaccgaactttcgcctttagggctgaatcggacgtggaacgtaaagaatggatgcaagccctgcaacaggctatggccgagcagcgagctcgggctaggctcagctccgcttatctgctcggagtccccgggagtgaacagccagacagagccggcagtctggagctgcggggtttcaaaaacaagctttacgtggcagtggtaggggacaaagtgcagctgtataagaacctcgaggagtaccatctgggcataggcattacctttattgacatgtctgtgggtaatgtcaaagaagttgaccggcgcagtttcgacttaaccaccccatacaggatattttccttctcagccgacagcgagctggaaaaagagcagtggctcgaggctatgcaaggcgcaatcgctgaagccttgagcacaagcgaagtcgctgaaagaatatgggctgcagctcctaataggttctgcgccgattgtggtgctcctcagccggattgggcgagtattaatctttgtgtagtgatttgcaagcgctgtgcaggtgaacatcggggactgggagcgggagtgtcaaaagtccgaagcctgaagatggatagaaaggtgtggacagagacacttatcgaattatttctgcagctcggaaatggagccggtaatcgcttctgggctgccaacgtaccaccctcggaagccctgcagccgtcaagcagtccctctaccagacgctgccacttggaagccaagtatagagaagggaaatacagacgctaccaccccttattcgggaatcaggaggagctcgataaggccctgtgcgccgcagtcaccactacagatttggccgaaacccaggcactactcggttgcggagccggtatcaactgtttctccggggaccctgaggcacccactccactagccctggcagagcaggccggacaaacactgcagatggagtttctgagaaacaatcgcactaccgaggtccccagactggactccatgaagcctttggagaaacattactcagtcgtgttgcctaccgtgtcacactctggtttcctctacaaaactgcctcagccgggaagctgcttcaggaccgccgcgcaagggaggaattcagccgtcgctggtgcgtgctgggcgacggtgtgcttagttattttgaaaatgagcgtgcggtaactcccaatggtgagatccgggcatcagaaattgtatgtcttgccgtccctccccctgacacacacggattcgagcacacgttcgaggtctatactgagggggagcgattgtacctgtttggcctggagagcgcagaacaggcccatgaatgggttaaatgcatagccaaggctttcgtgcctccccttgctgaggacctcttagcgcgagacttcgaaaggctggggaggctcccatacaaggcgggtctctctctgcagcgggctcaggaaggatggttctccctttctggaagtgaactcagggccgtcttccccgagggcccatgtgaggagccattgcagctcagaaagctgcaagagctgtccatacagggtgactcagaaaaccaggtgttggtgctcgtggagcggaggaggactctgtacatacagggggagagaaggctggattttatggggtggctaggcgcgatacaaaaagcggcagcctctatgggagacacacttagtgaacaacagctcggagatagcgacatacctgtcattgtgtaccggtgcgtcgactacatcacccagtgcggtcttacttcggaggggatctataggaagtgcggacagaccagtaagacacagagactcctcgagagtctccgacaggacgcacgcagcgtgcatctcaaggaaggcgaacaacacgtagacgacgtttcctccgccctgaagagattccttcgcgatctacccgacggtctgtttactagagcgcaacggttgacctggctagaggcctcagagatagaagatgaagaggagaaagtcagcaggtacagagaactgctggtacgcttgccccccgtgaatagggccacagtaaaggccttaataagccatctgtattgcgtgcagtgtttttcagacactaaccagatgaatgtgcacaacctagccatcgtcttcgggccaacccttttccagacagacggccaggactataaggctggccgtgtcgtggaggaccttatcaaccactatgtggtggtgtttagtgtggatgaagaggagttgcgaaaacagagagaagagatcaccgccattgtaaagatgagggtcgccggcacagccagtgggacccaacatgccggcgattttatttgcacagtttatcttgaggagaaaaaggcagagacagaacagcatatcaaagtcccggctagcatgacagcagaggagttgactctggagatactggatcgccggaacgtgggcattagagagaaagactactggacttgcttcgaggtcaatgagcgggaggaggctgagcgcccactgcatttcgctgagaaggtgcttcccatcctgcatgggctagggaccgactcccacctggttgtgaagaaacaccaggctatggaggcaatgcttctgtacttagcctcaagagtcggggacaccaagcacggtatgatgaaattccgtgaagatcggtctctgcttggccttggactcccctccgggggcttccacgatcggtatttcatcttaaacagctcatgtctcaggttgtataaggaggttaggtcccatcgcccagaaaaggaatggcccatcaagtctcttaaggtctacctcggagtgaagaaaaaactgcgcccccctacatgctggggatttaccgtggttcacgagaccgaaaagcacgaaaagcagcagtggtatctctgttgtgacactcagatggagctgcgggaatggttcgccacctttttgttcgttcagcatgatggactcgtttggccctctgagccctccagagtgagccgcgcagtgccagaagtccggttgggatcagtgagcctgatcccacttcgcggcagcgagaacgagatgcgacgaagcgtagctgccttcaccgccgatcccttaagtttactgcgcaatgtgtag

SEQ ID NO: 179386 - DNA, 3633 bp, synthetic construct
  misc_feature 1..3633: note = Description of Artificial Sequence: Synthetic coding sequence
  source 1..3633: mol_type = other DNA
atgaccctgagcggcagccggggccaggaggagcccccccccagccgagttccccgtgcggtccgcgtggcctctctgttgtcagagggtgaggagctctcaggtgacgaccagggggacgaagaggaagacgaccacgcctatgagggcgtgcctaatggaggctggcatacttcaagtctgagcctcagtctcccttctacaatagctgcaccacatcctatggatggccctcctggggggtctacaccagtgacacctgtgataaaggccggctggttagataagaacccaccacagggttcatatatatatcaaaaacggtgggtgaggctcgatacagatcatctccgctactttgacagtaacaaagacgcatattcaaagcgctttatcagtgtggcctgtatatcccatgttgcagccatcggcgatcagaaatttgaagtgataacaaataaccggacctttgctttccgagctgagtccgatgtggagaggaaagaatggatgcaggcactacagcaagctatggctgagcaaagagcccgcgcccgcctgtccagcgcatacctcctgggagtgcctggcagtgagcagcccgacagggccggctctctggagctcagaggctttaaaaacaaattgtatgtggctgtggtcggcgataaggtgcagctctacaaaaatctcgaggagtaccatctcgggattgggattacattcatcgatatgtctgtgggaaatgttaaggaagtagatcgccggagttttgacctcaccacaccctatagaatattttccttcagcgctgatagcgaactggagaaagagcagtggctcgaagctatgcagggcgcaatcgcagaggcactgtcaacatcagaagtcgccgagcgcatttgggcagctgcccctaacagattttgcgcagactgcggtgccccccagcctgactgggccagcattaacctttgcgtggtgatttgcaagcggtgtgcaggggagcatcggggacttggcgccggtgtatccaaggtgcgaagcctgaaaatggacagaaaggtctggaccgaaactctcatcgaactctttctgcagctgggaaacggagctggcaacagattctgggccgccaatgtcccgccatctgaggccctgcagccatcttcctctccatcgacccgtcgttgccacctcgaggcgaagtaccgcgaaggcaagtacaggagatatcatcccctgtttgggaatcaggaggaacttgataaggcactatgtgccgctgtgactactaccgatctggctgaaacccaggccctcttaggctgcggcgctggcataaattgctttagcggcgaccccgaagctcccaccccactcgcgctggctgagcaggcaggacagaccctgcagatggaatttctcagaaacaatcgcactaccgaggtgccgcggctagatagcatgaagcccctggaaaaacactattccgtggtccttcctaccgtgagtcacagcggttttttgtataagaccgcatcagccggaaaattgctgcaggaccgaagagcacgtgaagaattctcaaggcgctggtgtgtgctcggtgacggggtgttaagttatttcgagaacgagcgagctgttaccccaaatggtgagatcagagcatcggagatcgtttgcttggccgttccccctcccgacacacatggtttcgaacacactttcgaagtttacaccgaaggcgagcggctctatctgttcggtcttgagagtgcggaacaggcgcacgagtgggtcaagtgcatcgcaaaagcattcgtgccgcccctggcagaggatctcttggcgagagattttgagagattgggtcgtttgccctataaggccggactgtccctccagagggcgcaggaaggttggtttagtctgagcggctccgagctccgcgcagttttccctgaagggccttgtgaggagcctcttcaattgcgaaaactgcaggagctgagcatccagggagactccgagaaccaggtgcttgtactggttgaacggcgcagaaccctctatattcaaggcgaacgcaggcttgacttcatggggtggttgggggcgatacagaaggccgccgccagtatgggcgatactctatcggagcaacagcttggtgacagcgatatcccggtcatcgtgtataggtgcgtggattatatcactcagtgcgggctcacatccgaagggatctaccggaagtgtgggcagacttccaagactcagaggctgctggaatctctccgccaggatgctcgtagcgtgcacctgaaggagggcgagcagcacgttgacgatgtttcttctgcgttgaagagattcctgagggacctcccggacggtttgttcacccgagcgcagcggctgacatggttagaagcttcagagatcgaggacgaagaagagaaagtctctcggtacagggagttattggtccgattaccgcccgttaatagagctactgtgaaggcgctgatctcccacttgtattgcgttcaatgcttcagtgatacaaaccagatgaacgtgcacaatctggccattgtattcgggcctaccctcttccagacagatggccaggactataaagctggtcgggttgtggaggatctgatcaatcactacgtcgtggtgttcagcgtggatgaagaggagctgcgtaagcagcgagaggaaattaccgcaatcgtgaaaatgcgagtggcagggacagcctctgggacacagcacgctggggattttatctgcaccgtgtatctggaggaaaagaaggcagagacagaacagcacatcaaggtacccgctagcatgaccgctgaggagcttacattggagatcctcgaccgcaggaatgtgggcatacgggagaaggattactggacctgtttcgaggtcaatgaacgggaagaggcggagcggcctctgcactttgcagagaaggtcctgcccatactccacgggctgggcaccgattcccatctggtggtcaaaaaacaccaggccatggaagccatgctattgtatctcgcatcaagagtcggggataccaaacatggcatgatgaaattccgggaggacagaagcttgctcggcttgggactcccatccgggggatttcatgacaggtacttcattctgaattcatcttgcctcaggctctacaaggaggtaaggagccagagaccctggtccggcgcccccgaaactagccaccggccagagaaggagtggcccatcaaatccctgaaagtatacctgggagtgaagaagaagttaaggcccccaacatgctggggattcactgtggtccatgagaccgagaagcatgaaaagcagcaatggtacttatgctgtgacacacagatggaactgagagagtggtttgctacctttctgttcgtgcagcacgatgggctggtgtggccctcggagccgagcagagtctctcgggcagtgcccgaggtgcgcctggggtcagtgagcctaataccactccgggggtccgagaacgaaatgcgtcggagcgtcgctgcttttaccgccgacccgctgtctttactgcggaatgtatag

SEQ ID NO: 179387 - DNA, 4353 bp, synthetic construct
  misc_feature 1..4353: note = Description of Artificial Sequence: Synthetic coding sequence
  source 1..4353: mol_type = other DNA
atggccgaggccggcgacgccgccctgagcgtggccgagtggctgcgagcactacatctggagcagtatacagggctgtttgagcaacatggtctagtgtgggccacagaatgccaggggttaagtgatactcgtttgatggacatggggatgctgttgccagggcacaggaggagaattctggcaggactcctccgagctcatacaagtcccgcccctgcccccaggcctacgccccggcctgttcccatgaagcggcatatctttaggtcgcctcctgtacccgcaaccccccctgagccactgcccaccactacggaggacgagggtctgccagcggctcctcccattccaccaagacgttcttgtctcccccccacatgtttcacaactcctagcacagccgccccagatcctgtgttacccccgctgccggctaagcggcacctcgcagaactgtcagtccctccggtgcctcctcgaacaggtccaccccgcctgttggtgtcccttccaactaaggaggaggaatctcttctgccaagcctttctagcccgccccagcctcagtctgaagaaccactaagcaccctgccccagggccccccacagccgccttccccacccccttgccctcctgagatccctcccaaaccagtcaggctttttcctgagtttgatgatagtgactacgacgaagtcccagaagaaggccccggcgcgcccgcacgcgttatgaccaaaaaggaggagcctccccctagccgggtgcccagagctgtccgggtggccagtttgctgagcgagggagaagagctgtccggagacgatcagggcgacgaagaggaggatgaccacgcctatgagggggtccctaatggagggtggcacacctcgtcactcagcctatcattaccatccaccatcgccgccccccaccctatggacggcccgcctggaggctccaccccggttactcctgttattaaggcgggctggcttgataaaaatcctccccaggggtcatacatttaccagaagaggtgggtccggctggataccgatcaccttaggtattttgacagtaacaaggacgcttatagcaaacgctttattagtgtggcgtgcatcagtcacgtggctgctatcggagaccagaaattcgaagttataaccaacaatcggaccttcgcttttagggcggagagcgacgttgagcgaaaagagtggatgcaggccttgcagcaagctatggcagaacaacgagcccgtgcccgccttagcagcgcctatttgctgggggtgccgggctccgaacaaccggatcgggccgggtccctcgagctgagaggttttaagaacaagctgtacgtggcagtcgtcggagacaaggtgcagttgtacaagaatcttgaggagtaccacctgggcatagggatcacattcatagacatgtctgtcggcaacgtcaaggaggttgatcggagatcatttgacctgaccacaccatataggatattctcattcagcgccgactctgaattagaaaaggagcagtggctggaagcaatgcaaggcgctatcgctgaggccctgtctacctcagaggtggcagagaggatatgggccgcagcccctaacaggttttgcgccgattgcggcgccccgcagccggactgggccagtataaatctttgcgtcgtgatctgcaaacgctgtgccggcgagcaccggggccttggggctggagtgagtaaagttcggtctctaaagatggaccggaaagtgtggacagaaacccttatcgaactatttcttcagcttggcaatggggccgggaataggttttgggccgccaacgtgcctcctagcgaggccttgcagcctagtagcagtccatcaaccagacgatgtcatctggaggctaagtacagagaagggaagtacagaaggtatcatccacttttcggaaatcaagaggaacttgacaaggcgctttgtgctgccgtgactaccacagacctcgctgagacgcaggccctgcttggctgcggagccggaattaactgttttagcggtgaccctgaggccccaacaccactagctctcgccgagcaggctgggcaaacccttcagatggaattcctgaggaataatcgtaccacagaagtgccgcggctcgattcaatgaaaccacttgaaaagcactacagcgtggtactgccaaccgtatcccatagcggattcttgtacaagactgcttcagcggggaaactgcttcaggaccgacgggcccgcgaagaattttcaaggcgttggtgcgtgctcggcgatggcgtgttatcttactttgagaatgaacgtgcggtgacacctaacggcgagatcagagcttccgagatagtgtgccttgccgtcccccctccagatactcatggatttgaacatacgtttgaggtctacaccgaaggcgaacggctctacctgtttggacttgagagcgctgagcaggcccacgagtgggtaaagtgtatagctaaagcgtttgtgcccccactggctgaagatttgcttgcgcgggatttcgaacgcctggggcgcctcccttataaggccgggctgagcctccagcgggctcaggaaggatggttctctttgagtggaagtgagctgagggcggtcttcccagagggcccgtgcgaagagcctctccagttacgtaagctccaggaactgtccattcagggagacagtgagaaccaggtgcttgtccttgttgagcgccgacggacattatacatacaaggcgaacggagactggatttcatgggttggctcggcgctatacagaaggcagcggcctccatgggagatacactgtcggaacaacagctgggggatagcgacattcccgtgatagtctacagatgtgtagactacattacacagtgcggcctgaccagtgaagggatatatcggaagtgcggacagacttccaaaactcagcgcttgctggaatctctgcggcaggatgccagatctgtgcacctgaaagagggcgaacaacacgtggatgatgtgagctctgccctaaagagatttttaagggacctgccagatggcctgttcaccagagcccagcgcctgacctggctggaggccagtgaaatcgaagatgaggaagaaaaggtgtccagatatagggagttactcgttaggttaccacctgtgaaccgagccactgttaaagccctcatcagccacctgtactgcgtccaatgctttagtgacacaaaccagatgaatgttcacaacttggccatagtgttcggccccactctcttccaaaccgatggccaagattataaggctggacgagtggtggaagacctgatcaaccactatgtagtcgtgttctcagtggacgaagaggagctccgcaagcaacgagaggaaattacagcgatcgtgaagatgagggttgccgggacagcctccggaacccagcatgcaggagacttcatttgtaccgtgtacctggaggagaagaaagctgaaacggaacagcacatcaaggtgcctgccagcatgacggctgaagaactgacacttgaaatcctggatcggcggaatgtcggtattagggaaaaggattactggacctgttttgaggtgaacgaaagagaggaggctgagaggccacttcattttgccgagaaagtgctgcccatcctccacggcttgggcactgactctcaccttgtcgtgaaaaagcatcaagctatggaagccatgctgctctacctagcatcaagagtgggagacactaaacacggaatgatgaaattccgcgaggaccgctctctgctaggcctgggactaccgtctgggggatttcatgataggtactttatacttaacagctcctgcctgagactctataaggaggtgcgcagtcaacggccctggagcggcgctccagagaccagtcacagaccagaaaaagagtggccaataaaatcgctgaaggtatacttgggcgtgaaaaaaaaattgcggccccccacctgttggggattcactgtggtgcatgagactgaaaagcacgaaaagcagcaatggtacctgtgctgcgatacgcaaatggagctgagagagtggtttgccaccttcctcttcgtgcagcacgacgggctagtgtggcccagcgaaccctcccgtgtcagcagggccgtgcccgaggtacgattagggtctgttagtttaatcccccttagaggaagtgagaatgagatgagacggagcgtcgccgcctttacggctgacccactctccctgttgagaaacgtgtag

SEQ ID NO: 179388 - DNA, 3402 bp, synthetic construct
  misc_feature 1..3402: note = Description of Artificial Sequence: Synthetic coding sequence
  source 1..3402: mol_type = other DNA
atgaccaagaaggaggagcccccccccagccgggtgccccgggccgtccgtgtcgcttctttgctctccgagggggaagaactgtcaggggacgaccagggggacgaggaggaggatgatcatgcctatgaaggggttccaaacggaggttggcatacttcctccctgagcctgagtctgccatccaccattgctgcacctcatcctatggacggaccgcccggcggttcgactccagtcacaccggtgataaaggccgggtggctcgacaaaaatcctcctcaggggtcttacatttatcaaaagcggtgggtcaggttagatactgaccatctgaggtacttcgactccaacaaggatgcttatagtaaaagattcatctcagtagcttgcatttcacacgtcgccgcgataggggatcagaaatttgaggttataactaataatcggaccttcgccttccgtgccgaaagcgacgtagaacgaaaggaatggatgcaggccctccagcaggccatggccgagcagcgggctagagctcgtctgagtagcgcatatctgctgggcgtccccggatctgagcagccagacagggctggatccctagaactgagagggttcaagaacaagctctatgtcgcagtcgtgggcgataaggtgcaactttacaaaaatttggaagaataccacttggggatcgggataacgttcatcgacatgtctgtgggcaacgtaaaggaggtagatagacgctcctttgaccttactaccccttacagaatttttagctttagcgctgattccgagctggagaaggaacagtggctcgaggcgatgcagggtgcaatcgccgaagccctatcaacttccgaagtggccgaaaggatatgggccgccgcccctaatcgcttctgtgcggattgcggagctccgcagcccgactgggcgagcattaacctttgtgtggtgatttgcaaacgttgcgcgggagagcacagaggtctcggggccggcgtcagcaaggtgcgatcactcaaaatggatagaaaggtgtggactgagaccttgatagaagctctctgcgctgctgtcacaacaaccgacctggctgagacacaagcattgttaggctgtggcgccggcattaactgtttttctggagatccagaagcacctacaccgctcgccctcgccgagcaggccggccagactcttcaaatggagttcctgcggaataacagaactacagaggtcccacggctggacagcatgaaaccattggagaaacactactctgtggtgctgcccactgtgagccatagcggcttcctttataagactgccagtgcaggcaaactcctccaagaccggcgggcgcgcgaagagttctctaggagatggtgtgtgctcggagacggagtgctgtcctactttgagaatgagagagccgtgactcctaacggcgagatccgggcctctgagatagtctgcctggccgtcccgccaccagacacccatggttttgagcatacctttgaggtgtatacagaaggagaacggctgtacctgttcggcctggagtccgccgaacaggcccacgagtgggtcaaatgtatagcaaaggctttcgtcccaccactggccgaagatctgttggcccgcgattttgagcggttaggccggttgccatataaggccgggctgtcactgcagagggctcaggagggatggttctccctgtcggggtcggaacttcgagcggtttttcccgaggggccctgtgaagaacctctgcaacttaggaaactgcaagagctctccattcagggcgacagcgagaatcaggtgctggttcttgtggagagaaggcggacactctacatacaaggcgagcggaggctcgactttatggggtggttgggcgcgatccagaaagccgcagccagcatgggcgacaccctttctgaacagcagctaggcgatagtgacatccccgtgatcgtctaccgctgcgttgattatatcacacagtgcggcctgacttccgagggcatctataggaagtgtggccagacatctaagacacagaggctgctggaatccctaagacaggatgctagatctgtgcacctgaaggagggagaacagcatgtcgatgatgtcagtagcgccctcaagagattccttcgcgaccttccagatggtttatttactcgcgcacagcgactaacctggctcgaagcctctgagattgaagacgaggaggagaaggtttcaaggtaccgtgagctgctggtacggctacctcctgtgaaccgcgcgactgttaaggccttaattagccatctctattgtgttcaatgtttttctgatactaatcagatgaacgtgcataatcttgccatcgtattcggccctactctattccagactgacggccaggattataaagccggaagagtcgtggaggacctcataaaccactacgtggtcgtgttttcagttgatgaagaggagctgaggaagcagcgggaggaaatcaccgcgattgtgaagatgcgagttgcagggactgcctccggcacccagcacgccggagactttatatgcaccgtgtacttggaagagaaaaaggcggagaccgagcaacatatcaaagtaccagcctctatgactgctgaggaactgaccctggaaattttagataggagaaacgtcgggatccgcgagaaagactattggacatgtttcgaagttaacgagcgtgaagaggccgaaagacctttacattttgccgaaaaggtgctgccaattttgcacgggctcggcaccgactctcacttggtggtcaagaaacatcaggcaatggaagccatgctgctctatcttgctagtcgggttggcgacacaaagcacggcatgatgaagtttcgggaagaccgttcgttgctgggtctgggactccccagtggaggattccacgatcgatatttcatcctgaactccagctgtcttaggctttacaaggaggtcaggtctcacagacctgaaaaggaatggccaatcaaatctctcaaagtctacctgggtgtgaagaagaagctgaggccccccacctgttggggatttacagtcgtacacgagaccgaaaagcacgagaaacaacagtggtacctgtgctgcgatactcagatggaactaagggaatggtttgccacttttctgtttgtgcagcatgacgggctagtgtggccatcagaaccttcacgggtgagcagagcagtacctgaggtgaggctgggcagtgtgagcctcatccccctgagaggaagcgaaaacgagatgaggaggagtgttgccgccttcaccgctgaccctctaagtctgcttaggaacgtctag

SEQ ID NO: 179389 - DNA, 4320 bp, synthetic construct
  misc_feature 1..4320: note = Description of Artificial Sequence: Synthetic coding sequence
  source 1..4320: mol_type = other DNA
atggccgaggccggcgacgccgccctgagcgtggccgagtggctgcgggccctgcacctagaacagtacacaggactgtttgaacaacacggtctggtctgggctaccgagtgccagggactgagcgatacacgcctgatggacatgggtatgctgttacccggccacaggagacgcatactggctggcctcctccgagcccatacctccccagctcctgctccacggccgactcctaggcctgtgcctatgaagcgacacatattccgctctccccctgtcccagccacaccgccggagcccctgccaactactacagaagatgaggggctccctgctgcccctccaatcccaccccgtcgttcctgtctaccacccacgtgcttcaccaccccaagcacagcggccccagatccggtgttacccccactgcctgctaagcgccatctggccgagctatctgtgccaccggttcctccacgtactggcccacctcgcctcctggtctccttacccactaaagaggaagaatctctcttaccatctctgagctcacctccccagcctcaatctgaagaaccactgtctactctgccccaggggcctccccaacctccaagtccccccccatgccctccggagatacccccaaagcccgtcaggcttttcccagagtttgatgattctgactatgacgaagtccctgaggagggccctggcgcacctgcgcgcgtgatgactaagaaggaggagcctccaccgagtagggtaccccgcgccgtgcgggtggcctctctcctcagcgagggagaggaacttagcggggacgatcagggagacgaagaggaggatgaccacgcttatgagggagttccgaacgggggatggcataccagttcccttagcttatcactgcctagcacaatcgccgccccacaccctatggatggaccacccggcgggtctacacctgtgacccctgtgattaaggcaggatggctggataagaaccccccacagggtagctatatctatcagaaacgttgggtcagactcgacactgaccatctgcgctatttcgactccaacaaagacgcatactccaagcgatttattagcgtcgcctgtatttcgcacgttgccgcaattggcgaccaaaaatttgaagttataaccaataaccgcacatttgcattcagagcagaatcagacgttgaacgaaaagagtggatgcaagccctccaacaggcaatggccgagcagcgtgccagggccagactctctagcgcttatctcctcggggtcccagggtccgaacaaccagaccgtgcgggatcactggagctgcgaggcttcaaaaataaactctacgtcgccgtcgtcggtgataaagtacaactctataaaaacctggaggaatatcacctgggaattggtatcaccttcatcgacatgtccgtggggaatgtgaaggaagtcgatcggcggtcttttgatctgacaaccccttacagaatctttagcttctcagccgattctgaattagagaaggaacagtggcttgaggcaatgcaaggtgccatcgctgaggccctcagcacctcggaggtggccgagcggatctgggccgctgcaccgaacaggttctgtgctgattgcggggccccacaacccgattgggcatctattaacctgtgtgtagttatctgtaagaggtgcgctggcgagcatagagggttgggagccggggtcagcaaagtccggtcactcaaaatggaccgaaaggtgtggactgaaaccctcatcgagctgtttctacaactcggcaacggagcaggcaatagattttgggctgcgaacgtgcccccgtccgaggcgctgcagccttcctcatctccaagtactcgccgatgtcatttagaagcaaaataccgggagggtaagtatagaagataccacccactatttggaaatcaagaggaactcgataaagccctttgtgccgccgtcacgaccactgaccttgctgaaacacaagctttgttgggttgtggagccgggatcaactgcttctccggcgacccagaggcccccacgcccctcgcgctggccgagcaagccgggcaaaccttgcaaatggagtttctaaggaataaccggacaaccgaggtacctagactggacagcatgaaacctttagagaagcattattcagtggtcctacccaccgtctcacatagcggatttctttataagacagctagcgcaggtaagctcctgcaagataggcgcgctagagaagaatttagtcgaagatggtgcgtgttaggggatggcgttctatcctacttcgaaaacgaaagggcagtgacgcctaacggcgagatcagagcctcagaaatcgtgtgcctggccgtgccacctccggatacgcacggatttgagcatacctttgaggtgtatactgaaggcgaacgactatacttattcggtctggaatccgccgagcaggcccatgagtgggttaagtgcattgcaaaagcgttcgtcccaccccttgctgaggatctcctggcacgcgattttgaacgactgggccgtttgccttataaggcaggcctgtcactccagcgcgcacaggaaggatggttttctctctctgggtccgagctccgtgcagtgtttccggaggggccttgcgaggaaccactgcagctgcgcaaactccaggagctgtcaattcaaggcgacagtgaaaaccaagttttggttctggtggaaaggcgccgcacactttacatccagggagagcgccgccttgactttatgggatggctgggagctatacagaaggcagcagcttcgatgggggacaccctttccgagcagcagttaggcgactccgatatcccggtaatcgtgtacagatgtgtggactacattacccagtgcggcctcactagcgaagggatctatcgtaagtgcggtcaaacatcaaagactcagaggctgctcgaatccctgaggcaggacgcacggtctgtgcacctcaaagagggtgaacaacacgtcgatgacgttagctccgcactcaaacgattcctccgggacttgcctgacggtctttttacgcgtgcccagagactgacttggctggaggcctcagaaattgaggacgaagaggaaaaggtgagtcgttacagagagctgctcgtgcgcctgcctccggtaaatagagccaccgttaaagcccttatttcacatttgtactgtgtgcaatgtttctccgataccaatcagatgaacgttcacaatctagctatcgttttcggacctacactctttcaaaccgacgggcaggattacaaggcaggacgtgtggtcgaggacctcatcaaccactatgtggtcgtgttctccgtggacgaagaggagttaagaaagcaaagagaagagatcaccgcgatagttaagatgagggtcgctgggacggctagcgggacccagcacgccggcgatttcatttgcactgtctatctcgaagaaaagaaagctgagacggagcaacacattaaggtgcccgcgtccatgacagcagaagagctgactctggagatcctcgaccgccgtaacgtgggcattcgggaaaaggattattggacctgctttgaggtgaatgagcgggaggaggccgagcggcccctgcactttgcagagaaggttctgcctatcctccacggacttgggactgactcacacctggtcgtcaaaaaacatcaggccatggaggctatgcttctctatttggcatcacgtgtaggcgacactaagcatggaatgatgaagttcagggaggatagatccttactcgggctcggcctgccaagcggtggcttccacgacaggtactttatccttaactcctcatgcctcaggttatataaggaagtaaggagtcatcggccggagaaagaatggccgatcaaatcactgaaagtttatcttggcgtcaagaaaaagctgagacctcctacatgttggggattcaccgtggtgcatgaaacggagaagcacgagaaacagcagtggtacctgtgttgtgacacacaaatggagcttcgggaatggtttgcaaccttcctgtttgtccaacacgatggccttgtctggccctccgagccgtccagagtgtcgcgggccgtgcctgaggtgcgcctaggttcggtgagcctgatcccactgcgtggaagtgaaaatgagatgcgaaggtcagtcgctgcttttaccgccgatcctctcagcttgcttagaaacgtgtag

SEQ ID NO: 179390 - DNA, 5115 bp, synthetic construct
  misc_feature 1..5115: note = Description of Artificial Sequence: Synthetic coding sequence
  source 1..5115: mol_type = other DNA
atgagcagcgtgagcgaggtgaacgtggacatcaaggacttcctgatgtccatcaatctcgagcaatacctgctgcactttcacgagagcggattcacaaccgtgaaggactgcgccgccattaacgatagtctgctgcagaaaatcgggatctctcctaccggccaccgccgaagaatcctgaagcagctgcagataattctaagtaagatgcaagacatcccaatctatgctaatgtgcacaagactaaaaagaatgacgacccctcgaaagattaccacgtgcctagcagtgaccagaatatttgcattgagctctccaactcaggatccgtgcaaaccagcagtcctcctcagttagagacagtccgaaaaaacctggaggactccgatgcaagtgtcgagcgtagccagtatcctcagagtgatgataagctgtcaccccctaagcgggatttcccaacagctgaagagcctcacttaaatcttggctccctgaacgactctctcttcggcagcgacaacatcaagattgaatcactgatcacaaagaaaaccgtggatcacaccgtagaagagcaacagaccgagaaggtaaagctaatcaccgagaatttgtccaaactcccaaatgccgattccgagtgcctgtccttcgtgggatgcagcacaagcggcacgaattcagggaacggtacaaacggattactggagggtagcccaccctccccattcttcaagttccaaggggagatgattgtgaacgacttatacgtgccgtcctctcccatcctggcgcccgttcggtcccgaagtaaactcgttagcaggcctagccggtcatttctgctccggcataggccggtacctgagatccctgggagtacaaaaggcgtcagtggatcctactttagggagcgacggaacgtggccacgagcactgaaaagtctgttgcttggcagaatagcaatgaggaaaactcctctagcatttttccctacggagaaacgtttctcttccagcgtctagaaaactccaagaagcgtagcattaagaatgagttcctgacacagggagaggcactgaagggtgaagcggcaaccgcaacaaatagcttcattattaaatcaagcatctacgataataggaaggagaaaatcagtgaggataaagtggaagatatctggatcccacgagaggacaaaaataacttccttatcgatacagcttctgaatccgagtatagcaccgttgaggaatgttttcagagcctgaggagaaagaactccaaggccagcaaaagtcggacacagaaggctcttatcctcgatagcgtaaatcggcatagttaccctctcagttcaacatccgggaacgctgactcttctgccgtgtcttcccaagcaatttcaccctatgcatgtttctatggcgcatctgccaagaaagtgaagtctggatggcttgataaactctcaccccagggaaaaaggatgtttcagaagcgatgggttaagttcgacggactcagtatctcttattataacaacgaaaaagaaatgtacagcaaggggatcatccctctgagcgcaatcagcaccgtgcgagtgcagggagataacaagttcgaagtagttaccacacagcgtacgtttgtgttcagagtcgagaaggaggaggagcgaaacgactggatttcaattctgctgaacgctctaaagagccagtcattaaccagtcagtctcaggccgtggttacccccgaaaaatgtggctacctcgagttgagaggttataaggccaaaattttcactgtcttatccggtaactctgtgtggctatgcaaaaatgaacaggatttcaaatccggcctgggaattactatcattcccatgaatgttgccaatgtgaaacaagtcgaccgaacagtcaagcagtcctttgaaataataacgccctacaggtctttctcttttaccgctgagaccgaaaaggagaaacaagactggatagaagcagtgcagcagagcatcgcagagacacttagtgattatgaagtggccgaaaaaatatggtttaacgagagcaacaggagttgcgcggactgtaaggcccctgatccagattgggcaagcatcaatctctgcgttgtgatctgcaagaagtgtgccggacaacaccgcagcctaggtcccaaggactccaaggtccgctctcttaaaatggacgcatcaatctggagtaacgagctaatcgagctcttcatagtgatcggaaacaagcgggcgaatgacttctgggccggaaacctgcagaaggatgaagagctgcacatggacagcccggtggaaaagcggaagaactttattacccagaaatacaaagaggggaagttcagaaaaacccttctggcatccttaacgaaagaggagttgaacaaagccctttgcgccgccgtggttaaaccagacgtgcttgagacgatggccctgctgttctccggagcggacgtgatgtgtgcgaccggggatcccgtccacagcactccatacttgttagcaaaaaaggcaggccagtccttacaaatggagtttttatatcataacaagtttagtgacttccctcagcacgatatacatagcgaaggggtgctgtctcaagaatcctcccagtctacttttctctgtgacttcctgtaccaggccccaagtgctgcatcaaagctttcttcagagaagaagctgctggaggagacgaataagaaatggtgcgtactggaaggaggctttctgtcatattacgaaaacgataaatcaacaacaccaaatggaaccataaatatcaacgaagtgatctgtctcgctatacacaaagaggacttctacctgaacaccggtcccattttcatctttgagatctatctgccaagcgaacgggtatttctgtttggggcagaaactagccaggcacagagaaagtggacggaggcaatagccaagcacttcgtgcctctgtttgctgaaaacctcactgaagcagattacgatcttatcggtcaactcttttacaaggattgccatgcattggatcaatggcgaaagggatggtttgctatggacaaatcctcgctgcacttttgtcttcagatgcaagaagtgcagggcgacaggatgcatctgagacgtcttcaggaactgactatcagcacaatggtgcagaatggagagaaactggacgttctattactggtcgaaaaaggtcggaccctctacattcacggccatactaaactggacttcacagtatggcataccgctattgaaaaagctgccggaactgacggaaacgctctgcaggatcagcaattgtctaagaacgacgtaccaataatcgtcaattcctgtattgccttcgttacccagtacggcctcggctgtaaatatatatatcagaaaaacggagatccactgcatattagcgagctgctggagagttttaaaaaggacgcccggtcattcaagctccgagcaggaaagcaccagctggaagacgtgaccgctgtgctcaaatcattcttatctgacatagacgacgccttgctcacaaaagaactgtacccctattggatcagtgccctggacacgcaggacgacaaggagcgcattaagaagtatggggccttcatccgttcgcttccgggcgttaaccgtgcaacgcttgcagctattatcgaacatctgtatcgagtgcagaaatgttcagaaataaaccatatgaatgctcacaacctggcacttgtattctcttcttgtttatttcagactaaaggacagacatctgaagaggttaatgtgatagaagatctgattaacaattatgtagagatctttgaggtgaaagaagaccaggtgaaacaaatggatatagagaattctttcatcaccaaatggaaggatacacaggtgtcccaagcaggtgacctgttgattgaggtgtacgtggagcgcaaggagcccgactgctctatcattatccggatttcccccgtgatggaagcagaggagctgactaacgacattcttgctatcaaaaacataatcccaacaaaaggggacatctgggccacattcgaggttatcgagaatgaggaactcgagaggcccctgcactacaaagaaaacgtgcttgagcaagtgctgcgctggagtagcttagcggagccagggtctgcctatttggttgtgaagcgttttctgacggccgataccatcaagcattgctctgaccgctctacgctgggtagcattaaggagggcattttaaagatcaaagaagagccatccaaaatcctcagtggcaataaatttcaggacaggtacttcgttctgcgcgacggatttctgttcctgtataaggatgtaaagtcatctaagcacgataagatgttctccttgtctagtatgaaattctatcgcggagtgaagaaaaaaatgaaaccccctacaagttgggggctgaccgcctactccgaaaagcaccattggcacttgtgctgtgattccagccgtacacaaacagagtggatgacatctatattcattgcgcagcacgagtatgatatctggcctcccgcaggcaaggaacggaagcgctccatcaccaagaacccaaaaattgggggcctgcctttaattcctatccagcacgagggcaacgctactctcgctagaaaaaatatcgagtcagcccgcgccgaactggaacggctgaggctgagcgagaaatgcgacaaagaatctgtggacagttctctgaaagagagagcttcaatggtggcccattgccttgaacataaggatgacaagctgaggaatcgaccgcggaagcaccgctcattcaactgtctggaagacactgagcctgaagcacctctgggtcagccaaagggccacaagggtttgaaaaccctgcgtaagaccgaggacagaaactccaaagccacactggactcagaccataaactgccttcccgcgttattgaggagttgaatgtggtgctccaacggagcaggacactccccaaggagctgcaggatgaacagatcctcaagtag

SEQ ID NO: 179391 - DNA, 144 bp, synthetic construct
  misc_feature 1..144: note = Description of Artificial Sequence: Synthetic coding sequence
  source 1..144: mol_type = other DNA
atgagcagcgtgagcgaggtgaacgtggacatcaaggacttcctgatgagcatcaacctagagcagtacttactgcatttccatgaatcagggtttactacggtcaaggattgcgcggccatcaatgattctttattgcagtag

SEQ ID NO: 179392 - DNA, 3399 bp, synthetic construct
  misc_feature 1..3399: note = Description of Artificial Sequence: Synthetic coding sequence
  source 1..3399: mol_type = other DNA
atgcggagcagcgccagccggctgagcagcttcagcagccgggactccctgtggaatcgcatgccggaccaaatcagcgtaagtgaattcattgccgagaccactgaagactacaacagcccaacaacctcttccttcactacccgattgcataattgccgcaacacagtcactctactagaagaagcactggatcaggacagaacagcgctccagaaagttaagaagagtgtgaaagcaatttacaattcaggacaggaccacgttcagaatgaagagaactatgcacaggtgctcgataagtttggaagtaattttctgtctcgggacaaccccgacctaggaaccgccttcgtgaaattctctacactgacaaaagaattgtcgactctgctgaaaaacctgctccagggcctgtctcacaatgtgatcttcactctggattccctcttaaagggagatcttaagggggtaaagggcgacctcaaaaaacccttcgataaagcatggaaagactacgaaacaaagtttaccaagatcgaaaaagagaaaagggaacatgccaagcaacatgggatgatccggaccgagataactggggctgaaatagcggaagagatggagaaagaacgcagactgttccagctgcagatgtgcgaatacctgattaaggtgaacgagataaaaacaaagaaaggcgtagacctgctgcaaaacctcatcaagtattatcatgcccagtgcaacttctttcaggacgggttgaagacagctgataagctgaagcaatatatcgaaaaactggctgcagatctgtacaacatcaagcagacacaggatgaagagaaaaagcagctgaccgctctgcgtgacctcatcaagagttctctgcaactggatcagaaggaggcacggcaggatagtcaatcgcgccagggaggctacagcatgcaccagcttcaggggaacaaagagtacggaagtgaaaagaagggctacctcctcaaaaagtcggatggtatacgcaaggtgtggcagcggcgaaaatgttctgtgaagaacggaattcttactataagccacgcgaccagtaatagacagcctgcgaaactcaacctgttaacatgtcaggtgaagcccaacgccgaggataaaaagagtttcgacctcatctcccataatcgaacttaccactttcaggctgaggacgagcaggattatgttgcctggatttctgtccttactaactctaaggaagaagctctaaccatggcgttccgtggcgagcagagtgccggcgagaatagtcttgaggacctaacgaaggcaatcatcgaggatgttcagcgattgcccggcaatgacatttgctgtgactgcggaagttccgaacctacttggctctccaccaatctgggaattctgacatgcattgagtgttctggtattcaccgcgaaatgggggtgcacatcagccgtattcaaagtttggaacttgataaattaggaactagtgaacttctgcttgccaagaatgtaggaaacaactccttcaacgatattatggaagcaaatttgcctagccctagcccaaaacccacaccgagctcagacatgactgtgagaaaagagtatataaccgccaaatatgttgaccatagattttcccgcaagacttgctccacttccagtgcaaagttgaatgagctgctggaagcgatcaagtccagagatcttctggcgcttatccaggtctatgcggaaggggtcgaactcatggaaccactattggaacctggccaggaactgggcgaaaccgccctacacctcgcagtccgcaccgcagatcagacctccctccacttggtggactttcttgtgcaaaattgtggtaatttggacaagcagactgccctcgggaacaccgtgctgcactactgctctatgtattcaaagccagagtgtctgaagcttttgctgaggtcgaaacccacagttgacattgtgaaccaggccggcgagactgctctggatattgctaaaagattgaaggcgacccaatgcgaagacctgctgagccaggccaagtccggaaaatttaatccccacgttcacgtggaatatgagtggaatctcaggcaggaggagattgatgaatctgatgacgatctagatgataaaccatctcctattaaaaaagagcgcagcccccgtccgcagtccttttgccacagctccagtatctctccccaggacaagctcgcgctacccggcttcagtacccctcgagataagcagagactgagctatggagcgttcaccaatcagatattcgtttcaacttctacggacagtccgacaagtcccacaactgaggcacccccattacctccacgaaatgccggtaagggacctaccgggccacccagcacacttccgcttagtacacagactagtagcgggtcaagtaccttgtctaagaaacgtcctcctccaccccctcccggtcataaaaggacgctgtccgaccctccgtcccccctgccccatggtccacctaataagggagccgttccttggggcaatgacggtgggccttcaagcagcagcaaaactacaaataagtttgaaggactctcccagcagagcagtacgtccagtgcaaagacggctctgggtccccgggttctccctaagttgcctcaaaaagtggcgctgcgtaagaccgatcacctttccttggacaaagccacaatccctcctgagatttttcagaaaagctcccagttggccgagctgccacaaaaacctcccccaggggatctgccgccgaaacccacagaactggcgcctaagccgcagataggggacctgcccccgaagccgggtgaactgccaccaaaaccccaactcggagacctgccacccaagccacagttgagtgatctgcccccaaagccccagatgaaggatttgccaccaaagccccagctcggggacttactggccaagagccagactggcgatgtgagcccaaaggcccagcagccttcagaggtcacgctcaagagccacccactggacctgtcccccaatgtgcagtcccgcgatgccatccaaaaacaagcatctgaggatagcaacgacctgacgccgacattacctgagaccccggttcctctccctagaaaaattaacacgggaaaaaataaggtgcgtcgtgtgaaaaccatttacgactgtcaggctgataacgacgacgaactgacatttattgagggcgaagtaattattgtcaccggagaggaggaccaagagtggtggattggacacatagaaggacaacccgaaagaaaaggggtgtttcccgtgtccttcgtgcacatcttatcagattag

SEQ ID NO: 179393 - DNA, 3390 bp, synthetic construct
  misc_feature 1..3390: note = Description of Artificial Sequence: Synthetic coding sequence
  source 1..3390: mol_type = other DNA
atgcggagcagcgccagccggctgagcagcttcagcagccgggactcactctggaacaggatgcctgaccagatttctgtgagcgagtttatcgcggagacaacagaggattacaactcaccaactaccagcagttttacaacccgcttacacaattgccgcaacaccgtaacattgcttgaagaagccttggatcaagaccgtaccgcgctgcagaaggtcaagaagtccgtaaaggccatttacaactcgggccaggatcacgtacagaatgaagagaactacgcccaggtgctggacaagttcggctcgaattttctgtcaagagacaatcctgatcttggaaccgctttcgtcaagttctccactctcactaaggaactctctacattgctgaaaaatctgctgcaaggcctgagccacaatgtgatttttacactggatagtctgttgaaaggggatttgaagggcgtgaaaggtgatctaaagaagccttttgacaaggcatggaaggactatgagacgaagtttactaaaatagagaaagaaaaacgagagcacgctaagcagcacgggatgattcggaccgaaattacaggcgcagagattgctgaagaaatggagaaggaacggcgacttttccagctgcagatgtgcgagtacctgatcaaggtgaacgagatcaaaaccaagaagggcgtcgacctgcttcagaacttaatcaaatactaccacgcacagtgtaacttcttccaggacggcctgaaaaccgcagacaagctgaagcaatatatcgaaaaactcgccgccgatctttataatataaagcagacacaggacgaggaaaagaaacagctcactgccctgcgagatctgattaagtcttccttgcaactagaccagaaggaagactctcaatccagacagggtggatattccatgcaccaactccagggcaataaggagtacgggtctgagaagaaggggtacctactcaaaaagagtgatggcatccgcaaggtttggcagcgacgcaagtgcagcgtgaaaaacgggatccttacaatctctcatgccacatcaaatcgccagccagcaaaactgaacctattaacttgtcaggtcaaacccaatgctgaagacaagaaatcatttgacctgattagccacaatcgaacctaccacttccaagcagaagacgagcaagactatgttgcttggatttcagtactgaccaattctaaagaagaggctctgacaatggctttcagaggcgagcagtcagccggtgagaatagtctagaggatctcacgaaagcaataatcgaggacgtgcagcgactgccgggcaacgatatttgttgcgattgtgggtcaagtgaacccacatggctctccactaaccttgggatcctcacgtgcatagagtgcagcggtatacatagggaaatgggggtccacattagtagaattcagtctttggagcttgacaagctcggaactagcgaactgctcctggctaagaatgtaggcaataattcgtttaatgacatcatggaagcaaaccttccctctcctagccctaagccaacaccttcctctgatatgacagtccgtaaagagtacatcactgcaaagtacgtggaccatcgattctctagaaagacctgctccacatcctcagcaaagttgaacgagctcttagaagcgatcaagtccagagatttgctcgcgctgatacaagtctacgcagaaggcgtcgaattaatggagccacttctggagcccggccaggaactgggagaaaccgcactgcatctagccgtcagaacggccgaccagacatccctgcatctcgtcgacttccttgtgcagaactgtgggaatctggacaagcagaccgccttgggcaatacagtattacactactgttccatgtattcgaaaccagaatgtctgaagttgctgttaagatcaaagcccaccgtggatattgttaaccaagcaggggagactgcattggatatcgccaagcgccttaaggctactcagtgcgaagatcttctgtcacaggccaagtcgggcaaattcaatccgcacgtacatgttgaatatgaatggaatctgcgccaggaggagattgacgaaagcgatgatgacctagatgataagccgagcccaatcaagaaggagcggtcccccaggcctcagtcgttctgtcacagctcctctatatctcctcaagacaagttggcgttaccaggtttctccaccccgagagacaaacagcgtctcagctatggcgcattcacaaaccagatattcgtgtccacgtctacagactctcccacgagccccacaacagaggcccctcctttaccaccgaggaacgccgggaagggcccaaccgggcctccatcgaccctgcccctcagcacacaaacatcgagcggcagctctaccttaagtaagaagcgaccaccgccaccccccccggggcataaaagaactctgtctgatcccccaagcccacttccacacgggccaccaaacaagggggccgtcccgtggggaaatgacggagggccttcgagtagttctaaaaccactaataagtttgaaggccttagtcagcaatcctccaccagtagcgctaaaacagccttgggcccgagagttttgcctaaattaccacaaaaggtggccttgaggaagaccgaccacctgagcctcgataaagcaaccattccgcctgaaatcttccaaaagtcttcgcagctggccgaactgcctcagaaaccaccccccggcgacctgcctccaaagccaacagaacttgcacctaaacctcagattggagacctgccacctaagcccggggaactgccacctaagccgcagctaggagacctccctcccaagccacaactcagtgacctgcctccgaagccccagatgaaggaccttccacccaagccacaacttggcgatctgcttgcgaaaagccagacaggagatgtgtcacctaaggcccagcagccaagcgaagtgacactcaagtcccaccctctggatctgagcccaaacgtgcaatctagagatgccatccagaagcaagcatctgaggactccaacgatttgacccccacactgcccgaaacgcccgtgccacttccccgaaaaattaacacagggaagaacaaggtgcgccgcgtgaaaacaatttatgattgtcaggccgacaatgatgatgagctgacctttatcgaaggggaggtgatcattgtgacgggagaggaagatcaagagtggtggatagggcatatcgagggtcagccggagcgcaagggagtcttccctgtgagcttcgtgcatatcttaagtgactag

SEQ ID NO: 179394 - DNA, 3390 bp, synthetic construct
  misc_feature 1..3390: note = Description of Artificial Sequence: Synthetic coding sequence
  source 1..3390: mol_type = other DNA
atgcggagcagcgccagccggctgagcagcttcagcagccgggacagcttgtggaatagaatgcctgatcagatctctgtgtctgaattcattgcagagacgaccgaagattacaactcccctacaacttcttcctttaccactcggttacataactgcaggaatacagtcacactgttggaggaagccctagaccaggatcgtacagcgctgcagaaagtgaagaaatctgtcaaagccatttacaactcaggccaggatcatgttcagaatgaggagaattacgctcaggtgctggacaagttcggatcaaattttctcagtcgggataatccggatctggggaccgcctttgtaaaattctcgacactgaccaaagagctgagcactctcttgaagaacctgttacagggtttgagccataacgtcatctttacgctagatagcctgcttaaaggcgatctgaagggcgtgaaaggggatctgaaaaaaccctttgataaagcttggaaggattatgagacaaagtttaccaagatcgaaaaagagaagcgcgaacacgctaaacagcatggaatgattaggaccgagattaccggagcagaaatcgccgaggagatggagaaggaaagaaggctgttccagctgcagatgtgtgagtacctgatcaaagtcaatgagatcaaaaccaagaagggggtggatctgctgcagaacctgataaaatactaccatgcacagtgtaatttctttcaggacgggctgaagaccgccgataagctgaaacagtatatcgagaagctggccgccgatctatacaacatcaagcagacacaggatgaggaaaaaaagcagctgacagctctgagagacctgataaagtcatcgttacagttggaccagaaagaagatagtcaatcaagacagggcggatattcgatgcaccagcttcagggcaataaggaatatggctctgagaagaaaggctatctgctcaaaaagagcgatggtattagaaaggtgtggcaaagaaggaaatgttctgtcaagaatggcatactgacaatatcccatgccactagtaacagacaaccggccaagttaaaccttctgacttgccaagttaagcctaacgccgaagacaagaaaagtttcgacctcataagccacaatcggacttaccatttccaggccgaggacgaacaggattacgtggcctggattagtgtcctcaccaattccaaggaagaagcgctaacgatggcgtttagaggggagcagtcggcaggcgaaaacagtctggaagatctcactaaagctattattgaagacgtacagcgcctgcctgggaacgacatctgctgtgactgtggtagctctgaacccacgtggctcagcaccaacctgggaatcctcacatgtattgagtgcagcggtatccaccgagagatgggcgttcacatttctaggatccaatcactcgaactagataagctggggacctcagagttactgttagccaagaacgtcggcaacaacagcttcaacgacattatggaagctaacctgccctctccctcacctaagcccacgccgagttcagatatgaccgtgcgtaaggagtatatcactgccaaatacgtcgaccatcggttttcaaggaaaacttgttccacatccagtgccaaactaaacgagctgctggaggccatcaagtcccgggaccttttagcactgatccaggtgtacgcagagggtgtggaactgatggaacctctgctggagcccggacaagaactgggagagaccgcactccacttagccgtaagaacagcagaccaaacttctcttcacctggtggatttccttgttcaaaactgcggtaatctcgataagcagactgcccttggtaacacagttctgcactactgttccatgtattccaaacctgaatgtctgaaactcctgctgaggtccaaacctactgtcgacatcgtcaatcaggccggcgagacagctctggacattgccaaacgcctcaaagccacgcagtgtgaggacctgctgtctcaggccaagtctgggaagttcaatccccacgtgcacgtggagtacgagtggaaccttcggcaggaagagatcgacgaaagtgacgatgatttggacgacaagcccagcccgatcaagaaagaaaggtcaccacgccctcagtccttttgccattcatcctccatcagccctcaggacaagttggccctccctggattctccactcccagagataaacagcgtctctcctatggagcttttactaaccaaatattcgtctctacgtctacagactcaccaacgtccccaacaaccgaggctcccccccttccgccgaggaacgccggcaagggtcccactggccctccctccactctcccccttagtactcagacatcaagcggtagtagtacactttctaaaaagcgtccccctcctcctccaccaggccacaagagaacactgtctgatcccccaagcccactgccccatggcccacctaacaagggagctgttccctggggaaatgatggaggccccagctcttccagcaagacaacaaataagttcgaggggctgtcccagcagtcttcaacctccagtgccaagactgccttgggacctagggtgttaccaaagctgccccagaaggtggctttgcgcaaaactgatcacctgagcctggataaggcaaccattccgcctgaaatttttcagaaatccagtcagctggccgaactgccccagaaacccccccctggcgatttgccgcccaagccaactgagttggctccaaagcctcagataggagacctgcctcctaagcctggcgaactgccccctaagcctcagctgggagacctacccccaaaaccccagttgtctgacctgccgcccaagccccaaatgaaggacttgccccccaagccgcagctgggagacctgcttgcaaaatctcagaccggcgatgttagcccaaaggcacaacagccgtcggaggtgacattaaaaagtcaccccctggacctgtcccccaacgtgcagtccagggatgcaattcagaaacaggccagcgaggattcaaacgacctgacacctacccttcccgagacacccgttcccctgccaagaaagatcaacactggcaaaaataaggttagaagagtcaagaccatatatgattgccaagctgataacgatgacgaattaacctttatagagggggaggtgatcatcgttacaggagaggaggatcaagagtggtggatagggcatatagagggacaacccgagcgaaagggggtattccccgttagcttcgtgcacatactgtcagactag

SEQ ID NO: 179395 - DNA, 1065 bp, synthetic construct
  misc_feature 1..1065: note = Description of Artificial Sequence: Synthetic coding sequence
  source 1..1065: mol_type = other DNA
atgagcctgcggggcagcctgagccggctgctgcagacccgggtgcattccattttaaagaaaagcgtgcacagtgtagctgtgatcggggctcccttcagtcagggccagaagcggaaaggggttgagcatggacccgcagcaattcgtgaggctggccttatgaagaggctcagctcccttgggtgccatctgaaggactttggcgatcttagcttcactcctgtgcctaaggacgatttatataacaacctgattgtgaaccccagaagtgttgggctggctaaccaagagctggccgaagtcgtgagccgggcagtgtcagatggttattcatgtgtcacactaggcggtgaccactccctggccattggcaccatcagcggccatgctcgccactgtcctgatctgtgtgtcgtgtgggttgatgctcacgccgatatcaatacccctcttaccaccagttctggcaatcttcacggacaacccgtgtcattcttgctacgcgagctgcaggacaaggtgccacagctccccggcttttcttggataaagccatgcatatcaagtgcctccatcgtatatatcggcctgagggacgtcgaccctccagaacatttcattctgaagaattacgatatccaatatttttcaatgcgggatatcgaccggcttggaatccagaaagttatggaaagaaccttcgacttgctaatcgggaaacggcagcgccctatccacctttcatttgacattgatgcattcgacccaactttggctcctgccactggcacgccggtagtgggcggactgacctatagggagggtatgtacatcgcggaagaaatacacaacacgggccttctgagtgcgctggacctggtggaggttaacccacagctcgctacctccgaagaggaagccaaaacaaccgccaacttggcggtagacgtcatagctagtagctttgggcagaccagggagggtggccatattgtgtacgaccaattgcctactccatcttcacctgacgagagcgagaatcaagcccgagtgcggatctag

SEQ ID NO: 179396 - DNA, 207 bp, synthetic construct
  misc_feature 1..207: note = Description of Artificial Sequence: Synthetic coding sequence
  source 1..207: mol_type = other DNA
atgaagctgaacgagaagttcagcgagggctggcggaagcccaacgcatcctggaagtcttcgtgttctaagaactccagcgacagggacaaactgtctctgccacacaaaaaacttgagagagggtcctggcgggtttggcagccccgatcaacgctgtgccgcacccttgataaaaccgaggaggagcgcgctaagcgtgagtag

SEQ ID NO: 179397 - DNA, 429 bp, synthetic construct
  misc_feature 1..429: note = Description of Artificial Sequence: Synthetic coding sequence
  source 1..429: mol_type = other DNA
atgaagctgaacgagaagttcagcgagggctggcggaagcccaacgcatcatggaagtcgagctgtagtaagaattccagcgacagagataagttatcgctcccacacaagaagttggaacgtggaagctggcgcgtctggcaaccccggtccacactgtgtcgcacactggacaagacagaggaagagcgggccaaaagagaggagctagagcggattcttgaggaaaacaatcggaagatcgccgaagcgcaggccaaacttgccgaagaacagctgaggatcgtggaggaacaaagaaaaattcatgaggagaggatgaaactcgaacaggaacgtcaaagacaacagaaggaagagcagaagatcatccttgggaagggcaagtctagacctaaactgagcttctcactgaaaacacaggattag

SEQ ID NO: 179398 - DNA, 822 bp, synthetic construct
  misc_feature 1..822: note = Description of Artificial Sequence: Synthetic coding sequence
  source 1..822: mol_type = other DNA
atgggccggagccggagccggagcagcagccggagcaagcacaccaaatcctcaaagcacaacaaaaagagatcccgatcccgcagccggagtagagacaaggagagagttaggaaacgcagcaagagtcgcgagagcaagcgaaaccggagaagggagagccgatccaggtctagatcaactaatactgctgtgagcaggagagagcgcgatagagagagagcatccagcccacccgatcgcatcgatatcttcgggcgcaccgtctcaaagcgctccagtctcgatgagaagcagaagcgggaggaagaggaaaaaaaggctgagtttgagagacagaggaaaatccgtcagcaagaaatcgaggagaagctgattgaagaggaaactgcccgcagggtagaggaacttgtggctaagagggtagaagaagaattagagaaaaggaaagacgaaatcgaacgtgaagtcctccggcgagttgaagaagccaagcgaattatggaaaagcagctactagaagagctggagaggcaaaggcaggccgagctcgctgcacagaaggctcgtgaagaggaggagagagctaagcgagaggagctcgagagaatcctagaagaaaacaataggaagattgccgaggcccaagcaaagcttgcagaagagcagcttcgcatcgtggaggaacaacgaaagattcatgaggaacgcatgaaactggaacaggaacgccaacgtcaacagaaagaggaacagaagataatactgggcaaaggaaaaagtcggcctaagctgagttttagtctgaagacgcaggactag

SEQ ID NO: 179399 - DNA, 672 bp, synthetic construct
  misc_feature 1..672: note = Description of Artificial Sequence: Synthetic coding sequence
  source 1..672: mol_type = other DNA
atgggccggagccggagccggagcagcagccggagcaagcacaccaagtcgtcaaagcacaataaaaagcgagcaagtagcccccctgacagaatcgacatctttgggagaaccgtaagtaagagaagcagtctcgatgagaagcagaagagagaggaggaagagaaaaaagcggaatttgagcgacaaagaaagatcagacagcaggaaattgaggagaagctgattgaagaggagaccgctcgacgggtcgaggaactggtcgccaagcgagtcgaggaagaactggagaaacgaaaagacgaaatagagagagaagtcctgcggagggtggaggaggctaagagaattatggaaaagcaactgctcgaagaactggagagacagagacaggccgagctggctgcccagaaggctagggaggtcaccctcggccggcttgaaagtcgggactctccttggcagaatttccaatgttgggtgcttccccctgctcagttccggaagcggtggaacacggattacctgattcctttctcctcgaaacttaatatcgccgcaaaagtcaatttcctcgcttattcagaagtgctcaccgacaatctgaaggtgggtagcttttacaagacatacagccgaatcctgtttgatctcatggagctggcaatttag

SEQ ID NO: 179400 - DNA, 495 bp, synthetic construct
  misc_feature 1..495: note = Description of Artificial Sequence: Synthetic coding sequence
  source 1..495: mol_type = other DNA
atgcccgacaccatgctgcccgcctgcttcctgggcctgctggccttctcttccgcatgctacttccagaattgccccagaggcggcaagcgcgcaatgtcagatctggagctgcgacaatgtctcccatgtggccccggcggcaaggggaggtgttttggacctagtatatgctgcgcggacgagctgggatgctttgtcggaacggcagaagcgctgaggtgccaagaagagaactacctgccaagtccctgccagtctggtcaaaaggcctgcggatctggcggtagatgcgctgccttcggtgtctgctgcaacgacgagagctgcgtgacagaacccgagtgtagagagggcttccaccgcagagcccgcgctagcgacagaagcaatgctacccagctcgatggtcccgctggagcactgctactgcgtctggtgcagctggccggagcccctgagcccttcgagccggcacagcccgatgcatactag

SEQ ID NO: 179401 - DNA, 1257 bp, synthetic construct
  misc_feature 1..1257: note = Description of Artificial Sequence: Synthetic coding sequence
  source 1..1257: mol_type = other DNA
atgcggctgagcgccggccccgacgccggccccagcggcaacagcagcccttggtggcctttggcaaccggggcagggaatacatcgagagaagctgaagccctcggagaaggcaacggaccccctcgcgacgtccgtaatgaagagcttgctaaactggaaattgcagtgctcgcagtgaccttcgccgtcgcagttttgggcaatagcagtgtactgctggcgcttcacagaacaccccggaagacttcaagaatgcatctgtttattagacacctgtcccttgccgatcttgctgtcgcattcttccaagtgctgccccaaatgtgttgggatatcacataccgcttcaggggccctgattggctgtgtagagtggtcaaacacctccaagttttcgggatgtttgctagtgcttacatgctggtggtgatgaccgctgacaggtacatagccgtatgccacccattaaaaacacttcaacagccggcgaggagaagcagactgatgattgccgccgcctgggttctgtcctttgtgctgagcacacctcagtacttcgtgttctccatgattgaggtaaataatgtgacaaaggccagggattgttgggcaacttttatccagccatggggcagtcgggcctatgtgacctggatgactggcggtattttcgtggccccggtggtgattcttggaacctgttacggcttcatttgttacaacatatggtgtaacgtaagagggaaaactgccagccgacagtcgaaaggagcagaacaggccggagttgcctttcagaagggatttctcctggctccatgcgtcagttcagttaagagcatcagccgggctaaaatacggactgtaaaaatgacatttgttatagtaaccgcttacattgtgtgttgggcacccttctttatcattcagatgtggagcgtctgggatcccatgagcgtgtggaccgaatcagaaaacccaaccattacgattaccgccctactgggttcactgaacagctgctgtaacccttggatttatatgttttttagcggccacctcttgcaggactgtgtacaatctttcccctgctgtcagaatatgaaagagaagttcaataaagaggatacagattccatgtcaagacgccaaactttctacagcaataatcgcagtcccactaattcaactgggatgtggaaggattcacccaaaagcagcaagtctattaaattcatacctgtgtcaacttag

SEQ ID NO: 179402 - DNA, 1275 bp, synthetic construct
  misc_feature 1..1275: note = Description of Artificial Sequence: Synthetic coding sequence
  source 1..1275: mol_type = other DNA
atggacagcggccccctgtgggacgccaaccccaccccccggggcacactgagtgccccaaatgccaccaccccgtggttgggccgcgatgaggagctggcgaaagttgaaatcggcgtcctggcaaccgtgctggtactcgcaactggaggcaacctggccgtcctgttaacactcggccagctggggaggaagcggtccagaatgcacttgttcgttttacacctggctcttaccgaccttgcggtggcactgtttcaggtgttgcctcagctcctctgggacataacctaccggttccaaggacctgacctgctgtgcagggccgtgaaatacctgcaggtgcttagtatgttcgccagcacatacatgctcttggccatgactcttgatcgatatctggccgtatgtcacccccttcgtagcctgcagcagcccggacaaagtacatatctgctgatcgccgctccttggctcctggctgcgatctttagcctgccacaagttttcattttcagcttgagggaggtgatacagggatctggcgtgctggattgctgggccgacttcggcttcccctggggtcctagggcgtaccttacatggacaacacttgcgatttttgttctccccgtgacaatgttaaccgcctgttattctctcatttgtcatgaaatctgcaagaatctcaaagtcaaaactcaggcatggagggtgggtggaggcgggtggcggacatgggatagacctagtccgtctacgctggccgccacgacaagaggattgcctagccgcgttagctcgatcaacacaatctcacgagcaaaaatccggaccgtcaagatgactttcgtaatcgttttagcttacatagcatgctgggctccctttttttccgttcagatgtggtcagtttgggataaaaatgcccccgacgaggacagtaccaatgtggcgtttacaatatcgatgctgctggggaacctgaactcttgctgtaacccatggatctacatgggctttaactcacatctgcttccacggcctctgaggcatctggcatgttgcggcggtccacagccacgaatgaggcgccggctatccgacgggtctctgagttcccgccacactacgcttcttacccgtagttcatgcccagctacactgagtctatcactcagcttgactctgtctggaagacctagacccgaggaatctcctagggatctcgagttggccgacggcgaaggaaccgcagagaccatcatcttctag

SEQ ID NO: 179403 - DNA, 1116 bp, synthetic construct
  misc_feature 1..1116: note = Description of Artificial Sequence: Synthetic coding sequence
  source 1..1116: mol_type = other DNA
atgctgatggccagcaccaccagcgccgtgcccggccaccccagcctgcctagtttacctagcaatagttcacaggagcgccctctcgacacccgcgatccactgctcgcacgagcagagcttgccctcctgtcaatcgtgtttgtggccgtcgctctttctaacggtctggtgctggcggccctggcccgcagaggacgccgcggccactgggcaccaattcacgtattcattggccacctctgcctcgctgatctggccgtcgcattatttcaagttctgccccagttagcatggaaggccacggatcgcttccgcgggcctgacgccctgtgccgcgccgtgaaatatttgcagatggtgggtatgtacgctagttcctacatgatcttggctatgacactagaccgccaccgagctatttgcagacctatgcttgcctacaggcatgggtccggcgcccactggaaccgccccgtgctggtcgcctgggcattcagtctcctgttgagcctgcctcagctgttcatctttgcccaaagaaatgtcgagggaggttctggtgttactgactgttgggcctgttttgcggaaccctgggggcggcgtacttacgtgacatggatagccctcatggtctttgtggctcctacgcttggcatcgctgcatgccaggtgttgatttttagagaaatccacgcttctctggtccccggcccaagcgagcgacctgggggtcgtcgcaggggcagaagaaccggcagccctggtgaaggggcacacgtctcggcggcagtcgcgaagactgtccggatgacactggtgatcgtggtcgtgtatgtgctgtgctgggctccattttttttggttcagctttgggcggcatgggatcctgaggcccccctagagggggcaccttttgtgctcctgatgctgctagcgagcctgaacagttgcaccaacccttggatttacgcttccttttcatcaagcgtgtcatctgagctgagaagtctattgtgttgtgcccgtgggcggaccccacccagcctggggccccaggacgagagctgtacaacggccagtagctccttggccaaggatacaagctcatag

SEQ ID NO: 179404 - DNA, 1116 bp, synthetic construct
  misc_feature 1..1116: note = Description of Artificial Sequence: Synthetic coding sequence
  source 1..1116: mol_type = other DNA
atgctgatggccagcaccaccagcgccgtgcccggccaccccagcttgccatccctgccttctaactcatcgcaagaacgccctctggacacaagagatcctctgcttgctcgcgcagaactggcattgctttccattgtgttcgtggctgtggcactatcaaacggccttgtgctagctgccttggcccgccggggaaggcggggccactgggcacctattcacgtgtttatcggccatctttgcctcgcggacttagccgtagctctctttcaggttcttcctcagctcgcctggaaggcaactgatcgatttagagggcccgacgccctctgtagagcggtgaaatacctgcagatggtgggaatgtacgcatcctcctatatgatcctggctatgaccctcgataggcacagggccatttgtagaccaatgttggcatatcggcatggaagcggcgcgcattggaaccggcccgtcttggttgcttgggccttttccctgctgctcagcttaccccaactctttatcttcgcgcagcgcaatgtggaaggcggcagcggtgtcactgactgctgggcatgcttcgcagagccttggggaaggcgaacttacgtgacctggattgcgttgatggtattcgtggctccaactttaggcatagccgcatgccaggtcctgatttttcgggaaatacacgcatctttagtgcccgggccatcagagaggccaggcggtagacgtcgcgggcgccggaccggttcacctggcgagggcgctcatgtcagcgcagcagttgccaagaccgttagaatgactctagttatcgttgtcgtgtacgtgctatgttgggctcccttctttctggtacagctgtgggccgcctgggaccccgaggcccctctcgagggagccccctttgtcctcctgatgctcctggcatctctgaactcatgcacgaacccttggatctatgctagctttagtagctctgtgtctagcgaactcagaagtcttctatgttgtgcgcgcgggagaactcccccgtcgctcggtccacaggacgaatcgtgcactacggcttccagctctctggcaaaggacactagctcttag

SEQ ID NO: 179405 - DNA, 930 bp, synthetic construct
  misc_feature 1..930: note = Description of Artificial Sequence: Synthetic coding sequence
  source 1..930: mol_type = other DNA
atgctgatggccagcaccaccagcgccgtgcccggccaccccagcctgccaagtttaccctcaaatagttcccaagaaagacctttggataccagggaccccctccttgcacgcgctgaactcgccctcctgagtatcgtctttgtggcagttgccttaagcaatggtctggtgctagccgctcttgcacgtcgggggcggcggggtcattgggctcccattcatgtttttattgggcacctgtgtcttgcagatctggccgttgctctgttccaggtccttccgcaactcgcttggaaggctaccgatcgctttaggggccccgacgctctttgcagagccgtgaaatacttacagatggtggggatgtatgcctcaagctacatgatactcgcaatgacactggatcggcaccgcgcgatctgccggcccatgctggcgtacaggcacgggagcggcgctcattggaacagacccgtgctggtcgcatgggctttcagcctgctgctcagtctgcctcagctgttcatcttcgcccagcggaacgtggaaggcggttctggggtaaccgattgttgggcctgcttcgcggagccttggggtcggcggacctatgttacgtggattgctctcatggtgttcgtggcaccaaccctgggtatcgccgcgtgtcaggttctgatttttcgcgagattcacgcctctcttgtgcctggcccgtcagagagaccagggggccgccgtcgtggccgcagaaccggtagcccaggagaaggagctcatgtgagtgcagcagtcgccaagacagtaagaatgaccctcgtgattgtagtggtgtacgtgctatgctgggcgccattttttctcgttcaattgtgggccgcctgggaccccgaagcacctctcgagggaggatgtagccgaggctag

SEQ ID NO: 179406 - DNA, 1005 bp, synthetic construct
  misc_feature 1..1005: note = Description of Artificial Sequence: Synthetic coding sequence
  source 1..1005: mol_type = other DNA
atgggccggcggagcagcgacaccgaggaggagagccggagcaagcgtaagaagaagcataggagaagaagctcatcctcatcctctagcgacagcaggacgtactcccgcaagaagggaggaaggaagagccggtccaagagtcgatcatggtctcgcgacctccagccaagatcgcattcttatgataggcgccgtagacatcgctcttcctcatcttcatcctatggcagcagacgcaagcgtagccgtagcaggagtaggggtagggggaaaagctatcgggtgcagaggtcaaggagcaagagccgaactcggcgttctcgctcccgacccaggctgagaagccacagccggagctcggaacgctctagtcaccggcgcacacgctcccgttctcgcgatcgcgaacggcgcaagggcagagataaggaaaagcgcgaaaaggaaaaggataaagggaaggacaaagagctacataatatcaagaggggggagtcaggcaatattaaggcaggattagagcacctgccacctgccgagcaagcgaaggcccgcctgcagctggtgctcgaggctgccgctaaggccgatgaggcgctgaaggccaaagagcgaaacgaagaggaggcaaagcgaaggaaagaggaggaccaggcgacacttgtggagcaagtcaaaagagtgaaggagatcgaggccattgagagcgatagctttgtgcagcagactttccggtcctccaaggaggttaaaaagtccgttgagccgagcgaagtgaagcaagctacatcgaccagtggaccagctagcgcggtggctgaccccccatcaacagaaaaggaaatcgaccccacaagcatccccacggccatcaagtaccaggatgataattcgctcgcgcaccctaacctattcattgagaaggccgatgcggaggaaaagtggtttaagaggttgatcgcactccggcaggaacggctcatgggttccccagtggcctag

SEQ ID NO: 179407 - DNA, 831 bp, synthetic construct
  misc_feature 1..831: note = Description of Artificial Sequence: Synthetic coding sequence
  source 1..831: mol_type = other DNA
atgggccggcggagcagcgacaccgaggaggagagccggagcaagagaaagaagaagcacaggcggagaagctcatcctcttcttctagcgattcccggacatactcaagaaagaagggtgggcgaaaatctcgttccaagagccggtcatggtcaagggatctgcagcccagaagtcacagttatgataggcgtcgccgacatagatcatcttcaagtagttcatacgggagtagaaggaagagaagtcggagccgcagtcgcggtcgcggaaagtcttaccgcgttcagcgctcaaggtctaaatctagaacccgtagagaaagcggcaatatcaaggcaggcctcgagcatttgccacccgccgaacaggccaaagctaggctgcagctcgtgctggaagccgctgctaaggccgacgaggcattgaaagccaaagagcgcaacgaggaggaagccaagcggcggaaggaagaagatcaagccaccttggtggaacaggtgaagagggtaaaggaaatcgaagctatcgaaagcgatagctttgtgcagcagacattcaggtcttctaaagaagtcaagaagagcgtggagccaagcgaagttaagcaggcaacttcgacctcaggaccagcgtccgcggtggcagatccgccgagtaccgagaaggagattgatcccactagcattccaacagccatcaagtaccaggatgacaattctttggctcatcccaacctgttcatcgaaaaggccgacgccgaggaaaagtggttcaagaggcttatcgcgctgcggcaggagcgcctgatgggttcacctgtggcttag

SEQ ID NO: 179408 - DNA, 831 bp, synthetic construct
  misc_feature 1..831: note = Description of Artificial Sequence: Synthetic coding sequence
  source 1..831: mol_type = other DNA
atgggccggcggagcagcgacaccgaggaggagagccggagcaagcggaaaaaaaagcatcggagacggagctcatctagttctagcagcgacagtcgcacttatagccgaaagaagggaggccgtaagagccgtagcaagtcgagatcctggagccgggacctgcagccacggtctcattcatacgatagaaggaggcgccaccggtcttcgtcttcctcctcctacggcagccgccggaaacgctctagatctcgcagcaggggcagaggaaagtcataccgcgtccagcgttcacggtccaagtcacgaacacgccgagaatctggaaatatcaaggcaggcctcgagcatctgccccccgcggagcaggctaaagcccggctacagctggttctagaagccgccgcgaaagctgatgaagccttgaaagctaaagagcggaacgaggaggaggccaagcgaagaaaggaggaagatcaggctacccttgttgaacaagtcaagagagtcaaagaaattgaggccatcgaaagtgactcctttgttcagcagacatttagaagcagtaaagaggtaaagaaatctgtcgaaccctcggaagttaagcaggcaaccagcacaagtggacctgcatcggcagttgccgatccccccagcacggagaaagagatcgaccctacatccattcccaccgctattaagtaccaggacgacaattcactggcacatcccaatctcttcatcgaaaaagccgatgctgaggagaagtggtttaagcgcctcatcgccttgagacaggagcgccttatgggtagcccggtggcatag

SEQ ID NO: 179409 - DNA, 612 bp, synthetic construct
  misc_feature 1..612: note = Description of Artificial Sequence: Synthetic coding sequence
  source 1..612: mol_type = other DNA
atgggccggcggagcagcgacaccgaggaggagagccggagcaagcggaagaagaagcacaggcggcgtagtagctcctcaagcagctccgatagtaggacctattcacggaaaaagggcggcaggaagtcccggagcaaatccaggtcatggtctcgtgaccttcaaccaagaagtcacagttatgacaggcggcgccgtcacaggtcttccagtagctcctcctacggtagcaggcggaagcgcagccggtcccggagcagaggacgagggaagagctacagggtccagagatctcggagcaagtcccggaccaggcggtccaggagccgccctcgcctccggtcccactcgagatcctctgagcgttcctcacaccgcagaactcgtagtagatcacgtgaccgcgagaggaggaagggccgtgacaaagaaaagcgcgagaaagaaaaagacaaggggaaggataaagaactgcacaatattaaacgtggtgagtccggcaacataaaagctggattggaacatttgccacctgcagagcaggctaaagcccgcctccagctggtgctggaggcggccgcgaaggcagatgaggcactgaaggcctag

SEQ ID NO: 179410 - DNA, 585 bp, synthetic construct
  misc_feature 1..585: note = Description of Artificial Sequence: Synthetic coding sequence
  source 1..585: mol_type = other DNA
atgggccggcggagcagcgacaccgaggaggagagccggagcaagcgaaaaaaaaagcaccgaaggagatctagctcatctagctccagcgattcgcgtacttattcgcggaagaagggaggaagaaaaagcagatcaaaaagccggagctggtcccgggacctgcagcctcgatcacattcttatgaccgcaggaggaggcaccgctccagcagctcttcgtcttatggctcaagaagaaagaggtctcggtcaaggagcagaggtcggggtaagtcttatcgcgtgcagcggagccggtccaagtcccggacacgccggagtcgcagcaggccacgcttacgttctcacagccggagtagtgaacgatcctctcaccggcgcacaaggtcgcgctcacgagatcgggaacggaggaaaggtagagataaagagaaaagggaaaaagaaaaagacaagggcaaagacaaggaattacacaatataaaaaggggtgagagcggtaatattaaagccggtctcgagcacctacctccagccgagcaagcaaaagcccggttacagctggtgttggaggccgcatag

SEQ ID NO: 179411 - DNA, 1005 bp, synthetic construct
  misc_feature 1..1005: note = Description of Artificial Sequence: Synthetic coding sequence
  source 1..1005: mol_type = other DNA
atgggccggcggagcagcgacaccgaggaggagagccggagcaagagaaaaaaaaagcatagacggcggtcttcttccagttcatcctccgacagcagaacttattcacgcaaaaagggtggtagaaaaagccggagtaaaagtagatcttggagccgagatttacagcctagaagtcattcttacgacaggcggcgccgtcatcgctcctcctccagtagcagctatggtagtaggaggaagaggagtagaagccgctcccgaggtcgcgggaagtcctaccgggtgcagagatcccgcagcaagagccgtactcgaagaagccggtcaagacctagacttaggagccatagcagatccagcgagcgaagctcccaccgacggacacggtcccgatcccgggacagagaaaggcggaaaggccgggacaaagaaaaacgcgagaaggaaaaagataagggcaaggacaaggagctccacaatatcaagcggggcgaaagcggcaacatcaaagcggggttagagcacttgcctccagcagaacaggccaaggctaggctgcagctggtgttggaagcagcagcaaaagccgacgaggccctgaaggcgaaggagcggaacgaagaggaagccaaaagaaggaaggaggaagaccaagccacacttgttgaacaggttaagcgcgtcaaggagattgaggcgatcgagtccgattcttttgtccagcagacattccgctcttctaaagaggtgaagaaatctgtcgagccctctgaggtaaagcaggcaacctctacaagtggtcctgcaagcgccgtcgctgatcccccatccaccgagaaggagattgatcccacgagtattccaactgcaattaaataccaggacgataacagccttgcccatcctaatttattcatcgaaaaggccgacgctgaagaaaagtggtttaaaaggctgatagctcttaggcaagagaggttgatgggtagtccggtggcctag

SEQ ID NO: 179412 - DNA, 498 bp, synthetic construct
  misc_feature 1..498: note = Description of Artificial Sequence: Synthetic coding sequence
  source 1..498: mol_type = other DNA
atgggccggcggagcagcgacaccgaggaggagagccggagcaagcgaaaaaagaagcatagaaggcgcagcagcagctcttccagctctgactcgagaacctacagtagaaagaaaggagggaggaagtcacgcagcaaatctcggtcctggtcccgcgatctgcaaccacgctcacattcttacgaccggcggagaagacacaggtcatcctcatcaagtagctatggatcccgtagaaagaggtcacggtcaaggagtagaggtcgcggtaaatcctatcgtgtgcagcggagtcggagtaagtcgcgcactaggcgttccaggtcacgtccacgattgcgcagtcattcaaggagttctgagaggagctctcatcgacgaacccggtcaagaagccgcgatcgagagaggcggaagggacgggataaggaaaaacgcgagaaggagaaggacaagggaaaagataaagagctccacaacataaagaggggctag

SEQ ID NO: 179413 - DNA, 948 bp, synthetic construct
  misc_feature 1..948: note = Description of Artificial Sequence: Synthetic coding sequence
  source 1..948: mol_type = other DNA
atgcggaaccggatggcccccgagaacccccagcccgaccccttcattaatagaaactactctaatatgaaagttattccccctcaggatcccgcttcacccagctttaccctgttgtctaagctggagtgcagtggaaccgttagtgcttattgctcattaaacttgcccggctcgactgatccccccacctccgcatcgagagtagccgccaccaccgcaattagaaggaggcataaggagcggacatcattcactcatcagcagtatgaagagctggaagccctcttcagccagactatgttccccgatcgaaacctgcaggagaagctcgccctgaggttggacctgcctgaaagcactgtgaaggtgtggttcagaaaccgacgttttaagctgaaaaagcagcaacagcagcaaagcgccaagcagagaaaccagatcctgccttccaagaaaaacgttcccacaagccctcgaacatccccgtccccctacgccttcagtccggtaattagcgatttttacagctctcttccttctcagccgctggacccctccaattgggcctggaacagtacattcaccgagtctagtactagtgatttccagatgcaagacacacaatgggaacggctggtggctagcgttcccgcactgtattccgatgcctacgatatcttccaaatcatagaactgtataatctgcctgatgagaacgaaattagttcaagtagtttccattgtctttatcagtatttatctccaacaaagtatcaagtggggggccaggggtctagtctcagcatttttgccggtccagcggttggactctctccagcgcagacatggcctaatatgacgtctcaagccttcgaagcatattccttaactgattccctggaattccaaaaaacatctaatatggtggacttgggctttttatag

SEQ ID NO: 179414 - DNA, 4701 bp, synthetic construct
  misc_feature 1..4701: note = Description of Artificial Sequence: Synthetic coding sequence
  source 1..4701: mol_type = other DNA
atgaccgccgacaaggacaaggacaaggacaaggagaaggaccgggacagagacagggatagggagcgcgagaaaagagacaaagcgcgcgagtcagaaaactcccggccaaggcgctcctgtacactcgaaggaggcgccaagaattatgccgaaagcgaccattcagaagatgaagataacgacaataactccgcgacagctgaagaaagcacaaagaaaaataagaaaaagcccccgaagaagaaaagtcggtacgaacgcactgacaccggagaaattacttcttacattacagaggacgatgtcgtgtataggccaggagattgcgtctacatcgaatcacgacgccccaacactccatatttcatctgttctatccaggatttcaagttggttcacaactcccaggcctgctgtaggagccccacacctgcgttgtgtgatccaccagcgtgcagcctacccgtggcctctcagccgccccagcatctctccgaggccggaaggggcccagttggctccaagcgggaccacctgctcatgaatgtcaaatggtattacaggcagagcgaagtcccagattccgtctaccagcacctcgtgcaggacagacacaacgagaatgactctggtcgggagttagtgatcaccgaccccgtaattaagaaccgcgagctgtttatatctgactatgttgacacatatcatgccgcggccttgagaggtaaatgcaatatatcacactttagcgatatctttgccgcccgggagtttaaagcccgagttgatagcttcttctatatcctaggttacaatccggagacccgccggctaaattctacccaaggtgagattagggtgggccccagccaccaggccaaattgcccgaccttcagccttttccgagtcccgatggtgatacggtgacgcagcatgaagaactcgtgtggatgccgggggtcaatgactgcgacctgctcatgtatctcagggctgcaagatctatggcagccttcgccggcatgtgcgatggggggtccaccgaggacggatgtgttgctgccagcagggatgatactaccctcaatgctttaaacacgttgcatgagagcggatatgatgctgggaaagctctgcagcgactggtcaagaaacccgtgcccaaattgatagaaaagtgctggacggaggatgaagtgaagcgatttgttaaaggcttaagacaatatggtaagaacttttttcgtatcaggaaagagctacttcccaacaaggaaacaggagagctgattacgttttattactattggaaaaaaacccccgaggccgccagctctcgggcccacaggcggcaccggcgtcaggcggtgttccgtcgaatcaaaactaggacagctagtacccctgtcaataccccaagtcgcccccctagttctgaattcctcgacctcagtagtgccagcgaagatgattttgattctgaggattcagaacaggagctgaaagggtacgcatgcaggcactgttttacaacgacctccaaagattggcatcacggaggacgggagaacatcctcctgtgtactgactgcaggatccactttaaaaagtacggagaacttccacctattgaaaaacctgtggatcctccccccttcatgttcaagcctgtgaaggaggaagacgatggcctatctggtaaacacagcatgagaacacgcaggtccaggggatctatgtccacgttaaggagtggaagaaagaagcagccagcgtctcccgacggaagaacatcgccgatcaacgaggacatcagatcttccggacgcaattccccttcagcagcgtcaacatccagcaacgatagcaaggccgaaactgtgaagaaaagcgctaagaaggtgaaggaggaggcttccagcccactgaaaagcaataaaaggcaacgagagaaagttgcatctgacacggaggaggctgatagaacttcttccaaaaagactaaaacacaggagatcagtaggccaaactctcctagcgagggcgagggggaaagcagcgattcgcgtagcgtcaatgacgaggggagcagcgacccgaaggatattgaccaagacaaccggtctacctccccaagcattcctagcccccaggataatgagtctgactctgattcttctgcacaacagcagatgctccaagcccagcctcccgccctccaggcccccactggtgtcaccccggcaccatccagcgctccacccgggacacctcaactccctacccctgggccaaccccgtccgctacagccgtgcccccccaggggtcgcctactgccagtcaagcccccaatcagccccaggcaccaacagcaccagttcctcacacccacatccagcaggcaccagcgctccatccgcagcggccgccaagtccacatccgcctcctcatcctagccctcatcctccactgcagcccctgaccggctcagctggacagccttccgcaccctcccatgctcagcctccattgcacggccagggaccgcctggaccccatagtttgcaggccggcccgttgctgcagcacccgggacctcctcagcccttcgggttgcccccacaggcctctcaaggacaggcccctctcggcacctctcctgctgcggcctatccacacacatccctgcagctgccagcaagccagtccgcacttcagtcccagcagccccctcgcgagcagcctctccctcctgcccctctggcaatgccacacattaaaccgcctcctactacgcctatcccccagctgcctgccccacaggcgcacaaacatcccccccatctgtccgggccatctccctttagcatgaatgctaatcttcctccaccaccagctctcaaacccttatcatcactgagtactcatcaccccccttccgcgcaccccccccccttgcagctcatgccccagagtcagcccttgcccagctcacctgctcagccacctggattgacccaatcccaaaatctgcctcctccaccggctagtcacccgcctacaggcctgcaccaagtggccccccagcctccattcgctcagcacccatttgtgcccggtgggcccccgcctattacacctcccacctgccctagtacttcgactccgcctgccgggcccggcacttccgcacagccaccgtgttctggggcagccgcctctggagggtccatcgccggaggcagtagctgtcccctcccaaccgtgcagattaaagaagaagctttagacgacgcggaggagcccgaatcgccacccccgcccccccgttccccttctccagagcctactgtcgtggacacaccctctcatgcctctcagtctgctcgattttataagcatctggatcgtggatacaacagctgtgccagaacggacttatacttcatgccacttgctgggtctaagctggccaaaaagcgagaagaggcaatagaaaaagctaaacgggaagctgagcaaaaagctagagaggaaagggagagagaaaaggagaaggaaaaggagcgcgaaagggagagagaaagggagagagaagctgagagggctgccaaggcatcatccagcgcccacgaaggtaggctatctgatccccaactgtccggacctgggcatatgagaccatcattcgagccccccccgaccactatcgctgcggttccaccatatatcggtcccgatacaccggcgctgcggaccctgtccgaatatgcacggcctcacgtgatgtcccctaccaaccggaatcatccattctatatgcccctcaaccccacagacccgttgcttgcttaccatatgcctggcctgtataatgtcgacccaactattcgcgagagggaattgcgggagagggaaattcgcgaacgagagatcagggaacgggagctacgggagagaatgaagcctgggtttgaggtcaagccgcctgaactcgatccactgcaccctgcagccaatcccatggagcacttcgctaggcattctgccctaactatccctccaacggctggaccccaccctttcgcaagtttccatcctggattgaacccactcgaacgggaaaggctcgctctcgctggaccacagctgaggcccgaaatgagctacccagataggctggcagccgagcgtatccacgctgaacgcatggcaagtctgactagcgaccccttggcccgcctgcaaatgttcaacgtgaccccgcatcaccaccaacatagccacattcacagccacctccacttgcaccagcaggatcccttacatcagggcagtgctgggccggtccatcccctcgtggacccactgaccgcgggtccccacttggctcggtttccctaccctcccggcaccctgccaaatcccctgctcgggcagcctccacatgaacacgagatgctgaggcatcccgtatttggtactccataccccagagatctacctggcgcgataccccctcctatgtcggccgcacaccaactgcaggcaatgcacgctcagtcagcagagctgcagcggctcgcaatggagcagcagtggctgcatggccacccacacatgcatggaggccatctgccatcacaggaagactactactcaagactgaaaaaggaaggagataaacagctctag

SEQ ID NO: 179415 - DNA, 3897 bp, synthetic construct
  misc_feature 1..3897: note = Description of Artificial Sequence: Synthetic coding sequence
  source 1..3897: mol_type = other DNA
atggacgaccccttcagcccctgccggcggctgaacagcacccagggggagatccgggtcggcccttctcaccaggccaagctccctgacctgcagcccttcccctctccagatggggatactgtcacacagcatgaggagcttgtctggatgccgggcgtcaacgattgcgacctgttaatgtatttgcgcgctgcacggtccatggcagccttcgctggaatgtgtgacgggggcagcacagaagatggatgcgtggccgcaagcagagatgatacgactcttaacgccctgaatacgctccatgagtccgggtacgacgcaggcaaggcactacagaggcttgttaagaaacccgtgcctaaattgatagaaaaatgttggacagaagatgaggtgaagagattcgttaaagggttgcggcagtacggaaaaaacttcttccggattagaaaggagttacttcccaataaagagacaggcgagctaattacattttactattactggaaaaagactccggaggccgcctcatctagagcacatcggcggcacagaagacaagccgttttccgccgcataaaaactaggactgcatccacacccgtaaatacaccgtcaaggccgccgagtagcgaatttcttgacctgtccagtgcctcggaggacgactttgacagtgaggactccgaacaggagttgaagggatatgcctgtcgccactgctttacaaccacaagtaaagattggcatcacggcggcagggagaatattcttttgtgtactgactgccggatccactttaagaaatacggagaacttcccccaattgagaaacctgtcgacccgcccccgttcatgttcaaacccgttaaagaagaagacgacgggttaagcggcaagcattcaatgagaacccggaggagccgaggaagcatgtcaacactgcgcagcggcagaaagaagcagcccgctagccctgatgggaggacctcacccattaatgaagacatcagaagctcaggccgcaactctccaagtgctgctagtacctcatccaacgatagcaaggccgaaaccgttaagaagagtgctaaaaaggtgaaggaggaggcatccagtccactcaaaagcaacaaacggcaaagagagaaagtggcctccgataccgaagaggccgaccgcacgtctagcaaaaagacgaaaacgcaggagattagcaggcccaactctccatccgaaggggaaggagagagtagcgatagtaggtctgtgaacgatgaagggtcatcagatcctaaagatattgatcaggataaccgttccacctctccatctataccctctccacaggacaatgagtccgattctgactcgtctgcccaacagcagatgctgcaggctcagcctcccgcgctacaggcaccgaccggggtgacaccggccccctcttccgccccacctggtacaccccagctgccgactcctgggccaacccccagtgcaacagccgtcccaccccagggcagtcccaccgcttctcaggctcccaatcaacctcaagcacctacagcacccgtgccacatacgcatatccagcaagcccctgccctgcacccacagaggcctcccagcccgcacccccctccacacccttctccccacccccccctgcagccactaacaggttcagcaggccagccatccgcgccttcacatgcccagcctcctctccacgggcagggccctccggggcctcattccttacaagcaggtcctcttctgcagcaccctggaccaccacagcctttcggcctgcctccccaggcaagccaaggtcaggcaccactggggaccagccccgctgccgcttacccccatacctccctacaattgccggcttctcagtcagctttacagagccagcaacctccccgcgagcagcctttgccacctgcgccactcgcgatgccccacatcaagcctccacctacaactccaataccgcaactcccagcccctcaggcccataagcaccccccgcacctgtccggcccatcaccattctcgatgaacgctaacctgcccccccctccggccctaaagcccctctcctccctaagtacacatcatcccccctccgcccaccctccgccattgcaactgatgccccagtctcagcctttgccctcttcgcccgctcagccccctggcctaacccaaagccagaatctccctccgccacccgcctcccaccctccaactggcttgcatcaagtcgcaccgcagccacctttcgctcagcatccatttgtgcccggaggaccgcctcctataacacccccaacatgccccagcacgagcaccccccccgctggtcctgggacctcagcgcagccaccatgtagcggtgcagctgcctctggcggtagcattgctggcggcagttcatgtcccctgccaacggtccagataaaggaggaagcgctggacgacgctgaggaacctgaaagtcctccccccccacctcgatcaccgtctcctgagccaactgtggtggacacgccctcacatgcctcccaatccgcccgattttataaacacctggaccgtggatataatagttgtgcaagaacggatctttattttatgccactggctggcagtaaacttgccaaaaaacgtgaagaggccatagagaaagcaaaacgtgaagccgaacagaaggctcgggaagaaagagagcgagagaaagagaaggagaaggagagggagagagaacgagagagggagagggaagctgagcgggcagccaaagcctccagttcagcccacgaaggtaggctcagtgatcctcagctgagcgggccaggccacatgagaccttcctttgagccaccccccacaacgattgccgccgtgccaccatatatcggtcctgacacgcctgcgctgcgcacgctgtctgagtacgctcggccccatgtgatgagccctacaaaccggaatcacccattctatatgcctcttaacccaacggatccgctcctggcttaccatatgccaggtttatacaatgtggacccaactattagagagagagagctccgcgagcgcgagattcgagaacgtgagatacgagagagggagcttcgcgagcgcatgaaaccaggattcgaggtgaaaccccctgagttggaccctctccacccagccgctaaccccatggagcattttgctcgacactcggcacttacaattcccccgactgctgggcctcatccattcgccagtttccatccaggattgaacccccttgagcgcgagagactcgccctcgctggtccacagctgcgccctgaaatgagctatccagatagactagcagccgaacgcatccatgccgaacgcatggcctcgcttacatccgatcccctggctagactgcagatgtttaatgttaccccacatcatcaccagcactcacatatacacagccatctgcacctgcatcagcaagaccctcttcaccagggaagtgctgggccagttcacccgcttgtggatccccttaccgcgggccctcacctagctaggtttccatacccacccggaacactcccgaacccactgcttggacagcccccacatgaacacgaaatgctgcgacatccagtgtttggtactccatacccccgcgatctgccgggggctatccctcctccaatgtcggcagcacaccagttacaagctatgcatgctcaaagtgcagaactgcagcgtcttgccatggagcaacagtggctgcacggtcatccacacatgcacggaggtcaccttcccagccaggaagactattacagcagattgaagaaagaaggtgacaagcaattgtag

SEQ ID NO: 179416 - DNA, 4701 bp, synthetic construct
  misc_feature 1..4701: note = Description of Artificial Sequence: Synthetic coding sequence
  source 1..4701: mol_type = other DNA
atgaccgccgacaaggacaaggacaaggacaaggagaaggaccgggatagggatagagatcgggaacgggagaagagggacaaggcaagagagtcagagaattctaggccgaggcggagctgtacactcgaggggggggccaaaaattacgctgaaagcgaccactcggaggatgaagacaatgataataattcagctacagcggaggaatcaacaaaaaagaacaagaaaaagcctcccaaaaaaaagagccgctatgagaggacagacacaggagagattaccagctacataacggaggatgatgtggtgtacagaccaggcgattgtgtgtatatcgaatctcggcgccccaataccccctactttatatgttccatacaggattttaagcttgtgcataactcacaggcatgctgtcgcagtcctacgcctgcactgtgtgatcccccagcttgcagcctacctgttgcgtctcagccaccgcagcatttgtctgaagccggccgggggccagttggaagtaagagagatcatctcttaatgaacgtgaaatggtattaccgacaatcagaggttccggactccgtgtatcaacacctcgtgcaagaccggcataacgagaacgactccggacgagaacttgttattactgatccagtcattaaaaaccgggagctgtttatttctgattacgttgatacataccatgctgctgcactccggggaaagtgtaatatttctcactttagcgatattttcgcagccagagagtttaaagctcgggtggactcctttttctatatcctagggtataacccggaaacacgtcggttgaattctacacagggcgagatccgagtgggccctagtcaccaggccaagctgcccgatctgcagcctttcccatcccctgacggcgacactgttacccagcatgaagagctggtctggatgcctggggtgaacgattgcgacctgctgatgtacctgagagcggccagatccatggcagcgtttgccggaatgtgcgacggcggatccactgaagatggatgcgtcgccgcctccagggatgatacaaccctgaatgcgctgaacacgctgcacgaatccggctatgacgccggcaaagctcttcagcgactcgttaagaaacccgttcctaagctgatagagaaatgctggacagaagacgaagtgaaaagatttgttaaagggctgcgccagtatggtaagaacttttttagaattagaaaggaactgctgcccaacaaagaaactggcgaactgataacattttattactactggaagaaaactcccgaagctgctagttcgagggcccacaggcggcacagacggcaggctgtgttcaggagaatcaaaacccggactgcaagtacccccgtgaatacaccaagccggcctccctcatccgagttcttagacctaagctccgcgtctgaagacgactttgactccgaggactccgaacaagagctcaagggttacgcttgtcggcactgcttcacaacaacgtctaaagattggcatcacggagggagagaaaacattttgctgtgcacggactgcagaatccacttcaagaagtatggagaacttccccctatcgagaaacctgtggacccaccacctttcatgttcaagcccgtgaaagaggaggacgatgggttgtccgggaagcacagcatgagaacgcgtcgcagccgcggctcgatgtctactttgcggtccggaagaaagaagcagcccgctagccccgatggccggacttcaccaatcaatgaggatatcaggtcaagcggcagaaattctcctagcgctgcatcaacaagctccaacgattcaaaagctgagactgtaaagaagtctgctaaaaaggtcaaagaggaggccagttcacctcttaagagcaataagcggcagcgggagaaagtcgctagcgacaccgaggaggccgaccggacaagctctaagaaaactaagacgcaggagatttctagacccaactctcctagcgagggagaaggagaaagcagcgattcccgatccgtgaacgacgaaggttccagcgacccaaaagacattgaccaggacaaccgctccacctcgccctctatcccttcaccgcaagacaatgagtctgactctgattcatccgcccagcaacaaatgctccaggctcaacctcctgccctgcaagccccaacgggcgtgacacctgctccctcttcagctccacccggtaccccccaactgccgacaccggggccaacaccgtcagccaccgccgtccctccccaggggtcacctacagcatcacaggcaccgaaccaaccccaggcccctaccgctcccgttccacatactcacattcagcaggcacccgcccttcatcctcaacgcccaccgagtccgcatccccctccacacccctcacctcaccctccactgcagcctctcaccggatctgccggccagccttctgctccgtcgcatgctcagcctcctctgcacgggcaaggtcctcctgggccccacagcttacaggctggccccctcctgcaacaccctggcccccctcagccgttcggtctccctccacaggcttcccaagggcaggcgcctcttggtaccagccccgccgcagcctatcctcatacctcccttcagctgcctgcctctcagtcagcccttcagagtcaacagccccctcgggagcagccattgccccccgcgccattggccatgcctcatataaaaccaccacccactacccccatcccccaactgccagccccacaggctcacaaacaccccccacatctgagcggccctagcccttttagtatgaacgccaacctaccgcctcctcctgctctaaagcccctgagctccctttcaacccatcatcccccatcagctcaccctccgcctctgcaactgatgccccagagtcagcctcttccatcaagtcctgcccagccaccaggactgactcaatctcagaatcttccacctcctccagcatcccatcctcccactggcctgcaccaggtggcaccgcagcctcctttcgcacagcacccattcgtgccagggggtccccctcctattacaccccctacatgcccatccacttcgaccccccctgcaggacccggtacaagtgcccagccaccatgctcaggtgcagccgcctcaggcgggagcattgccggcggcagttcctgtcctcttccaacagtgcagatcaaagaagaagcactcgacgatgctgaggaacccgagtctccccctcctccccctcgctctcccagcccagagccaacagttgtcgatacgccgtcccatgctagccagtccgctaggttttacaagcaccttgatcgcgggtacaattcttgcgcacgcaccgatctctactttatgcccttggccgggagcaagctggctaagaaacgcgaggaagcgattgaaaaagcaaaaagagaggctgaacaaaaggcccgtgaggaacgcgaaagggagaaggagaaggagaaagagcgggaaagagagagagaaagggagcgggaagccgagcgcgccgctaaggcctcttcatctgcccatgagggccggctgtctgatccccagttaagcggcccgggccacatgcgcccctcttttgagccaccacctacaacaattgctgctgtgcctccctacatagggccagacacgcccgccctccggactctttctgagtacgctaggccccacgtaatgtctcctactaatcgcaaccaccctttttatatgcctctcaacccaactgatccgctccttgcgtaccacatgcccgggttatacaacgtggaccccaccatccgagaaagagagctgcgtgagcgggaaatccgggaacgcgagattagagaacgggaactgcgggagcgcatgaagcctggatttgaagtgaaaccgccagagctcgaccctctgcaccctgccgcgaaccccatggaacacttcgctagacattcagcactgactattccaccaaccgccgggccacatccctttgcctcctttcacccaggcttgaatccacttgaaagggagcgcctggctctggccggcccccagcttaggcctgagatgtcttaccccgaccgcttggcagctgagcgcattcatgcggaacggatggccagcctgacgagtgatcccctggctagactgcaaatgttcaatgtcacacctcaccaccaccagcacagtcatatccatagtcaccttcatcttcaccagcaagacccactgcaccaaggctctgcaggtccagtccaccctcttgtggatcccttgaccgctggccctcaccttgcaaggtttccataccctcccggcactctgccgaaccctctgctgggacaacctccgcatgagcacgagatgctgcgccatcccgtgttcgggaccccttaccctcgggacctgccaggggccatccctcccccaatgtctgccgctcaccagctgcaggcgatgcacgcacagtccgctgagctacagcggctggcaatggagcagcaatggctacatgggcatcctcatatgcatggcggacacctcccttcacaggaggattattactctaggttgaaaaaagagggcgacaaacagctctag

SEQ ID NO: 179417 - DNA, 3039 bp, synthetic construct
  misc_feature 1..3039: note = Description of Artificial Sequence: Synthetic coding sequence
  source 1..3039: mol_type = other DNA
atgttcaagcccgtgaaggaggaggacgacggcctgagcggcaagcactccatgcggacacggcgttcccggggatccatgagcactttaagaagcggacggaaaaagcagcccgcaagtccagacggcagaacgtctcccatcaacgaagacatacgatcttccggccggaactcaccctctgcagccagcacttccagcaacgattccaaggccgagaccgttaaaaaatctgccaagaaggtaaaggaggaggccagcagtccccttaagagcaataaacggcagagagagaaagtggcatctgacaccgaagaggccgatcggacctcctccaaaaagaccaaaacccaggagattagcaggcctaattctccctccgagggagaaggcgagtcttctgactcacgctccgtgaatgacgagggatcgtcggaccccaaggacatagatcaggataacaggagtaccagtcctagtatcccctcaccacaggataatgaatccgattcagattcatccgctcagcagcagatgcttcaggcccaacctccagcactgcaagctcctaccggggtgacacctgctccctcaagcgcccccccggggactccgcagttacccacaccaggccctacaccctccgcaaccgctgtaccacctcaaggttcacccactgccagtcaggctcctaaccaacctcaagcaccgacggcaccggtgccacacacccacatccagcaagcccccgcccttcatccccaacggcccccctcccctcatcctccccctcatccgtccccccatccccccctgcaacctctgactgggagcgcagggcagcctagcgctccgtcacatgcccagccacctctgcatggacagggtcccccaggtccccacagcctgcaggccggtcctctgctgcagcatcccggacccccccagccctttggactgccacctcaggcgagccaaggacaggcccccctcggtacttctcctgccgcagcctaccctcatacctcccttcagctgccagcttctcagagtgccttgcagtcgcagcagccgccacgcgaacagccgctcccccctgccccactcgccatgccccacatcaaaccaccgccaaccactccaatcccccagcttccagccccacaggcacataagcatcccccccatctgagcgggcctagtcccttttcaatgaacgctaacctgcctcccccgcccgcattgaaaccactctcatccctctccactcaccaccccccatcagcgcatccacccccgctgcaactgatgccccagtctcaacccctgccaagtagccctgcacagccacctgggctcacacaaagccaaaaccttccgcctcctccagcgagccacccccctaccggtctccaccaggtggctccacagcctcccttcgctcaacatcccttcgttcctgggggtcctcctccaatcactccacccacctgtccctctacctcaacacctcctgcagggcctggaacttcagcccaacctccctgctcaggagccgccgcttcaggcggctctattgccgggggatccagttgcccattgccaactgtgcaaattaaggaagaggcccttgacgatgcagaggaaccggaaagcccacccccgccacccagatctccaagcccagaacccaccgtggtggatacacccagccatgccagccaaagcgcccggttttacaagcatctggatcgtggctataatagttgcgcccggaccgatctttacttcatgccgctggctggcagtaaactggctaagaagcgggaggaggcgattgagaaagccaaacgagaggccgagcagaaggcaagagaagaacgggagcgcgaaaaggagaaggaaaaggaaagggagcgggagcgggagagagaacgcgaggcagagcgggcagcgaaagcctcatctagcgcccacgagggtcgtctgtctgacccacagctcagtggccctggacacatgaggccttccttcgaacctccaccaacaactatagcggcagtgccaccttacattggccctgatacccccgccctccggacactctccgagtatgcccggccccacgttatgtcaccaaccaaccgcaatcacccattttatatgcctttaaaccctaccgacccccttctggcctaccatatgcctggcttgtacaatgtagaccccaccatcagagaacgcgaactgcgggagcgggagatcagggaaagagaaatcagagaacgggagctgcgagagagaatgaagccgggatttgaagttaagcccccagagttggacccattgcatcccgccgccaacccaatggaacatttcgccagacattctgcactgactatcccacccaccgcgggtccgcaccctttcgcatctttccatcccggcctgaaccccctggagagagagcggctcgctcttgccggacctcagcttcgacccgagatgtcctaccctgaccgccttgccgccgaaaggattcatgccgagcgtatggcttccctcacctcagatccactggcaaggctccagatgtttaacgtgacccctcatcatcaccaacatagccacatccatagccacctgcaccttcaccagcaggatcctttgcaccagggctccgcaggccccgtgcaccccctggtcgatccactgaccgccggaccccacctggcgcggtttccgtatccccctggaacattgccgaatccattgctgggacaacccccacacgagcacgaaatgttgagacaccctgtgtttgggacgccttatccccgtgatctgcctggtgccattcctccgccgatgagtgctgcccaccagttgcaggctatgcatgcccagagcgccgagctgcagagactcgctatggaacagcagtggttacacggccatcctcacatgcacggaggacacctgccttcccaggaggattattatagtcgtctcaagaaggagggcgacaagcaactgtag

SEQ ID NO: 179418 - DNA, 1953 bp, synthetic construct
  misc_feature 1..1953: note = Description of Artificial Sequence: Synthetic coding sequence
  source 1..1953: mol_type = other DNA
atggccagcggcgagcacagccccggcagcggcgccgcccggcggcccctgcactccgcccaagcagtggatgtggcttccgcctcaaactttcgggccttcgagttgctccacctgcatttagatctcagagcagagtttgggccacccgggccaggcgccggctctcgaggcctgagtggaaccgcggtgctcgatctcaggtgcttagagcctgagggcgccgctgaacttcggctagatagccacccctgcttggaggtaaccgccgccgcactacggagagaacggcctggcagcgaagagccaccagccgagcccgtctcattttatacccaacctttcagccactatggccaggcactttgtgtgtcattcccacagccatgcagggccgctgagaggctgcaggtcctcctgacatatcgtgtgggtgagggacccggcgtctgctggttggctccagagcagacagccggaaagaagaagccatttgtctacacccagggtcaagccgttctcaaccgggccttcttcccttgcttcgacacccctgctgtcaagtacaagtattcagctctgatagaagtacctgatggcttcacagccgtgatgtccgcatctacatgggaaaagcgagggcccaataagttttttttccagatgtgtcaacccatcccttcttacctcatcgcacttgcaatcggcgatttggtgtcggccgaagttggccccaggtccagagtgtgggccgagccctgccttattgatgccgctaaagaggagtataacggagtcatagaagagttcctggccactggcgaaaagctcttcggaccttatgtgtggggccgatatgacttactatttatgcctccttcttttccctttggaggcatggaaaatccttgcttgaccttcgttaccccctgcctcttggctggtgaccgctccctcgccgacgtcattattcacgagattagtcactcgtggttcggcaatcttgtcactaacgctaattggggagagttttggctgaatgaaggcttcacaatgtacgctcagaggaggatatcgaccatcctgtttggggctgcctacacgtgcctcgaggcagccactggccgcgcactgctgcgacaacatatggacatcaccggggaagagaatccactcaataagctgcgcgtgaagattgagccgggcgttgatcctgatgacacttacaacgagactccctacgaaaaaggattctgttttgtcagttacttagcgcatctggtgggcgaccaggaccagtttgatagcttcctaaaagcttacgtacatgaatttaaatttaggagtatcctggccgatgactttttggatttctacctagaatacttccctgaactcaaaaaaaagcgggtggatatcatacccgggttcgagtttgacaggtggctgaacaccccaggatggccgccatacctgcctgacctgtcccccggcgattctctgatgaagcccgccgaggagctggcccagctgtgggctgctgaagagctggatatgaaagctattgaggcagtcgcgatcagcccttggaaaacataccagctggtttattttctcgacaaaattcttcagaaaagtcccttaccgcccggaaatgtgaagaaattgggtgacacgtatccatctataagcaatgcgcgtaatgcagaactgagactgcggtggggtcagatcgtgctgaaaaacgaccatcaggaggacttttggaaggtgaaagaatttttgcacaaccaggggaaacaaaaatacactctgcccctctatcacgcaatgatgggtggttctgaagtggctcaaacattggcgaaagagacttttgccagcacagccagtcagctgcactcaaatgtggtgaattacgtccagcagattgtcgctcccaagggctcatag

SEQ ID NO: 179419 - DNA, 1836 bp, synthetic construct
  misc_feature 1..1836: note = Description of Artificial Sequence: Synthetic coding sequence
  source 1..1836: mol_type = other DNA
atggccagcggcgagcacagccccggcagcggcgccgcccggcggccgctgcatagtgcacaggcagttgacgtggcatccgcttccaacttccgcgctttcgaactcttgcatctgcatctggacttacgcgcggagttcggacctcctggacccggcgctggcagccgcggtcttagcggcaccgcagtcctcgaccttcgctgcctggaacctgagggagcagccgagctgcgcttggacagtcatccctgccttgaagtgaccgccgctgcgctacgccgggagcggcctggatcagaagagccacccgcagagcccgtatcattttatactcagccctttagtcactacggccaggccctgtgcgtctcttttccccagccttgccgcgccgcagagagactgcaggtactcttgacttatagagtgggagaaggcccaggagtgtgctggctggctccagaacaaacagccggcaaaaagaagccgttcgtctacactcagggccaggccgtgctgaatcgcgccttcttcccatgtttcgatacccctgctgtgaaatacaaatatagcgcactcattgaggttcccgatggcttcactgccgtcatgagtgccagtacctgggaaaagcgagggccaaataagttcttttttcagatgtgtcagccgatcccgagttatctcatcgcgctggccattggggacctggtttctgccgaagttgggcctcgatatgatttgctttttatgcccccctcttttccatttgggggtatggagaatccctgtctcacattcgtgactccttgtctactggcaggagataggtctttggccgacgtgatcattcacgagattagccatagctggtttggcaacctggtaaccaacgccaactggggggaattctggctgaacgaaggctttaccatgtacgctcagcgtcgaatctctaccatacttttcggtgccgcatacacctgcttagaggctgccactggacgagccctgctgcgccaacacatggatatcactggcgaagagaacccgctcaacaaacttcgggtcaaaatcgagccaggcgttgaccctgacgacacctacaacgaaaccccgtatgagaaagggttttgttttgtgtcttacctggcacacctggtgggagatcaggatcagtttgatagtttccttaaggcatacgttcacgagtttaagttccggtcaatcctcgcggatgacttcttagatttctacctggaatatttccccgagctaaagaagaagcgggtggatataatccccgggttcgagtttgatagatggttaaatacccccggctggccaccctacttgcccgacctgagtccaggcgactctctgatgaagccggcagaggagctggcccagctctgggccgccgaggaactcgatatgaaagccatcgaagcagtggctattagcccctggaaaacctatcagctcgtgtattttctggacaaaatacttcagaagtctccactgcctcctggcaacgtcaagaagttgggcgacacatatccttctatttctaatgcccgcaacgctgagctgcggctgagatggggacagattgtactaaagaatgatcaccaggaggacttttggaaagtcaaagaatttcttcacaaccaaggaaagcagaaatacacacttcccctataccacgccatgatggggggcagcgaagtggcccaaaccctggccaaggagacgttcgcttccaccgcctcccaactccattctaacgttgtcaattacgtccaacagatcgttgctcccaaaggtagctag

SEQ ID NO: 179420 - DNA, 1035 bp, synthetic construct
  misc_feature 1..1035: note = Description of Artificial Sequence: Synthetic coding sequence
  source 1..1035: mol_type = other DNA
atgacctgctgcagctgcaccagcctgagcgccctgctggacttctgggctgaagtgtgttggctggctccagagcagactgctgggaaaaaaaagccatttgtgtatactcagggacaggcagtcctcaaccgagcattctttccatgcttcgacacgccagcagtgaaatacaagtacagcgcgctaatagaagtcccagatggctttaccgccgtgatgagtgcgtccacctgggagaaacggggacctaacaaatttttctttcagatgtgtcagcctattccatcgtatctgatagcgttggcaatcggagacctcgtaagtgccgaggttgggcctcgatcacgagtctgggcagagccatgtctgatagatgctgccaaagaagagtacaatggtgtgattgaagagttcttagccacaggtgagaagctgtttggtccatatgtgtggggcagatacgatcttttgtttatgcctcccagtttcccatttggtggcatggaaaacccgtgcctgacctttgtgacaccctgcctgttagcaggcgatagatcactggctgacgtgatcattcacgagatttcccacagttggttcgggaatttggttactaatgctaactggggcgagttctggcttaatgaaggcttcacaatgtatgcccagcggcgcatttctacaattctcttcggtgccgcatatacttgtcttgaagccgctacagggcgcgcactgctcagacagcacatggacattacgggggaagaaaaccccctgaataaactacgcgtgaagatcgagcctggagtggatcccgacgatacttacaacgaaacaccatatgaaaaggggttttgttttgtatcatatctcgcccacctggtaggagatcaggatcagttcgatagctttctcaaagcttatgttcacgagtttaagttccggtccatcttagcagacgactttttggatttttaccttgaatacttccccgaactgaaaaagaagagagtggatattataccatag

SEQ ID NO: 179421 - DNA, 507 bp, synthetic construct
  misc_feature 1..507: note = Description of Artificial Sequence: Synthetic coding sequence
  source 1..507: mol_type = other DNA
ctgatcgacgccgccaaggaggagtacaacggcgtgatcgaggagttcttggctactggcgagaaactgttcggaccatatgtctggggtaggtacgacttactctttatgcccccctcctttcctttcggagggatggaaaacccctgcctaaccttcgtgaccccttgcctcctcgcaggcgaccgcagtctggctgatgtaattatccacgagatcagccatagctggttcggcaacctggtgactaatgctaattggggagaattttggctgaacgagggcttcactatgtacgcccagcggcgaatcagcaccatactgtttggagttgacccagacgatacctacaatgagactccttatgaaaagggcttctgttttgtctcttatcttgctcatttggtgggcgaccaggaccagtttgactccttcctgaaagcctacgtacacgaattcaaatttcgctccattttggcggatgacttccttgacttttatctgtag

SEQ ID NO: 179422 - DNA, 1485 bp, synthetic construct
  misc_feature 1..1485: note = Description of Artificial Sequence: Synthetic coding sequence
  source 1..1485: mol_type = other DNA
atgagcgccacccggagcgcctacatggaggaggagggcgtgttccacttccatatggagcacccagtgccagcatatctggtcgctctggttgctggggacctcaaacccgcagacatcggccctagatcgagggtgtgggctgagccatgcttgctcccaaccgcaacatccaaactttcaggtgccgtggagcagtggttaagtgccgcagagcggctctatgggccctacatgtggggcagatacgacatcgtttttttgccgccgtccttccccatcgtggccatggagaacccttgtctgacttttatcatctcaagcattctggagtccgatgagttccttgtcatagatgttatccatgaggtggcacacagttggttcggaaacgctgtgactaatgcaacctgggaggagatgtggctgagcgaaggtctcgcaacctacgcacagcggcgtattacgacggagacatacggcgctgcattcacttgcttggagacagccttccgcctggatgctttgcatcggcagatgaaactactgggcgaggactcccctgtcagcaagttgcaagttaaactggagccaggagtcaatccgagccacttaatgaatctatttacatacgagaaaggctattgcttcgtgtactacctttctcaactttgcggagaccctcagcggttcgacgacttcctccgagcttatgtggagaaatataagtttacttcagtagtcgctcaggacctgctggacagctttttatccttctttccagaattaaaagaacagagtgtggactgccgtgctggactggagttcgagaggtggctaaatgctaccggccccccgctggcggagcctgacttaagtcagggcagcagtctgaccaggcctgtggaggccctgttccaattgtggacagccgaaccgcttgaccaggctgctgcctccgccagtgccattgatatctccaaatggcgaacattccaaacagctctctttttggaccggctgcttgacggtagcccactcccccaggaggtggtgatgagtctgagtaagtgttattccagcctgctcgatagcatgaatgctgagatccggattcgctggcttcaaattgttgtgaggaacgattattaccccgacttgcatcgcgtgcggcgctttctggagagccagatgagcagaatgtacactattccgctctatgaagacctgtgcacaggtgccttgaaatcctttgcattggaggtcttttaccagacccagggccgtttacaccccaacttgcgtcgcgctattcagcaaatactttcgcagggccttgggagttcaactgaaccggcgagcgagccaagcacggagctcgggaaggctgaggcagacaccgactctgatgcacaggccttgctgcttggcgacgaagcaccaagctctgctatttcattaagggacgttaatgtctccgcatag

SEQ ID NO: 179423 - DNA, 1236 bp, synthetic construct
  misc_feature 1..1236: note = Description of Artificial Sequence: Synthetic coding sequence
  source 1..1236: mol_type = other DNA
atggaggtgaacccccccaagcaggagcacctgctggccctgaaggtgatgcgcctcacgaagccaaccctcttcaccaatatacctgtcacatgcgaagagaaggaccttcctggcgatctcttcaatcagttgatgagagacgatccgtcaactgtgaatggtgctgaggttctcatgctgggggagatgctgaccctcccgcagaatttcggcaatatcttcctgggtgaaacctttagctcgtacataagtgtccacaacgatagcaaccaggtggtcaaagatattctcgtgaaggccgaccttcaaaccagctcccaaaggcttaacctgagcgccagcaatgctgccgttgcggagctgaagcccgattgctgtatagatgacgtcatacatcacgaggtcaaagagattggtacacatatccttgtgtgcgccgtgagctacacaactcaggctggcgagaagatgtacttcagaaagttcttcaaatttcaggtactgaaaccccttgatgttaagactaaattttacaacgctgagacggacgaagtgttcttagaggcccagatacagaatatgaccacctctccaatgtttatggagaaagtctccctggagccctccatcatgtataatgtgaccgaattgaactcagtgtctcaggcaggagagtgtgtatccaccttcggatcccgcgcctacttgcagcccatggatacgcggcagtatctgtattgtcttaagccgaagaacgaattcgcagaaaaggctgggatcatcaaaggcgttaccgtcattggaaagcttgacatagtgtggaagaccaacctaggggagcgggggaggctgcaaacctctcagctccaacggatggcacccggatatggcgacgtgaggctaagcttggaagccattcctgatacggtcaatttagaggaaccatttcacatcacctgcaagatcacaaactgctccgagcgcacaatggacctcgtattagagatgtgtaacacaaattcgatacactggtgcgggatttccggtcgccagcttggtaagctccatccatctagttcattatgtctcgcgctgaccctgctttcgtccgtgcagggtctgcaaagcatttcaggactccgcttaaccgacactttcctcaagcgtacttatgagtacgacgatattgctcaagtgtgcgtggtgtcctctgctatcaaggtagaaagctag

SEQ ID NO: 179424 - DNA, 1365 bp, synthetic construct
  misc_feature 1..1365: note = Description of Artificial Sequence: Synthetic coding sequence
  source 1..1365: mol_type = other DNA
atgcacgtgggccacctgcggagcaccatcatcggcgagagcatctctcgcctgttcgagtttgcaggctatgatgtgttgcggcttaaccatgtcggcgactggggaacccagtttggcatgctaatcgcccatctgcaggacaagttccctgattacttaacagtctcccctccaattggggacctgcaggtattctacaaggagtctaagaaacggttcgacacagaggaggagtttaaaaagagggcttaccagtgtgttgtgcttctgcaaggaaagaatcctgatattactaaggcatggaaactgatctgcgacgtttcacgtcaggaattgaataagatttacgatgccctcgatgtgagcctgattgagagaggggaatccttttaccaggatcgaatgaatgacatcgtgaaagagttcgaggacaggggctttgtccaggtggacgatgggaggaaaattgtctttgtacctggctgctctattcccctcaccatcgtaaagtccgacggagggtacacatatgacacatctgatctcgccgctatcaagcagcggctatttgaggagaaagctgacatgataatctatgtggttgacaacggccagtcagtacactttcagacaatctttgcagccgcccagatgattgggtggtatgacccaaaagtcacacgcgtatttcacgctggcttcggggtagtccttggtgaagataaaaagaaattcaagactaggagcggggagacagtgcgtctaatggatttgttgggtgagggccttaagcggagcatggacaagctaaaggagaaggagcgcgataaggtcctgaccgctgaagaactcaacgcggctcagacaagtgtcgcttatgggtgcatcaagtacgctgatttgtcacacaataggttgaatgattacattttctccttcgacaagatgctcgatgataggggtaataccgctgcctatctcctttatgcctttacccgaattcggagtatcgcacgactagccaatatagatgaggaaatgctgcaaaaagcagcaagggaaacaaaaatactgctagatcacgagaaagaatggaaactaggacggtgcatcctgaggtttccagaaatactgcagaaaatcctggatgacctgttcctgcacaccctctgtgattatatttatgaactggcaaccgccttcaccgagttctacgattcatgctactgtgtagagaaagatcgacaaaccgggaagattctgaaggtgaatatgtggagaatgttgttatgtgaggcagtcgccgccgtcatggcaaaggggttcgacatcctgggtattaagcctgtccagagaatgtag

SEQ ID NO: 179425 - DNA, 618 bp, synthetic construct
  misc_feature 1..618: note = Description of Artificial Sequence: Synthetic coding sequence
  source 1..618: mol_type = other DNA
ttccagagcgtggagagcagcacccggaagctggaccacatcaacatatgctcaagcaatttcccgaaaaggtctttcgccttggttactcaggccggtgtgcaatggcacaatctcgactccttgcagtccccacctcctggatttaagagatttccttgtttgtctctgcctagttcttgggactgccgtgaagtggccgacttccagttgtcagtcgatagcctgctggagaaggacaatgaccacagcaggccagatattcaggtgcaggccaagaggttggcagagaagctgcgatgcgatacggttgtatctgagatttcgaccggtcagagaacagtgaattttaagataaatcgcgaattgcttaccaaaacagtgttgcagcaagtcatagaggatggatcaaagtacggtctcaaatctgaactctttagcggattgccgcagaaaaagatcgtggtggaattttcgtcacctaacgtggctaaaaagttccatgtcggccatcttcgttctacaatcatcgggaatttcattgccaatctgaaggaggccctcggacaccaggtaatccgcatcaactatttaggggattggggtatgcagttttag

SEQ ID NO: 179426 - DNA, 1737 bp, synthetic construct
  misc_feature 1..1737: note = Description of Artificial Sequence: Synthetic coding sequence
  source 1..1737: mol_type = other DNA
atggcctgcggcttccggcgggccatcgcctgccagctgagccgggttttaaatctacctccagagaacctcattacaagcattagcgccgtacccattagtcagaaagaggaagtggcggattttcagttatcagtggatagcttgctcgagaaggataacgaccatagcagacctgatatacaagttcaggccaagaggctggcggagaagcttcggtgcgacacggtggtatccgagatcagtacaggacaacgcactgtcaactttaaaattaaccgagaactgctgactaagacagtgctgcaacaagtaatcgaggatgggagcaagtatggcctaaagagtgaacttttcagcggcctgccgcagaagaaaattgttgtggagttcagcagtccgaacgtcgccaagaaattccacgtcggacatctgaggtccaccatcataggaaatttcatcgctaacctgaaagaggccttgggtcatcaagtgatacggattaactatctcggcgactggggcatgcaatttggccttttgggaactggcttccaactttttggatacgaggagaaactccagtccaaccccctccagcatctctttgaagtgtacgtgcaggtgaataaggaggccgcggatgacaaatccgtcgctaaagccgcccaggaatttttccagaggctggagctcggcgacgtacaggccttgagcctttggcagaaatttagggatcttagcattgaggagtacatcagggtctataaaagactcggagtgtactttgacgagtattcaggggagagcttttatagagagaaatcccaagaagtcctgaagctactggagagtaagggcctgctactaaaaaccatcaagggaacggccgtggtagacctgtcaggcaatggggacccatcaagcatatgtaccgtcatgaggagtgatggaacttctttgtacgcgaccagagatctagcggccgcaattgatcggatggataagtataacttcgacactatgatctacgtcactgataaggggcaaaaaaagcatttccagcaggttttccagatgctgaagataatgggctatgactgggcggagcgatgtcagcatgtgcccttcggagtcgtccaggggatgaagactaggcggggtgatgttacctttttagaagatgtgttgaacgaaatccaacttcggatgctacagaacatggcttccattaaaacaaccaaagaactgaaaaatccacaagaaacagcagaacgggtcggcttggctgcgttgatcatccaggattttaaggggctgctgttgagtgactacaaattctcatgggatcgcgtcttccagtcccgaggcgatacaggcgttttcctacagtatacacatgcccgcttgcatagtctggaggagaccttcgggtgtggatacttgaatgatttcaacaccgcgtgcctccaggaaccacagtctgtatctatcctgcaacacctcctgagatttgacgaggtcctctacaagtcatcccaggactttcagcccaggcatatcgtgtcctacttgttaaccctgagccacctcgcagcagttgcacacaaaaccctgcagatcaaagactccccccctgaggtggccggcgcaaggcttcatctgtttaaggccgtgagaagcgttctcgcgaatggaatgaagctactgggcattacgccagtgtgtcggatgtag

SEQ ID NO: 179427 - DNA, 621 bp, synthetic construct
  misc_feature 1..621: note = Description of Artificial Sequence: Synthetic coding sequence
  source 1..621: mol_type = other DNA
tgattccagagcgtggagagcagcacccggaagctggaccacatcaatatctgcagctccaatttccctaagcgatccttcgcactggtaacacaagccggcgtccagtggcataacctggatagcctgcaatctccccccccaggtttcaaacggttcccgtgcctgtcactcccttcctcctgggattgccgtgaggtcgccgacttccagctgagtgtagatagcctgctcgagaaagacaacgatcattcccgaccagatatccaggtgcaagccaaacgcctggccgagaaactgagatgcgacacagtagtttctgaaataagcacggggcagcgaacagtgaactttaagattaacagggagctcttgaccaaaactgtgttacagcaggtgatcgaggatggatctaagtatggccttaaaagtgagctgttttctggacttcctcagaaaaaaatcgtcgtggaattcagcagtcccaacgtggcgaagaagttccacgtcggccacttgaggtccacaattattggaaacttcatcgccaacttaaaggaagcactcggtcaccaagtgattaggatcaactaccttggagactgggggatgcaattttag

SEQ ID NO: 179428 - DNA, 1482 bp, synthetic construct
  misc_feature 1..1482: note = Description of Artificial Sequence: Synthetic coding sequence
  source 1..1482: mol_type = other DNA
atgagcgtggacatgaacagccagggcagcgacagcaacgaggaggactatgatccaaattgtgaagaagaggaggaggaagaagaggacgatccaggcgatatcgaggattactatgttggtgtggcaagtgacgtagaacagcagggagccgacgctttcgatcccgaggagtaccagttcacatgcctaacctacaaagagtccgagggggcgctgaatgagcatatgacctctctcgccagcgtgttgaaggtctcgcattccgtggccaagctgattctcgtgaattttcactggcaggtcagcgaaatcctcgatcggtacaaatcaaactccgcacagcttctggtggaggccagagtgcagcctaatccctccaaacatgtgcctacaagccaccctccccaccactgcgccgtgtgtatgcagtttgtgaggaaggagaatcttctgtcgttagcatgccagcaccaattttgccggtcatgttgggagcaacactgctccgtccttgtgaaggacggcgttggtgttggcgtttcatgcatggctcaagactgtccactgcggactccagaggacttcgtgtttcctctgctgccaaacgaggagttgagagagaagtataggcggtacctttttagagattatgtcgagtctcattaccagctacaactgtgtcctggtgccgattgcccgatggtgattagggtgcaggaacctcgggcccgtagggtgcagtgcaaccggtgtaacgaggtgttttgttttaagtgcaggcaaatgtatcatgctcctactgattgtgccaccattcggaagtggctcacaaagtgtgccgacgacagcgagactgcaaactacatcagtgcccataccaaggattgtcccaagtgtaatatctgcatcgaaaagaatggagggtgcaaccacatgcagtgctccaagtgtaagcacgatttctgttggatgtgtctcggcgattggaaaactcacggaagcgagtactacgagtgtagcagatataaggagaatccagatattgtgaatcaatctcagcaggcacaggctcgggaagctctgaaaaagtaccttttttacttcgaacgctgggaaaaccacaacaagagcctccagctggaggcccagacctaccagaggatacatgagaaaatccaggaacgcgtcatgaacaatttaggaacgtggattgactggcagtatctgcagaacgccgctaagctgctggcgaaatgtagatacaccctgcaatatacatatccctacgcatactacatggagtccggcccgcgaaaaaaactcttcgaatatcagcaggcacaattagaagccgaaatcgaaaatctttcgtggaaagttgaaagagccgactcctacgatagaggcgatctggagaatcagatgcatatcgccgaacagcgaagacgcactctgctaaaggacttccatgatacctag

SEQ ID NO: 179429 - DNA, 954 bp, synthetic construct
  misc_feature 1..954: note = Description of Artificial Sequence: Synthetic coding sequence
  source 1..954: mol_type = other DNA
ggcatcaccggcgtgagctgcatggcccaggactgccccctgcggacacctgaggactttgtgtttccgctgttgcccaatgaggagttgcgggaaaagtaccgccgatacctgttccgggactacgtggaatctcattaccagctgcagttgtgtccgggggccgattgccccatggttattcgtgtgcaggaacccagggcccggcgggtccagtgtaacagatgcaatgaagtgttttgttttaagtgccggcaaatgtaccacgcccctacggactgcgccactatcaggaagtggctgaccaagtgtgccgacgactccgagaccgccaactatatctctgctcacacaaaggattgtccgaagtgcaacatctgcatcgagaaaaacgggggttgtaatcatatgcagtgctccaagtgcaagcacgatttctgttggatgtgtcttggggactggaaaacccatggttccgaatattacgagtgcagccgctataaagagaatcctgacatcgtgaatcaaagtcagcaagcccaggcccgagaggcccttaagaagtatctgttctacttcgaaaggtgggaaaaccataacaagagcctccagttagaagcccagacctaccagagaatccacgaaaagattcaggagcgagtcatgaataaccttggtacatggatcgactggcaatacctgcaaaatgccgctaaactcctcgccaaatgtagatataccctgcagtacacgtacccctatgcctactacatggagtcgggcccccgcaaaaaactgtttgagtatcagcaggcccagctggaggctgaaatcgagaacctgtcgtggaaggtcgaaagggcagactcatacgacagaggagacttggagaatcaaatgcacatcgctgaacaaagaagaaggactctcctgaaagacttccatgatacctag

SEQ ID NO: 179430 - DNA, 1233 bp, synthetic construct
  misc_feature 1..1233: note = Description of Artificial Sequence: Synthetic coding sequence
  source 1..1233: mol_type = other DNA
agcgtggacatgaacagccagggcagcgacagcaacgaggaggactacgacccaaactgcgaagaagaggaggaagaggaagaggatgacccgggagacatcgaggactattacgttggagtggcctctgacgtcgagcagcagggggccgacgctttcgatcctgaggagtaccaatttacttgcctcacttacaaggagtcagaaggcgcccttaacgaacatatgacctccctggcatccgttctcaaagtaagccactcagtcgctaagctgatcctcgtgaattttcactggcaggtgtcagaaatcttggatcgatataaatctaattcggcccagctgcttgtggaggcccgcgttcagcccaacccttcaaagcacgtgcctacttcccacccacctcatcactgtgccgtttgtatgcagttcgttcggaaagaaaacttgctatctctcgcgtgccagcaccaattttgcagatcgtgttgggaacagcattgctccgtgctcgtaaaggatggtgtcggcgtcggggtgtcctgtatggctcaggattgtccactcagaactccagaagactttgtattcccgctacttccaaatgaagaactgcgcgagaagtaccgcagatacctgttccgagattacgtcgagagtcattaccagctgcagctgtgtcccggagctgattgccctatggtcatccgtgtgcaggaaccaagagctaggagagttcagtgcaatcgttgtaacgaggtcttttgttttaaatgcagacagatgtatcacgcccccacggactgtgctacaatcaggaaatggcttaccaagtgcgcggatgatagcgaaaccgccaactacattagcgcacataccaaagattgtcctaaatgtaacatatgcattgaaaagaatggggggtgtaaccacatgcagtgttctaaatgcaaacacgatttctgctggatgtgtctgggggactggaaaacacatggatcagagtattacgaatgctcacggtacaaggaaaaccctgatatagtgaatcagtctcaacaagcccaagctagagaagccctgaaaaaatatttattttatttcgaaagactcgaaaacctgagctggaaggtggaaagggccgacagctatgatcgtggggatcttgaaaatcagatgcacattgccgagcagcgccgcagaacactgctgaaggacttccacgacacatag

SEQ ID NO: 179431 - DNA, 1482 bp, synthetic construct
  misc_feature 1..1482: note = Description of Artificial Sequence: Synthetic coding sequence
  source 1..1482: mol_type = other DNA
atgagcgtggacatgaacagccagggcagcgacagcaacgaggaggattatgaccccaattgcgaggaagaggaggaagaggaagaagatgaccccggagatatcgaggattactacgtgggggtggcgagcgatgtggaacagcagggagcggacgccttcgacccggaggaatatcagttcacatgtctcacctacaaggagtccgaaggagcccttaatgagcacatgacgtccctggcctctgttcttaaggtgagccactctgtggctaaattgattttggtgaattttcactggcaggtgtcagagattttagaccgatacaagtccaacagcgcccaactgcttgtggaggcccgtgtgcagcccaatccctcaaaacatgtgcccacttcacacccaccacaccattgtgctgtgtgcatgcagtttgttaggaaagagaacctgctcagcctcgcctgtcagcaccagttttgtcggtcatgctgggagcagcactgtagcgttttagtgaaagacggggtgggcgtgggcgtcagttgcatggcccaggattgccctctcagaacccccgaagactttgtttttccgcttctgcctaacgaggagctacgagagaagtaccgcaggtacctgtttagggattacgtggaatctcattaccagctacagctgtgccctggggcagactgccccatggtaatccgcgttcaggaaccaagagctcgtcgggttcagtgcaaccgatgtaacgaggtattctgctttaagtgtcgccaaatgtaccacgcccccacggattgtgccacaatccgtaagtggttaacaaaatgcgcagatgatagcgagaccgcaaattatatttctgcccacacaaaagattgccccaagtgcaacatctgcattgagaaaaatggtgggtgcaaccacatgcagtgcagtaaatgcaaacatgacttttgctggatgtgtctgggagattggaagactcacggatccgagtattatgagtgttcaagatataaggagaatccagatatagtaaaccagagccagcaggcccaggctcgcgaggcccttaaaaagtatctgttttacttcgagaggtgggaaaatcacaacaaaagtttgcagctggaggctcaaacctaccagcgtattcacgagaaaatccaggagcgtgtgatgaacaacctggggacttggatcgactggcagtatctccagaacgcagcaaagctgttggccaagtgcaggtataccctacagtacacgtatccttatgcttactatatggagtcagggccccgcaagaagctgttcgagtatcagcaggcacagttagaggctgagatcgagaacctctcctggaaagtggaaagggccgactcttatgatagaggagatctagaaaatcagatgcatatcgccgagcagaggaggagaacacttttgaaggattttcatgacacatag

SEQ ID NO: 179432 - DNA, 1584 bp, synthetic construct
  misc_feature 1..1584: note = Description of Artificial Sequence: Synthetic coding sequence
  source 1..1584: mol_type = other DNA
ctgcggcgggccgccagcggccccctggcccccagcctgccccccccaagacccccgagaaggcaccagccttctaacgccaaccgccgcagttggggaggtgcagcggcccggggcgccggagcacgccccgcgtccggacaccagccggagcccgagcgagagccgggaccgaggcgtcccaggcccctccctgcttcagctagcgttcgaagagcacccgctaggcgggcgatggattctgacgaggggtataactacgaattcgttaacgaggtcatccaaaacccagccaccatcacccgcatcctgctgtctcactttaattgggataaggagaagctcatggaacgatacttcgatgggaacctcgaaaagttgttcgctgagtgtcatgtgattaacccaagcaagaaaagtaggactcggcagatgaatactcggtcctcagcccaggatatgccatgccagatctgttacctcaactaccctaattcctacttcaccgggctagaatgcggccacaaattttgcatgcagtgctggtctgaataccttacaaccaagattatggaagagggtatggggcagacaatttcatgcccggcacacggctgcgatattctggttgacgataatacagtcatgagattaattacagactctaaggtgaaactaaagtatcagcatcttatcacaaactccttcgttgagtgcaatcgcttactcaagtggtgtccagctccagattgccaccacgtggttaaggttcagtatccagacgctaagcctgtacggtgtaagtgcggacggcaattctgcttcaactgtggcgaaaattggcacgacccagtcaaatgcaagtggttgaagaagtggataaagaagtgcgatgacgactcggaaaccagcaattggatagccgccaacactaaagagtgtcctaagtgtcacgtgactattgagaaagatggaggctgcaaccatatggtgtgcaggaaccagaactgtaaggccgagttttgctgggtgtgcttgggcccctgggagccgcatggatcagcctggtataattgtaatcgttacaacgaggatgatgcgaaggccgcccgtgacgcccaggagcgcagtagagccgcccttcagaggtacttgttctattgcaaccgatatatgaaccatatgcagtctctgcggtttgagcacaaactttacgcccaggtaaagcagaaaatggaggagatgcaacagcataacatgagctggatagaagtgcagttccttaagaaggctgtggatgtgctgtgtcagtgccgcgctacgctaatgtacacctatgtgttcgctttttatctgaagaagaacaaccagagtataatattcgaaaataaccaagccgacttagagaacgcgaccgaggtcctgtccggttacctcgaacgagacattagccaggactccctccaggatattaagcagaaagtacaggacaaatatcgctactgcgaaagtagacggcgggtgctgcttcagcacgtgcacgagggttacgaaaaggacttgtgggagtatatcgaagactag

SEQ ID NO: 179433 - DNA, 1674 bp, synthetic construct
  misc_feature 1..1674: note = Description of Artificial Sequence: Synthetic coding sequence
  source 1..1674: mol_type = other DNA
atggacagcgacgagggctacaactacgagttcgacgaggacgaggagtgttccgaggaggactctggcgctgaggaagaggaagatgaagatgacgacgagccggacgacgacacactggatctgggagaggtcgaactggtcgagcccggcctgggcgtgggtggcgaaagagacggacttctgtgtggcgagactggcgggggtggaggctccgcattgggacctggcggagggggcggcgggggcggcggcggaggagggggaggacccggccacgagcaagaggaggactataggtacgaagtgctgaccgccgagcagattttacagcacatggtagaatgcattagggaggtaaacgaagtgatccagaacccggctacaatcactagaattctgcttagccactttaattgggataaggaaaagttaatggaaaggtacttcgatgggaatttggagaaactatttgccgaatgtcacgttataaatccttccaaaaagagcagaacaaggcagatgaacacgcggtcttctgcccaggatatgccatgccagatttgctacctgaactaccccaacagttacttcaccggactggaatgtggacacaaattttgcatgcagtgctggtccgagtacctcacaactaagatcatggaagaaggtatggggcagactatctcgtgcccagcccacggctgcgacatccttgtggacgataataccgtcatgcggctaattacggatagcaaggtgaaacttaaataccagcaccttatcactaattcatttgtggagtgcaaccgactgttaaaatggtgcccagcaccggactgtcaccacgtagttaaagttcagtatcccgacgccaaacctgttcgctgcaaatgtggccggcaattttgtttcaactgcggcgagaattggcatgacccagtcaagtgcaaatggctcaagaaatggattaagaagtgcgacgatgactctgaaacatctaattggatcgccgcaaatacaaaggaatgccctaagtgtcacgtaacaattgagaaagacggcggttgtaaccacatggtgtgccgtaatcagaactgtaaagccgagttttgctgggtgtgtctaggaccttgggaaccccacggatccgcatggtacaactgtaaccgttataatgaggacgacgctaaagccgcacgagacgcacaggagcgtagcagagccgctctccagaggtacttattttactgtaaccggtacatgaaccatatgcagagcttacggttcgagcacaagctttatgcccaggtaaagcagaagatggaggagatgcagcagcacaacatgtcatggatcgaggtgcagttcctgaagaaggccgttgatgtgctctgtcagtgccgcgcgacgctgatgtacacttacgtgtttgctttttatcttaaaaagaacaatcagtcaatcattttcgaaaataaccaggccgatctcgagaatgctacagaggttctgtccgggtacctggaaagggatatttctcaggatagcctgcaggacatcaagcagaaagttcaggacaagtacagatactgcgagtcgcgccgccgagtcctgctgcagcatgttcacgagggctatgagaaagatctatgggagtatattgaggactag

SEQ ID NO: 179434 - DNA, 1689 bp, synthetic construct
  misc_feature 1..1689: note = Description of Artificial Sequence: Synthetic coding sequence
  source 1..1689: mol_type = other DNA
atgagcaaccagtaccaggaggagggctgcagcgagcggcccgagtgcaagagtaaaagcccaaccttgctgagctcatactgcatagactccatactgggaagaaggtccccgtgcaaaatgcgactgctcggagcggcccagtccctgccagcgccgctgacttctcgtgctgatccagaaaaggctgtccagggttccccgaagtccagttccgccccctttgaagcagagctccacttgcctcctaagctgcgacggctttatggccctggagggggcagacttttacagggtgctgcagctgctgcagccgctgccgctgccgctgcagctgccgccgcaaccgccactgcaggtcccagaggcgaagctccccctccccctcccccaaccgctcgccccggcgagcgaccggacggagccggggccgccgcggctgctgctgccgctgcagccgccgcctgggatacgctgaaaatctcccaggctccccaagtctccatctcacggtccaagtcatatcgcgagaacggggccccattcgtgcctccacccccagcgctggatgagcttggcggccccggtggggtgacacatccagaagaaaggctgggtgtggccggtggaccgggctcagcccctgccgcaggcggcggtacaggaaccgaagatgacgaagaggagctgcttgaggatgaagaagacgaggatgaagaggaggaactgctggaggacgatgaagaggagctgcttgaggatgacgctcgagccttattgaaagagccccggcgctgccctgttgctgccaccggtgccgtcgcagcagccgcagcggcagccgtggccacggaggggggtgaattgtcccccaaggaggagttgcttttacatccagaagacgcggagggaaaggatggcgaggattccgtctgcctcagcgcgggctctgatagtgaagaaggtctgctaaaacgcaagcaaagacgctacagaacaacattcacatcataccaattggaagagttggaaagggcgttccaaaagacacattatcccgatgtcttcactcgcgaagaattggccatgcgtctggatttgactgaggccagagtgcaagtgtggtttcagaaccgacgtgcaaaatggaggaagagagaaaaggctggcgcccagactcaccccccaggcctgcccttccccggtcctctctccgcaacacaccctctttccccatacttggatgcctcccccttcccgccccaccatcccgcattagattctgcgtggactgctgctgccgccgctgccgctgctgcattcccttcccttcccccacccccaggcagcgcaagccttcctccttcgggggccccactgggactgagtacgttcctgggcgccgcagtgttccgtcaccccgcatttatatcgccagcattcgggcggctgttttcaactatggccccactaacctcagcttcaactgcagcagcgctcttaaggcaaccgacaccagccgtcgagggggctgtggcgtccggtgcactggcagatccagcgacagcggcagcagacagacgcgcctcctccatcgctgctctccggctgaaggccaaagaacacgcagctcagctgactcaactcaacattctgccagggaccagtactggcaaggaggtgtgttag

SEQ ID NO: 179435 - DNA, 1032 bp, synthetic construct
  misc_feature 1..1032: note = Description of Artificial Sequence: Synthetic coding sequence
  source 1..1032: mol_type = other DNA
atgggcggcccccggggcgccggctgggtggccgccggcctgctgttaggggccggagcgtgctactgcatatatagactgacgcgaggacggaggcgtggtgacagggaattaggaattagaagcagcaaatctgctggagccctggaggagggcacaagcgagggtcagctgtgcgggagatccgcacgacctcagaccgggggaacctgggagagccagtggtcgaagacatcccagccggaggacctaacggatggcagctacgacgacgtgttaaacgcagagcagctgcagaagctcctttacctacttgaatccacggaagacccggtgatcattgaacgcgccctgataacccttggtaacaatgctgcttttagtgtcaatcaggcaatcatcagggagttgggtggaataccaatcgttgcaaataagattaaccatagcaaccaaagtatcaaggagaaagctctgaacgccctcaacaatcttagcgtgaatgttgaaaaccaaataaaaattaagatttacataagccaggtttgtgaagacgtgtttagcggtccgctgaactccgcggtgcaactcgcaggcttgaccctgcttaccaacatgactgttaccaatgatcaccaacacatgctgcactcctacatcaccgatttgtttcaggtacttctgactgggaacggtaatacgaaggtgcaagttctgaagctgctgttgaacctcagtgaaaatcccgccatgacagaaggcctgctgcgggcccaggtggattccagctttctgagtttatatgacagccatgttgctaaggaaatcctgctgcgagtgctgaccctatttcaaaatattaagaattgcctgaaaattgaaggacacttggctgtgcagccgacattcactgaaggatcattgttcttcctgctgcacggtgaagaatgcgcccagaagataagggccctggtggatcaccacgacgcagaggtcaaggagaaagtggttaccataataccgaagatctag

SEQ ID NO: 179436 - DNA, 855 bp, synthetic construct
  misc_feature 1..855: note = Description of Artificial Sequence: Synthetic coding sequence
  source 1..855: mol_type = other DNA
atgggcggcccccggggcgccggctgggtggccgccggcctgctgttgggcgccggcgcctgttactgtatttaccgtctaactcgcgggcgccgccggggggacagggaactcggcatccgctcttctaagtctgccgaggacctcacagatggttcatacgatgacgtgttaaacgctgagcaactccagaagctgctctatctgctggaatcaacagaggatccagtgatcatcgagcgagcacttattaccctggggaataatgctgccttttcagttaaccaggcgatcatccgagagttaggaggcatacctatcgtggccaataaaattaaccatagtaaccagtccattaaagaaaaggctctaaacgcattgaataatctgtctgtcaacgtggaaaaccagataaagattaagatctatatatcccaggtgtgcgaggatgtcttttcaggtcctctcaatagcgcggtacagctggcagggctgactctactcacgaacatgactgtcactaatgaccatcagcacatgcttcattcttacatcaccgacctgttccaggtgcttctgacgggcaacggaaacaccaaagtggactcttccttcttgtccctgtatgatagtcatgtagccaaagagatcttgcttagagtactaacattatttcagaatataaaaaactgccttaagatagaggggcatctggcggtgcagcctacgtttacagaaggcagccttttctttttgctgcatggtgaagagtgtgcccagaaaatccgcgcgctggtcgaccatcatgatgccgaagtcaaggagaaggttgtgaccattattcctaagatttag

SEQ ID NO: 179437 - DNA, 855 bp, synthetic construct
  misc_feature 1..855: note = Description of Artificial Sequence: Synthetic coding sequence
  source 1..855: mol_type = other DNA
atgggcggcccccggggcgccggctgggtggccgccggcctgctgcttggcgctggcgcttgttattgcatctaccgtcttacaaggggcagaaggcggggcgaccgggagctgggcattcggtcctcgaagagcgctggtgctctggaagaaggtacatcagagggtcagctttgcgggcgctcagctaggcctcagactggcggaacatgggagtcacagtggagcaaaaccagtcagccagaggacctgaccgacggttcttatgatgatgttctgaatgcagaacagctgcaaaagttgctttacctgctggagtccaccgaagatccagttatcatcgaacgtgctttaataacactcggtaacaatgcagctttttccgtgaatcaggctattattcgcgagcttggaggcattcccattgttgccaacaagatcaaccattccaatcagtcgattaaagaaaaggcactcaacgctcttaacaatctatctgtcaacgtggaaaatcagattaagattaaggtgcaggtgttaaaactcctattgaacctgtctgagaacccagcgatgactgagggtctcctgagggcacaggttgattcctccttcctcagtctgtacgattctcacgtagctaaggagattctccttagggtgctgaccttgttccaaaacattaagaattgcctcaagattgaagggcacttggccgttcagccaacattcacagagggcagcctgttctttctcttacacggagaagaatgtgcccagaagatccgagctctggtggaccaccatgacgctgaagtaaaagagaaggtggtgaccatcattccaaagatttag

SEQ ID NO: 179438 - DNA, 927 bp, synthetic construct
  misc_feature 1..927: note = Description of Artificial Sequence: Synthetic coding sequence
  source 1..927: mol_type = other DNA
atgggcggcccccggggcgccggctgggtggccgccggcctgctgcttggcgccggagcctgctattgtatctatagattgactagggggcggagaagaggcgatagagagctggggatcagaagttccaaatccgcagaggacttaactgacggctcctacgatgacgtgctgaacgctgaacagctccaaaagcttctgtatctgttggagtcgacagaggaccctgtgatcatcgaaagggctttgatcactctgggcaacaatgccgccttcagtgttaatcaggccattattagagagctcggaggcatccccattgtggctaacaagatcaatcactccaaccagtctatcaaggaaaaagccctcaatgcactgaataacctgtctgtcaatgtagagaatcagattaaaatcaaaatttatatctcccaagtgtgcgaggacgtattctctggcccactgaattccgccgtacagttagctgggttaacgctgctcactaatatgacagtcacaaacgatcatcaacatatgctgcactcctacataacggacctatttcaggtgctgctcaccggaaatggcaacactaaggtccaagtcttgaagctactgctgaatttgtcggaaaatcctgcaatgaccgaaggcctgttacgggctcaagttgactctagctttcttagcctgtacgactcccacgttgctaaggagatacttctacgggtcctgaccctgtttcagaatataaaaaattgtttgaaaatcgagggccacttggcggtgcaacccaccttcacagagggcagtctgttcttccttctgcacggcgaggaatgtgctcaaaaaatcagagctttagtggaccaccacgacgcagaggtcaaggaaaaagtcgtcactatcatccccaaaatctag

SEQ ID NO: 179439 - DNA, 750 bp, synthetic construct
  misc_feature 1..750: note = Description of Artificial Sequence: Synthetic coding sequence
  source 1..750: mol_type = other DNA
atgggcggcccccggggcgccggctgggtggccgccggcctgctgctgggcgctggcgcatgttattgcatttacagactaaccagaggtaggaggcgcggggaccgtgagttaggcattcgctcttctaaatccgctgaggacttaactgatggttcttacgacgacgtgctgaacgcagagcaattacagaagcttctctatctcctggagagtaccgaggatccagtcatcattgagagagccctgatcacccttggcaacaacgctgcctttagcgtgaaccaggctattatcagagagcttgggggcataccaatcgtcgctaacaaaatcaaccacagcaaccagtccatcaaggaaaaggccctgaacgcgctgaataacctgagtgttaacgtagagaaccagatcaagatcaaggtccaagtgcttaagctgctacttaacctgtccgaaaatcctgcaatgactgagggcctgctaagggcccaagtcgactcctcattcctgagtctctatgatagccacgtagcgaaggagattctgctgcgggtgctgacacttttccagaatatcaaaaactgtctcaagatcgagggacatttggccgtgcagccaacattcacagaaggatcgctgttcttcctgttgcatggcgaagagtgtgctcagaagatacgggctttagtggaccatcacgatgccgaggtgaaggagaaagtggttactataattccgaaaatctag

SEQ ID NO: 179440 - DNA, 678 bp, synthetic construct
  misc_feature 1..678: note = Description of Artificial Sequence: Synthetic coding sequence
  source 1..678: mol_type = other DNA
atgggcggcccccggggcgccggctgggtggccgccggcctgctgctgggcgcaggcgcctgctactgtatctatagactgacccgtggccgcaggcgtggcgatcgcgagctgggtatacgcagtagtaaaagcgccgaagatctcactgacgggtcttacgatgacgttctgaatgcagagcaactccagaaactcctttacttgctggaaagcacggaggacccagtgatcattgaaagggctcttatcactctaggcaacaacgccgcattctccgtaaaccaagcaattataagggagctgggaggtataccaattgtggccaataaaattaaccacagtaatcagtcgattaaagaaaaggcactgaatgccctgaataatctttctgtgaatgttgaaaaccagatcaagataaaggtggactctagcttcctttccttgtacgactctcatgtggctaaagagatactgttgcgcgtcctcacactgttccagaatatcaagaactgtttaaagatcgaaggacacctagctgttcagcccacgtttaccgagggaagtctgttcttcctgctccatggtgaagaatgtgcccaaaagattcgcgccctggttgaccatcacgatgcggaggtgaaggaaaaagtcgttacaatcatccctaagatctag

SEQ ID NO: 179441 - DNA, 1362 bp, synthetic construct
  misc_feature 1..1362: note = Description of Artificial Sequence: Synthetic coding sequence
  source 1..1362: mol_type = other DNA
atgggccggacccgggaggccggctgcgtggccgccggcgtggtgatcggtgctggggcctgttactgcgtgtatcgcctagcctggggaagagatgagaacgagaaaatatgggacgaggacgaggagagtaccgatacttcggagattggtgtggagacagtcaagggcgccaagacgaatgctggggcgggcagtggggcgaagttgcaaggcgattcagaagtaaagccagaagtgtctctgggtcttgaagactgccctggagttaaggagaaggctcacagcggttctcattcaggaggcggactggaagctaaagccaaagctctgttcaataccctgaaggagcaggcatccgctaaggcaggcaagggcgcccgggtcgggaccatcagcgggaacagaactctcgccccatcattaccctgtccgggcggacggggcggcggatgccaccctacacgctccgggtcaagggcaggcggccgagcctctggcaaaagcaaaggtaaagctcgatcaaagtccacaagggcacctgcaaccacatggccagtgcgtcgaggcaagttcaattttccctataagatcgatgatatcctgtctgcccctgatctgcaaaaggtgctgaatatactagaaaggacgaatgacccgtttatacaggaggttgccttagtgaccctcggaaataacgctgcatactcttttaaccaaaacgccatacgtgagctgggcggtgtgccgataatagctaagcttattaagaccaaagatcctatcattcgcgaaaagacctataatgctctgaataatctctcagtgaatgctgagaaccaaggcaaaatcaagacctacatatcccaggtgtgtgacgacaccatggtttgcaggctcgacagtgcagttcagatggctggacttaggctcttgactaatatgaccgtgacgaaccactatcagcatctactgagttactcctttcccgacttcttcgccctgctgttcttgggcaaccatttcacaaagattcagattatgaagctgatcattaattttactgaaaaccccgccatgaccagagaactggtctcatgcaaagtaccaagtgaattaatctcactgttcaacaaagaatgggatcgtgaaatcctgctaaacatactaaccctgttcgagaacattaatgataatatcaagaacgagggactcgcctcaagccggaaagaattctctcggagctcactgttctttctgtttaaagagtccggagtttgtgtgaagaagattaaagctctggcaaaccacaatgacttggtcgtgaaggtgaaggttttaaaggtgctcaccaagctatag

SEQ ID NO: 179442 - DNA, 477 bp, synthetic construct
  misc_feature 1..477: note = Description of Artificial Sequence: Synthetic coding sequence
  source 1..477: mol_type = other DNA
atggtgtgccggctggacagcgccgtgcagatggccggcctgcggttgctaaccaacatgactgtgaccaaccactatcagcaccttttatcctatagcttcccggactttttcgcgctacttttcctgggcaatcattttacaaagatacagatcatgaagttgattataaattttaccgagaaccccgcaatgactcgcgagctcgtctcctgcaaggttcctagtgaactgatctctctcttcaacaaggagtgggatcgcgagatactgctcaatatcctcacgctattcgagaacatcaatgataatatcaagaatgagggattagcctctagcagaaaggaatttagtcgctcttctctcttctttttgtttaaagaaagcggggtgtgcgttaaaaaaattaaagccttggcaaatcataatgacttggtggtgaaagtgaaggtattaaaggttctgaccaagctttag

SEQ ID NO: 179443 - DNA, 1899 bp, synthetic construct
  misc_feature 1..1899: note = Description of Artificial Sequence: Synthetic coding sequence
  source 1..1899: mol_type = other DNA
atgagccgggtgcgggacgccggctgcgtggccgccggcatcgtgattggcgcaggggcttggtattgcgtttataagtacacaagggggcgcgatcagaccaaaaagcgaatggccaagcccaagaaccgcgccgtggccggcactggtgcccgggcacgagccggcctcagggctgggttcacaatcgacttggggagcggattttctcctccgaccccagtgcgggcggaggctgaggacagagcacaggacgaggcaagtgccctggacaccgtgggggcagaggccgttgctcccgccgcatcgagcgcagaggctcagtccggggctggctcacaagcacaagaggcagatggagctggagttggccctaaggccgaatccgttgttggggccgcaatggcttccgctattgcgcctcctcccggcgtgaccgaggctctcggtgcagctgaggcccccgccatggccggggcacccaaggtggcggaagcaccaagagaagcggaaacctcccgagccgctgtaccgcccgggacggtcgtgcccaccgaggccgctgcaccaaccgaggtgaccgagggcccgggagtggctgccccgaccaaggttgctgaggcacctggcgtagctagccccacggaagccgctgaagccccggtgcctgcaacccccacaggagccgcggccccgaccggggctgccgaaagcccaggcacatctggtagccctagaacagcagttgtccctggcacctctgcggccaagaaagccacccctggcgcccacactggcgccatccctaaagccaccagtgctaccggggccgtccccaaaggagggggtaagggggtgacccgttcgcgcaacggcggcaaaggcaaaggcaaaaaatcaaaggtggaggtcgacgagctgggaatgggatttaggcctggtgatggagccgctgctgccgctgccgcatcggctaacgggggtcaggcttttctggctgaggtccctgatagcgaggaaggtgaatcgggatggacggacactgaaagcgatagcgactctgagcccgagacccaacggagagggcgaggacgtaggccagtcgcaatgcagaagaggccctttccctacgaaatcgatgaaattctgggagtgagggatctccgaaaagtgttggctcttctgcagaagagcgatgatccttttatacagcaggtcgccttgcttacacttagtaacaacgctaactattcttgtaaccaggaaactatccggaagctgggcggcctgccaatcatcgccaatatgatcaataaaactgatccccacataaaggagaaggcgcttatggctatgaataacttgtccgaaaactatgagaaccaagggaggctgcaggtctatatgaacaaagttatggacgatatcatggcttctaacctgaactctgccgtccaggttgtggggctgaagtttctgacaaacatgaccataacgaatgactaccagcatcttcttgtgaactcaattgccaacttttttcgcctcctgagtcaggggggcggcaaaataaaagtcgagatccttaagatactcagcaacttcgcggaaaatccggacatgttaaaaaagctcctctcaacccaagtgcctgctagtttctcctctttgtataattcctacgtggagagcgaaatcctaatcaacgccctgactctgttcgaaatcatctacgataatttacgggccgaagtattcaactatcgagaatttaacaagggatcgctgttctatctgtgtaccacttcaggcgtttgcgtcaaaaagatcagggccctggccaaccaccacgatctacttgtaaaggtgaaggtgatcaagctggtcaacaagttttag

SEQ ID NO: 179444 - DNA, 1899 bp, synthetic construct
  misc_feature 1..1899: note = Description of Artificial Sequence: Synthetic coding sequence
  source 1..1899: mol_type = other DNA
atgagccgggtgcgggacgccggctgcgtggccgccggcatcgtgataggtgccggcgcgtggtactgcgtttacaagtatactaggggtcgcgaccagaccaagaaacgcatggccaagccgaaaaaccgagccgtggctggtactggggctcgtgctcgggcaggactgagagcagggttcacgatcgatttaggatccggcttttcacctcctacgcccgttagagccgaggcagaagacagggcgcaggacgaggcgagcgctctggatacagtgggcgctgaggcagtcgcacccgccgcatctagcgcagaggctcagtcgggcgccggctcacaagcccaagaagcggatggagccggcgtaggtcccaaggcagaatctgtcgtgggcgcggcgatggctagcgcgattgctccgcctcccggcgtgaccgaggctctgggcgcagccgaagctcccgccatggccggcgcccccaaagtcgcggaagctccaagagaggccgagacctcgcgtgctgcagtgcctcctggcacagttgtacctacagaggctgcagctcccacagaagtgacagaagggccaggagtcgccgcgccaactaaggtggccgaggcgcccggggtcgcctcccccactgaagccgctgaagcacccgttccagcaaccccaacgggcgctgccgctcccacaggagccgctgagagtcctggtacatccggctctccaaggactgcagtggtcccaggcacttctgccgccaaaaaagcaacgccgggagctcacacaggggcaatacccaaggcaactagtgcgacaggtgcagtacctaaaggagggggcaagggggtgacaagaagtaggaatggcgggaagggaaaaggtaagaagagcaaagtcgaggttgacgaacttggaatggggttccgccctggagatggcgctgccgccgctgctgctgcttcagccaatggtggacaggcctttttggccgaagtgcccgactcagaggaaggagaatccggctggaccgacacagagagcgattccgatagcgaacccgaaacgcaacggcgcggaagaggtcggaggcccgtggccatgcagaaaagaccattcccatacgagattgacgaaatcttaggcgtgagagatcttcgcaaggtgcttgctttgctgcaaaaaagcgatgaccccttcattcaacaggtggccctgctgacactgtccaataatgcaaactactcatgcaatcaggagaccatccgcaaactaggcggattgccaatcattgctaacatgatcaacaagacggatccccatatcaaggagaaagccctcatggccatgaataatttgagcgagaattacgagaatcagggacgccttcaggtgtatatgaacaaggttatggatgatatcatggctagcaacctgaattcggctgttcaggtggtggggctgaagtttctgacaaatatgacaataacaaatgattaccagcacctgctggtgaacagtattgctaacttcttcaggctactctcgcagggcggtggcaaaatcaaggtcgaaatcctgaaaattctgagtaatttcgctgagaatcccgacatgctgaaaaaactgctctccactcaggtaccagcgagcttttcttcgctttataactcttacgttgaatctgagatcctgataaacgccctaaccctgttcgaaatcatctatgacaatctcagagccgaagtgtttaactaccgagaattcaataagggcagcttattctacctgtgtacaacatcaggggtctgcgtgaagaaaattcgtgcccttgccaaccatcacgacctcctcgtaaaggtgaaagtgatcaagttggttaataaattttag

SEQ ID NO: 179445 - DNA, 1899 bp, synthetic construct
  misc_feature 1..1899: note = Description of Artificial Sequence: Synthetic coding sequence
  source 1..1899: mol_type = other DNA
atgagccgggtgcgggacgccggctgcgtggccgccggcatcgtgataggagccggggcctggtattgcgtatataagtatacaaggggtagggatcagaccaagaagaggatggctaagcctaaaaaccgggctgtcgccggcacgggagctcgcgctagggccggactgcgggctggatttacaatcgatctgggaagtggatttagtccccctacaccagtgcgggctgaggccgaggaccgggcccaggatgaggcaagcgcactagacaccgtaggggcagaggccgtcgcgcccgcagcctcctccgctgaagctcagagtggcgccggatcccaggcgcaagaggccgacggggcaggagtaggaccaaaggccgagagcgtggtgggcgctgcgatggcgagtgccatagctcctcccccgggcgtcacagaagctctgggagcagccgaagctcctgcaatggctggcgcaccaaaagtggccgaggcacctagggaagccgaaacttcccgtgcagcggtgcccccaggaacagtcgtgcctactgaggccgcagcacccactgaggtgactgaaggacccggagtggcagccccaacaaaggtcgccgaggcccctggggtggcatccccaacagaagccgccgaagccccggttcccgctactccaacaggagccgccgcaccaaccggggccgccgagagcccaggtacatcaggcagtcctagaactgccgtcgttccgggaacttctgccgccaagaaagcaacccctggcgcacatacgggcgcgattccaaaagccacctcagcgaccggggccgtgcccaaagggggaggcaagggagtcacccgcagtcgtaatgggggaaagggcaaaggcaagaaatccaaagtagaggtggatgaattgggcatggggtttcgacccggagacggtgccgccgctgcagcagccgcctccgcaaacggcgggcaggcttttctcgccgaagtgcccgactcagaagagggagaatctggctggaccgacaccgaaagcgattcggacagcgagccagagacacagcgacgtggtcgcggtcgtcggcctgtggcaatgcagaagagacctttcccatatgagatcgatgaaattctcggcgtcagagacctgcggaaagttctagccctccttcagaagtcagacgacccattcatccaacaggtggctctgctgacactgtccaataatgcaaactattcttgtaatcaggagaccatcagaaaactaggcggcctacctatcattgctaacatgattaataaaacagaccctcatataaaggagaaggctctgatggcgatgaacaacctgagcgaaaattacgagaaccagggacggttacaagtgtacatgaacaaggttatggatgatatcatggcttctaacctgaattccgccgtgcaagtagtgggcctgaaattcctgaccaacatgaccattacaaacgactaccagcaccttctcgttaactccattgcaaacttttttcgactgctgagtcaagggggtggcaagatcaaggtagaaattctgaaaattctgagcaacttcgctgaaaatccagacatgctgaagaaactgctgtccactcaggttccggcgtctttctcatcactttataatagctatgtagaatccgagatcttaattaatgcattaactcttttcgagatcatctatgataacttacgcgctgaagtgttcaattaccgagagttcaataagggaagccttttttacctgtgcactacatctggcgtgtgcgtcaaaaaaatacgggccctcgccaatcatcacgatttactagttaaggtgaaagtgattaagctggtcaataagttctag

SEQ ID NO: 179446 - DNA, 504 bp, synthetic construct
  misc_feature 1..504: note = Description of Artificial Sequence: Synthetic coding sequence
  source 1..504: mol_type = other DNA
atgagccgggtgcgggacgccggctgcgtggccgccggcatcgtgatcggtgccggggcctggtattgcgtgtacaaatacactcgcggcagggatcagactaagaaaagaatggccaagccaaagaacagagcggtcgccgggactggcgctcgagcgagggcaggactgcgtgccggcttcacaatcgatctgggaagtggcttttcaccacctacccctgttcgagccgaggctgaggaccgcgcgcaagacgaggcttccgcacttgacaccgtaggagctgaggccgtggcaccagccgcgagctccgctgaggctcagtcaggcgcaggttctcaagcccaagaagccgacggggctggagtggggccaaaggccgaatccgtggtcggcgccgctatggcctctgccatcgcccccccccctggcgtgactgaggcccttggcgcagcagaggcacccgcaatggcaggcgcaccgaaagtcgcagaggcaccctag

SEQ ID NO: 179447 - DNA, 189 bp, synthetic construct
  misc_feature 1..189: note = Description of Artificial Sequence: Synthetic coding sequence
  source 1..189: mol_type = other DNA
atgagccgggtgcgggacgccggctgcgtggccgccggcatcgtgatcggtgcaggagcatggtactgtgtctacaaatacacaagagggcgcgatcagaccaaaaaacgtatggcgaagccgaagaatagagccgtcgccggaaccggagccagagcacgcgccggactgagggcagggttcacttag

SEQ ID NO: 179448 - DNA, 498 bp, synthetic construct
  misc_feature 1..498: note = Description of Artificial Sequence: Synthetic coding sequence
  source 1..498: mol_type = other DNA
atgagccgggtgcgggacgccggctgcgtggccgccggcatcgtgattggggctggggcctggtactgtgtgtataagtacacccggggacgcgatcagacaaagaaaagaatggcgaaaccgaaaaatagggctgtggccggcaccggcgcgagagctcgcgccgggctgcgcgccgggttcactattgatttaggttccggcttctctcctccaacgcccgtacgcgcggaggcagaggatcgcgcccaggatgaggcctccgcgttagataccgtgggggcggaagccgtcgctccagctgcctctagcgctgaggcccagtccggtgccggcagccaggcacaggaggctgatggcgctggtgttggccctaaagcagaaagcgtcgtgggcgcggccatggctagcgctatagcaccacccccaggagtgacagaagccttgggggcggctgaggctcccgcgatggccggcgccccgaaagtggcagaatag

SEQ ID NO: 179449 - DNA, 318 bp, synthetic construct
  misc_feature 1..318: note = Description of Artificial Sequence: Synthetic coding sequence
  source 1..318: mol_type = other DNA
atgagccgggtgcgggacgccggctgcgtggccgccggcatcgtgatcggagcaggtgcttggtactgcgtctacaagtacactcgggggagagatcagaccaaaaagcgaatggccaagcctaagaacagggccgtggccggcaccggcgcaagagccagagccggcctgagggcgggttttacgatcgatttgggatcagggttctccccgccaacacccgtaagagccgaggctgaagacagggcccaggacgaggcatccgcccttgacactgtcggggccgaagctgttgcccctgccgcatcttccgcatag

SEQ ID NO: 179450 - DNA, 282 bp, synthetic construct
  misc_feature 1..282: note = Description of Artificial Sequence: Synthetic coding sequence
  source 1..282: mol_type = other DNA
atgagccgggtgcgggacgccggctgcgtggccgccggcatcgtgattggcgctggtgcttggtactgcgtgtataaatacactagagggcgagaccagactaagaagcgcatggccaaacccaaaaaccgcgccgtcgctggcaccggagcccgggcacgagcaggactgcgcgcaggcttcaccatcgacctaggttccggtttctcccctcccactcccgtgagggccgaggccgaagacagagcccaggacgaggcctcagcactagatactgtctag

SEQ ID NO: 179451 - DNA, 1140 bp, synthetic construct
  misc_feature 1..1140: note = Description of Artificial Sequence: Synthetic coding sequence
  source 1..1140: mol_type = other DNA
atgggctacgcccggaaggtgggctgggtgaccgccggcctggtgattggggcaggagcgtgttactgtatttataggctgacccgtggccggaaacaaaacaaggaaaagatggccgaaggggggtctggcgacgtggatgatgcaggcgattgcagtggagcgcggtacaatgactggtcagatgatgacgatgatagtaacgaatcaaaatctattgtgtggtaccccccttgggccagaatcggaaccgaggcaggcaccagggcccgggctcgggcccgtgcccgcgccaccagagcacggcgcgctgttcagaagcgagccagccctaacagcgatgataccgtcctgtccccccaggagctccagaaggtcctgtgtcttgtggagatgtcggagaaaccctacatcctggaggctgcgctgattgccctggggaacaacgccgcctacgcattcaatcgcgacatcatccgtgatctgggggggcttcccatcgtggctaaaatcttaaatactcgagaccccatcgtaaaagagaaggctttgatcgtgttgaacaacctgagcgtgaatgcagagaaccaaaggcgtctgaaggtttacatgaatcaggtctgcgacgacacgataacttctcgactgaactcgtctgttcagctggccggactccggttgctgaccaacatgaccgtgacgaacgagtaccaacatatgctggccaatagcattagcgacttttttcgactgttctctgcagggaatgaggagacgaagctccaggtattaaaactgctgctcaacctggctgagaatcccgcaatgactcgtgagctgctgcgagctcaggttccttcttccctcggcagcctgtttaataagaaagagaacaaggaagttatcctaaagctactcgtgatattcgagaacatcaacgacaacttcaagtgggaagaaaatgagcctacccagaaccagtttggggaaggcagcttgttcttctttctcaaagagttccaagtatgtgccgataaagtgctgggtattgaatctcaccacgactttctggtgaaggtcaaggtgggaaagttcatggctaaactggcagagcacatgtttccaaagtcccaagagtag

SEQ ID NO: 179452 - DNA, 1140 bp, synthetic construct
  misc_feature 1..1140: note = Description of Artificial Sequence: Synthetic coding sequence
  source 1..1140: mol_type = other DNA
atgggctacgcccggaaggtgggctgggtgaccgccggcctggtgatcggggctggcgcgtgttactgtatttatagactgacgcgggggcggaaacagaataaagaaaaaatggctgagggcggctcgggagacgtggacgacgccggggactgctccggggcgcgctataatgattggagcgatgacgacgacgatagtaacgaatccaaaagcattgtatggtatcccccctgggccaggattggtacagaagcaggcacccgcgctcgagctcgcgcgcgcgcccgggccactcgtgccagacgagccgtgcagaaacgcgcgtctcccaacagtgatgatacagttttgagtccgcaagagttacaaaaagttttgtgtctggtggagatgagtgagaagccatatatacttgaggctgccttgattgccttgggcaacaacgccgcctacgctttcaaccgggatatcataagggatctcggtggcctccccatcgttgcaaagatattaaatactcgcgaccccatcgtgaaagaaaaggcactcattgtccttaataacctttctgtcaatgccgagaaccagaggcgactcaaggtgtacatgaaccaggtctgcgacgacaccattacctccagactgaactcatcagtgcagctggccggacttcgtcttcttaccaatatgactgtgaccaatgagtaccagcacatgcttgcgaactctatttctgatttcttccgattgtttagcgccggtaacgaggagacaaaactacaggtcttgaagttgctgttaaatctggccgagaacccagccatgacaagggaacttctgcgagcccaggtcccctcgtcactcggatccctctttaacaagaaagaaaacaaggaagtcatcctgaagttgttagtgatattcgaaaacataaatgacaactttaaatgggaagaaaacgaacctacccagaatcagtttggcgaaggcagcctgttcttttttttaaaggagtttcaggtttgcgcagataaggttttgggcattgagtcgcaccacgactttttagttaaagtgaaggtgggcaaatttatggccaagctggccgaacacatgttcccgaagtcccaggagtag

SEQ ID NO: 179453 - DNA, 2889 bp, synthetic construct
  misc_feature 1..2889: note = Description of Artificial Sequence: Synthetic coding sequence
  source 1..2889: mol_type = other DNA
atggaggactgcaacgtgcacagcgccgccagcatcctggccagcgtcaaagaacaggaggcccgttttgagagactgacacgtgcattagaacaggagcggcgtcatgtggcacttcagttggaaagagctcagcagcctggtatggtctcaggcggcatgggctcaggacagcccctacctatggcttggcagcagcttgtgctgcaagaacagtccccggggagccaggcctctctggctaccatgccagaggccccagacgtattggaagaaaccgtcaccgtcgaagaggatcccggcacacctaccagccacgtgagcattgtgacgtctgaagacggcacaacaagaaggacggagacaaaggttactaaaaccgtaaagaccgtgactaccagaacagtaaggcaggtccccgtgggtcctgatgggctgcccctcctggacggcggcccgccattggggcctttcgctgatggagcactggacagacattttctgctccgaggcggcggacctgttgccaccctgtcacgggcgtacctgtcctcagggggcggatttcccgaaggccccgaacctagagattccccttcctatgggtctctgagcagagggctgggaatgaggccaccacgcgccgggcccctcggcccagggcccggagatggttgcttcacccttccaggacacagggaagcgttccccgtgggcccagaaccaggccccccaggtggaaggtcgctgccagagaggttccaggcggagccatacggattggaggatgacacccgatctctagccgccgatgatgaagggggccccgagttggagccggactatggtacagcgacccgccgacgacctgagtgcggaagagggcttcacactcgtgcgtacgaggatactgctgacgatggtggtgaactcgcagatgagcgaccagccttccccatggtcaccgcccccctcgcccagcctgagaggggcagcatgggatcccttgaccgcctcgtcaggcgctccccttctgtggatagtgctcggaaggaaccaaggtggcgcgacccagaactgccggaggtgctcgctatgctacggcaccctgtagatccagtgaaagccaacgccgctgcttacctccaacacctttgctttgagaatgaaggcgtgaaacggcgggttcgccaattgcgggggctgcctctgctcgtcgcccttttggatcatcctcgggcggaagttcggcgccgggcttgtggcgccctccgcaacttaagctatgggagggacactgacaataaagccgctattcgggactgtggaggagttccggcattagtcagactgctgagggcggcccgggataacgaggtgcgggaattagtgacaggaaccctttggaacctttccagttacgaacctttgaagatggtaattatcgatcacggcctgcagacactgactcatgaagtgatcgtgcctcacagcggctgggaaagagaacctaacgaggattctaaaccgcgcgacgcagagtggactacagttttcaagaatacatctggctgtttgagaaacgtcagttcagacggagctgaggcccgtaggcgtcttcgagaatgcgagggactggtggatgccttgcttcatgcgttgcagtctgcagtcggaaggaaggacaccgataataaatcggttgagaattgtgtatgcataatgcgcaacctgtcctaccacgttcacaaagaggtccccggggcagaccgctaccaggaagcagaacctggcccattgggatcggccgtgggctcccagcggcgccgaagagatgatgcttcatgctttggaggaaaaaaagctaaagaagagtggtttcatcagggcaaaaaggacggcgagatggatcggaacttcgacacccttgatctccctaagcggaccgaggctgcaaagggatttgaactgctttaccagccagaggtggtcagactttacctatctctgctgactgagtcacgcaacttcaacactctggaggccgctgctggcgcactgcaaaatctctcggccggcaattggatgtgggcaacctacattcgcgctacagtgcgtaaggaaagaggcctcccagttctggttgagctgctgcagagcgagaccgacaaagtggttcgggctgtggcgatcgccctcaggaatctttccttggaccgccgaaacaaggatctcataggtagctacgctatggcggaactagtgcggaatgtacgcaacgcacaagctccccctcggccgggggcctgcctagaagaagacaccgtggttgccgtgctgaataccatccacgaaattgtctctgacagtctcgataatgccaggagtctgctccaagcccgcggcgttccagcactggtggccctcgtcgccagtagtcagtccgtgcgggaggcaaaggccgcatcccacgtactgcagaccgtgtggagctataaggaattaagggggacactgcaaaaggatgggtggaccaaggcccgctttcagtctgccgcagctactgccaagggtcccaagggagcactgtcccctggcgggttcgacgattccactcttccgctcgtggacaaatctctcgaaggcgagaagaccggatcacgcgatgtgatccctatggacgccttggggcccgacgggtactctaccgttgataggcgggaaaggcgtcctcgcggagcctcatccgcgggcgaggcaagcgagaaagaacccttaaagcttgatccatcacgtaaagcccctccaccaggacccagcaggcccgcagtgcgtctcgttgacgctgtcggggatgctaagccccaaccagtagacagctgggtgtag

SEQ ID NO: 179454 - DNA, 2700 bp, synthetic construct
  misc_feature 1..2700: note = Description of Artificial Sequence: Synthetic coding sequence
  source 1..2700: mol_type = other DNA
atgcccgccgagctgcggcaggagcagagccccggcagccaggcctcacttgccacgatgcctgaagctccagatgtgctcgaggagactgttacagttgaggaggatccgggcacgcccacatcacacgtgagtattgtgacttcagaggatgggactacaagacgtacagagacgaaagttaccaagactgtgaagaccgtgacaacaagaaccgtgcgccaagtgcctgtcgggcccgatggacttcctttgctcgatgggggccctccactgggtcccttcgcagacggtgcattggacagacatttcttgcttcgggggggcggccctgtggcaactctctcacgcgcctaccttagtagtggagggggcttcccggaaggcccggaacctagagactctccaagttacgggagtctttctcggggattgggcatgcgaccccctcgagctggaccgttaggcccaggccccggggacggatgtttcactctcccaggccatcgcgaggcctttcccgttggacccgagcctggcccccctggcggtcgttcactgccagaacggtttcaagcggagccatatggcttggaagacgacacgcgctccctggctgccgacgatgaaggaggtccggagctggaacccgactacgggaccgctacccggcggaggcctgagtgcgggagaggtctgcacactagagcttacgaagataccgccgatgatgggggagagctggcagatgagagacccgcttttcccatggttacagcaccgctggcacagccagaaagggggagcatgggcagcctcgacaggctggtgcggcggagcccttctgtggattcggctcgcaaggaaccacggtggagggatcctgaacttcctgaagtgctcgccatgctgagacatccagtcgatccggtaaaggctaatgcagccgcgtacttgcagcatctgtgcttcgaaaatgagggagtgaaacgaagggtacgtcaactccggggactacctcttcttgtggcgctgctcgatcacccaagggcagaggtacgccgacgcgcctgcggtgcattgcggaacctgtcttacggcagggacactgacaataaggcagccatccgggactgcggtggagtacccgcactcgtgcgactccttcgggccgcccgggacaacgaggtgagagaactagtcactggcactctgtggaaccttagtagctatgaaccactgaagatggttatcatcgatcatggcctgcagaccctcactcacgaagtgatcgtgccacattcggggtgggagcgggaacccaatgaagatagtaagccgagggacgcagagtggacgaccgtctttaagaacacatccggttgtttaaggaacgtttccagcgatggagccgaagccaggagacgactgagagaatgtgagggattggttgacgccctactccacgcactccagtctgccgtcggcaggaaagacactgacaacaaatctgtcgaaaactgcgtatgcatcatgcgcaatctctcctatcatgtacacaaggaagtgcctggagccgataggtaccaggaggccgaaccgggcccccttggctctgccgttggcagccagcgacgacgcagggacgatgcgtcctgttttgggggcaagaaggccaaggaggaatggtttcatcaggggaagaaggacggggaaatggaccgaaatttcgatactctggatctgccaaaacggaccgaggcagccaaaggcttcgaactattgtaccagcctgaggtggttaggttgtacctgtcactgttgacggaaagccggaacttcaacaccttggaggccgctgccggtgccctccagaatctgtccgccggaaactggatgtgggctacgtacatacgggcgacggtgcgcaaggaaaggggcctacctgttctggtggagctcctgcagagcgagacggacaaagtcgtgagggccgtcgccattgcgctcaggaatctgtctttagaccgacgtaataaggacttgataggcagttacgcaatggctgagctagttcggaacgtcagaaatgctcaggcaccccccagacccggcgcctgcctggaggaggacaccgtcgtagctgtgctgaacacaattcacgagatcgtctctgactccttggacaacgcacgctcactcctccaggcacgcggtgtgcccgcactggttgctctggtggcaagcagtcagagcgtccgggaggccaaggctgcgtcccacgtgttgcagacagtttggtcgtacaaagagctccgtggcacattgcagaaggatggctggaccaaggctaggtttcagagcgcagccgccactgctaaaggcccgaaaggagcccttagccccggcggttttgacgacagtaccctgccccttgtagacaaatctcttgagggtgagaagacaggctcccgtgacgtcataccaatggacgcgcttggtccagatggctactcaacggtggataggagggagcgcaggcctcgcggggctagttctgctggagaagccagcgaaaaagaacccttgaaactggacccttccagaaaggctccacctcccggccccagcaggcccgcagtgagactagtggatgccgtgggagatgccaagccacagcccgtggattcttgggtctag

SEQ ID NO: 179455 - DNA, 2700 bp, synthetic construct
  misc_feature 1..2700: note = Description of Artificial Sequence: Synthetic coding sequence
  source 1..2700: mol_type = other DNA
atgcccgccgagctgcggcaggagcagagccccggcagccaggcctcgctcgcaactatgccagaggccccagacgtgcttgaagagactgttacagtagaagaggatcccggtacacccaccagtcatgtctccattgttaccagtgaggacggcacaacacgcaggacagaaacaaaagtaacaaagactgtcaaaaccgtaacaactcgcaccgtgagacaggttcctgttggacctgacggcttgcctctcttagatggcggaccaccgctaggccccttcgccgacggcgcactcgacaggcactttttactgagagggggcgggcctgttgccactctcagcagggcctacttgagctcaggaggcggtttccctgagggccctgaaccccgcgactcaccgagctatggctcgctgtcccggggccttggaatgagaccacccagagctgggcccttaggccccgggcctggcgatggctgtttcaccttacctggccaccgcgaggccttccctgtgggacccgaacccggtccccctggcgggcgctctctgccagagaggttccaagccgaaccctatgggttagaggacgatacgcggagcctggctgccgatgatgagggcgggccagagttggaaccagactacggcacggccacgcggcgccggccagaatgtggcaggggactgcatacccgcgcgtacgaggacaccgcagatgatggcggcgagctggcggatgagcgcccggccttcccgatggtgaccgccccacttgcccagcctgagagaggttcaatgggctcattagatcggctggtgaggaggagtccaagcgtggattcggctaggaaggagccccgttggcgtgatcccgaattaccagaggtgttagctatgctgagacatcccgtcgatcctgttaaagcaaacgctgccgcctatcttcagcacctgtgctttgagaacgagggcgtcaaacgcagggtgcggcagttaaggggtctgccactgctggtggccctcctggaccatccacgagccgaagtgcggagacgggcctgcggcgctctccgcaacctgtcctacggtcgcgataccgataacaaggctgcaattagggactgtgggggcgttccagcacttgtccgccttctgcgggccgcaagagataacgaggtgcgtgaactcgtgaccgggactctgtggaatctgtcgtcatatgagcccctgaaaatggtcatcattgatcacggactccaaacactgacccacgaggtgattgttccgcactcaggctgggagagagagcccaatgaggactccaagcctcgcgacgcagaatggacaacggtgttcaagaatactagtggatgtctccgtaatgtgtctagcgacggtgctgaggcacggcgcaggctgcgtgagtgtgaaggcctggtggacgccctgctacacgcattgcagagcgcggtgggtcggaaggacactgataataagagcgtcgaaaattgtgtgtgcatcatgagaaatctgtcctaccacgtacataaagaagtgccaggtgcggatagataccaggaagctgaaccgggacccttaggaagtgctgtgggttctcaacgacgcagaagggatgacgcatcttgtttcggcggtaaaaaagctaaagaagagtggtttcatcaagggaaaaaagacggggagatggacaggaacttcgacaccttggacttgcctaagcggactgaggctgcaaaaggttttgaactgctttatcagccggaggtggtgaggctgtacttgagcctgctgaccgagagtcgcaacttcaacacattagaagccgcagctggagctctccagaacctgtctgccggaaactggatgtgggcaacttatattcgggccacggtccgcaaagaacgtggtctccctgtactggtggaattgctgcagtccgaaaccgataaggtggttcgggccgtggccattgcactgaggaatctctctctggaccggcgcaacaaagacttgatcggatcgtatgctatggctgagctcgtcaggaatgtgagaaatgcccaagctcccccacgccccggagcatgtttggaggaagacacagtcgtggcggtactcaacaccattcatgaaattgttagcgactcactggacaacgctagaagtttgctgcaggcacggggagttcccgcactggttgcactcgtggcctcctcccagtccgtccgtgaggccaaggcggcgagtcacgtgctacaaaccgtgtggagttacaaagaactgcgcggtacgttgcagaaggatggctggacgaaggctaggtttcaatctgctgcagccacagcaaaaggccccaagggggcgctctcccctggaggttttgatgactccacactgcctctggtggacaagtccctagagggcgagaaaactggtagccgcgatgtgatccccatggatgccctaggaccagatggctattccactgttgacaggcgcgaaagaagaccaaggggcgccagttccgctggcgaggccagcgagaaggagccactgaagttggatccttcacggaaggcaccacccccaggtccatcacgcccagccgtgaggttggtggacgccgtcggggacgcaaagcctcagcccgtcgattcctgggtgtag

SEQ ID NO: 179456 - DNA, 2871 bp, synthetic construct
  misc_feature 1..2871: note = Description of Artificial Sequence: Synthetic coding sequence
  source 1..2871: mol_type = other DNA
atggaggactgcaacgtgcacagcgccgccagcatcctggccagcgtgaaggaacaggaggctcggtttgaaagactaacacgtgctcttgaacaggagaggagacacgtggcattgcagctggagcgtgcccaacagccgggcatggtctccggagggatgggctcaggtcagccactaccaatggcttggcagcagctcgtactgcaagagcagtcacctggatcacaggcatcccttgcaaccatgcctgaagctcctgacgtacttgaggagactgtaactgtcgaagaggatcctgggactcctacctcacatgtgagtattgttacttccgaggatgggactacacggaggaccgagacgaaagttacaaaaaccgtgaagacagtaaccactcggaccgtcagacaagtgcctgtggggcccgacggtcttccgctgcttgatggcgggccaccacttggaccgttcgccgacggcgcactggaccgtcatttcctgctgcgaggtggaggccctgtggctacgctgtctcgagcttacctttcttccggagggggctttcccgagggtcccgagcctcgggactctccctcctatggctcattgtcgagagggctcggtatgcgtcctccacgcgcgggcccactgggtcccggacctggggatggatgttttacgctccctggacatagagaggccttccccgtcggccccgagcccggccctcccggcgggcggagcctgcccgaacggttccaggcggaaccgtatggcctggaagatgacactcggagcctagccgctgacgatgagggcgggcctgagctggaacccgattatgggacggccactcgaagaaggccagaatgtggtagggggctgcacacacgtgcctacgaggacacagctgacgacggcggagaactcgctgatgaaagacctgcattccccatggtgacagcccccttagctcagcccgagcgcggatccatgggtagcctggaccgcctcgtccggcgatcaccaagcgtagactctgccaggaaggaacctcggtggagggaccctgagctgccagaagtgcttgcgatgttgcggcaccctgttgatcccgtgaaagcaaacgcagccgcttatctacagcacctgtgcttcgaaaacgagggggtcaagaggcgggtgcgccagctgcgaggcttacctctgctagtggcccttctggaccatccccgtgctgaagtccgcaggcgtgcctgtggggctctgcggaatctgtcctacggcagggatacagataataaagcagctatcagagattgcggcggcgtgcctgccctggtccggctgctccgcgccgcccgcgataacgaagtcagggaactggtgacaggcacactttggaacctcagctcctacgaacctttgaaaatggtcatcattgatcatggtctccagacattaacgcacgaagtgattgtccctcattctggctgggaacgggagccaaatgaggactctaaaccaagagatgccgaatggactactgttttcaaaaatacctcaggttgcctccgcaacgtttcatccgacggggctgaagccaggaggcgtctgcgtgagtgtgagggcctcgtggatgctttgctgcacgcactgcagagcgccgtggggaggaaagatacagacaacaaatcagtcgaaaactgtgtgtgtattatgcgcaacctcagctaccacgtgcataaagaagtgccaggagctgacagataccaggaagccgagcccggccccctaggctctgctgtagggtctcagaggaggcgcagagatgatgcaagttgtttcggcggaaaaaaagcaaagggcaaaaaagatggggaaatggaccggaacttcgataccttggatctacccaagaggaccgaggctgcaaagggttttgaattgctctaccagcccgaggtagtgagactttatctttccttgctgaccgaaagtaggaacttcaacactctggaagccgctgctggggccctccagaatctgagtgccggcaattggatgtgggcaacatatatcagggcaaccgtgcgtaaggaacgaggattgccagtgctggtggagctactgcagtctgagaccgacaaggtcgtgcgagcagtagctatagcgttgaggaatctatcccttgatcgccggaacaaagatctaataggctcatacgcaatggccgagttggtgaggaacgtccggaatgcgcaggccccccctcgtccgggtgcatgtctggaggaggataccgtagtggccgttctgaataccatccacgagattgtatctgattccctggataatgccaggtcactcctgcaagccaggggagtgccagccctggtggccctggttgcgtcatcccaaagcgtccgtgaggcaaaagccgctagtcacgttctgcaaactgtttggtcttacaaggaactccgcggcacactccagaaagatggctggaccaaagccagattccagtcagccgcggccaccgccaaaggccccaagggggctctctccccaggtggcttcgatgactccaccctccccctggtggataaatccctggaaggtgaaaagaccggctcgagagacgtgattccaatggacgccctgggtcccgacggttattctacagtcgacaggagagagagacgacctcgaggagcttcaagtgccggtgaggcaagcgaaaaggaacccctcaagctggacccaagtagaaaggctccgccaccgggcccaagccggccagctgtgcgcctcgtcgatgcggtgggggacgctaagcctcagccagtcgactcctgggtgtag

SEQ ID NO: 179457 - DNA, 2682 bp, synthetic construct
  misc_feature 1..2682: note = Description of Artificial Sequence: Synthetic coding sequence
  source 1..2682: mol_type = other DNA
atgcccgccgagctgcggcaggagcagagccccggcagccaggcctccctggcaaccatgcccgaagcgcccgacgtcctggaggaaactgtgactgtagaagaggaccctggcaccccaacttcacacgtgtcaatcgtgacgagcgaggatggaacaacacggaggacggagactaaggtcacgaagaccgtgaaaactgtaactactcgcaccgtgaggcaagtaccagttggcccagacggcctccctttacttgatggcggacctccattaggccctttcgctgatggtgcactggacaggcatttcttgctgcggggcggaggccccgtagcgacactgagccgggcctacctctcgtccggcgggggttttcctgagggtccagaacccagggatagtccgagctacggatcactatctagagggttgggcatgagacctcccagggctggccccttaggccccggtccaggggacggctgcttcactctccccggtcaccgtgaagcttttcccgtcggccccgagcctggaccacccggcggacgaagtctccccgagcgatttcaagcagagccgtacggactggaagatgatacacgctcactggctgccgatgacgaaggcgggcctgagctggagccagactatggtaccgccacccggcgacggccagaatgcggacgaggcctccacactcgggcctacgaggacactgccgacgatggcggcgaacttgcggatgagcggcctgccttcccaatggtaactgcgccactcgcacagcctgagcgagggtctatgggaagtctcgaccggctggtaagaaggagcccttcggtcgacagcgctcgtaaagagcctcgatggcgggatcctgaattgccagaggtgctggctatgttacgtcatcccgtcgaccccgtgaaggccaatgccgccgcatatttgcagcacctgtgcttcgaaaacgagggggttaaaagacgcgtacggcagcttcgaggcctccctttgctagtcgccctcctagatcacccaagagccgaggtgcgacgcagagcctgcggggctctccgcaatttgagctacggaagagacaccgataacaaggcggccatccgggattgtggtggggtgcccgccttagtccgcctgctgagggctgcccgggataacgaggtgagagaactggtaacaggtaccctttggaacctgtcgtcatatgagcccctgaaaatggtgattatcgatcacggcctccagaccctgacacatgaggtgattgtgccccactcagggtgggaaagagagccaaacgaagactctaagccaagagatgcagaatggaccaccgtatttaagaatacgtctggctgtttgagaaacgttagtagcgacggggcagaggccaggcgccggctgcgcgagtgcgagggcttagtggatgcattgctccacgcattgcagtctgctgtgggccgtaaggatactgataacaagagtgttgagaactgcgtctgtatcatgaggaacttgtcgtaccacgtgcataaagaggtacctggcgcagaccgctatcaggaagcagagcccggccctcttggttccgcggttggctcccagaggcggaggcgggatgatgcaagttgtttcgggggaaaaaaggcaaaaggtaaaaaggatggtgagatggatagaaacttcgatactctggacctccctaagagaaccgaggctgctaaaggcttcgaactcctgtatcagcctgaagtagtgagactttacctcagccttctcaccgagagccggaattttaacacgctcgaagctgcagccggagccctgcagaacctgtctgcaggcaactggatgtgggctacctacatcagggccacggttcgaaaggaaaggggcctgccagtgttggtggagctgctgcagagcgagacagacaaagtggtccgtgccgtggctatcgccctcagaaacctgagcctggatcgccgcaacaaagatctcatcgggtcttacgcaatggccgaactcgtcaggaacgtgcgtaatgcgcaagcacccccacgccctggtgcttgtctggaggaagacaccgtcgtagcagtcctgaataccatccatgagatcgttagtgacagcctggataacgctagatctctgctgcaggcgcggggcgtacctgcgttagtggcactggtagcgagcagtcaaagtgtgcgcgaagcaaaggctgcatcccatgtgctgcagaccgtttggagctacaaggagctgcgtggcacattgcagaaggatgggtggactaaggcacgattccagtcggcagcagcgaccgcaaaggggcctaagggcgcactgagtcccggaggattcgacgattctaccctgcccctcgtcgataagtctctggagggcgagaaaactggaagccgagatgtgatccccatggatgccctgggccctgacggatactctactgtcgataggcgcgaaaggagaccacgcggggcaagctccgcgggcgaggcaagtgaaaaggaaccactgaagctggaccccagcaggaaggcccccccgcctggccccagcagaccagcagttcgattggtcgatgccgtcggcgatgccaagccacaacctgtggacagttgggtgtag

SEQ ID NO: 179458 - DNA, 1131 bp, synthetic construct
  misc_feature 1..1131: note = Description of Artificial Sequence: Synthetic coding sequence
  source 1..1131: mol_type = other DNA
atggagagctacgacatcatcgccaaccagcccgtggtgatcgacaatggttctggggtgatcaaagctgggtttgctggtgatcaaatccctaaatattgctttcctaactatgtgggccggcctaagcacatgcgggtgatggccggcgccctggaaggcgacttatttattggtcctaaggctgaagaacatcgcggcctgttgacaattcgatacccaatggagcacggggtggtgcgggattggaatgacatggaaagaatttggcaatacgtatactctaaggaccagctacagaccttcagcgaggagcacccagtgctcctgaccgaagccccactcaatccatccaagaacagggagaaagccgcggaggtgttcttcgaaaccttcaacgtgccggcacttttcatcagcatgcaagccgtgctgtccctgtacgcaactggcagaaccactggcgtggtgctggatagtggggacggagttacacatgccgtgcctatctatgaaggattcgccatgccacactcaatcatgcgcgtggatatcgccggaagggacgtgagtaggtatctgagactcttactccgcaaggaaggcgtggatttccatacatccgccgaatttgaagttgtgagaaccattaaggagagggcttgttacctgagcattaatccacaaaaagacgaagccctggaaacggagaaggtccagtacacacttccggacggaagtactctcgatgtgggccctgcccggttcagggcacccgaactgctttttcagccagacttagtgggtgacgaaagtgaaggattgcacgaggttgtggcctttgctattcataagtctgacatggacctgagacggacactctttgccaacattgtgctgagtggtggatccaccttattcaaaggattcggagataggctgctgtccgaggtcaagaagctggctcctaaggacattaaaattaagataagcgccccgcaggaaaggctgtactccacgtggataggggggtccatccttgccagtctcgacacctttaaaaaaatgtgggtaagtaagaaagagtatgaggaggatggcagcagggcaattcaccgtaagacattttag

SEQ ID NO: 179459 - DNA, 1167 bp, synthetic construct
  misc_feature 1..1167: note = Description of Artificial Sequence: Synthetic coding sequence
  source 1..1167: mol_type = other DNA
atgagcaaggtgttcaagaagaccagcagcaacggcaagctgagcatctacctgggcaagcgagactttgtggatcacgtggataccgtggagccaatcgacggcgtcgttctcgttgatcccgagtacctcaagtgtcgcaaactatttgtgatgttaacctgtgcatttcgttacggtcgggacgacctcgaagtgatcggcttgacatttcggaaagacctgtacgttcagaccctgcaggtggttcctgcagagtcctccagtcctcaagggccgctcaccgtgctgcaggaaaggctcctccataaactgggcgacaatgcttatccctttaccctgcagatggtgaccaatctgccatgttccgtgactttgcagcctggaccagaggatgcgggaaagccctgcggaatcgactttgaggtgaaatccttctgcgcagagaatcctgaagagaccgtgagcaaacgcgactacgtgcggctggtcgtgcgtaaggtccagttcgcgccacccgaagccggcccaggcccaagcgcccagaccatccgacgctttttgctgtccgcccagcctctgcaattgcaggcatggatggatcgcgaggtacactatcacggcgagcctatctccgtgaatgtctcaatcaacaactgcactaacaaggtaatcaagaaaattaagataagcgtggatcagatcacagatgtggtcctgtacagtctggataagtatacgaagacagtttttatacaggagttcaccgagacagtagccgcgaattcttctttcagtcagtcctttgcagtgactcccatcctggccgcctcttgccagaaacgcggactcgccctcgatgggaaattgaaacacgaggataccaatctcgcttcgtccacaattattaggcctggcatggacaaggaactgctaggcattctagtgtcctataaagtcagggttaatttgatggtctcctgtggcggcatcctgggggatcttactgcatctgacgtgggagtggaactcccactggtactgattcatccaaagccctcccatgaggcagcttctagcgaggacatcgtgatcgaggaattcacacgaaaaggcgaggaggagtcacagaaggctgtagaggccgaaggagacgaggggtcttag

SEQ ID NO: 179460 - DNA, 1167 bp, synthetic construct
  misc_feature 1..1167: note = Description of Artificial Sequence: Synthetic coding sequence
  source 1..1167: mol_type = other DNA
atgagcaaggtgttcaagaagaccagcagcaacggcaagctgagcatatacctcggcaagcgcgactttgtggatcatgtggacacggtcgagcctatagacggggtagtactggtcgaccctgaatatctgaagtgtcgaaagctcttcgttatgttgacgtgcgcgtttcggtacggcagggatgatctcgaggtgattggactgacctttagaaaggacctatatgttcagactctccaggtggtaccggcagagtcgagttcaccccagggccctttaaccgttctgcaggaaaggctactacataagcttggcgataatgcctacccttttacactgcagatggtgaccaaccttccttgtagcgtgaccctgcagcctggcccagaggacgcaggcaaaccttgtggaattgatttcgaggttaaatccttctgtgcagaaaatcccgaagaaaccgtgtctaaacgggattacgtgcgattggtggtccggaaagtccagtttgcccctcccgaggccggtcctggtccatccgcacagactatcaggcgatttttattgagtgcccagcctcttcagttgcaagcatggatggaccgcgaagtgcattaccatggcgaaccaattagcgtgaacgtcagcatcaataactgtactaataaagtaatcaagaagatcaagatctctgtcgatcaaatcaccgatgtggtgctctattctctggataaatacaccaaaacagttttcattcaggaattcactgagactgtggctgcaaattctagtttttcacagagtttcgcagtgactccaattttggccgcctcctgtcagaagcgcgggttggccctggacggtaagcttaaacacgaagacaccaaccttgcatcatcaactataatccggcccggtatggataaagaactactgggtatcctagtaagctataaggtcagggtgaatcttatggtgtcgtgtggtggtatactgggagacctgactgcctccgatgttggcgtcgaacttcctttggtgcttatacatccaaagccgtcccacgcatccgccagcagcgaggatatcgttatcgaagaattcacccgaaaaggagaggaagagtcacaaaaggctgtcgaagcggaaggtgacgaggggtcttag

SEQ ID NO: 179461 - DNA, 1080 bp, synthetic construct
  misc_feature 1..1080: note = Description of Artificial Sequence: Synthetic coding sequence
  source 1..1080: mol_type = other DNA
atgagcaaggtgttcaagaagaccagcagcaacggcaagctgagcatctacctcgggaaacgggattttgtggatcatgtggacacagtggagccaatcgacggagtggtgctggttgatcccgaatatctcaaatgtcggaaactgttcgtaatgcttacgtgcgcgttccggtacggtagagatgacctggaagtgataggcctgacgtttagaaaagatctgtatgtccagaccctgcaagtggtgccggcagagagctctagtccacagggcccactgacagtgttacaagaacgcctgctgcataaactgggggacaatgcatacccattcaccctccaaatggttaccaaccttccatgcagcgtgacccttcagcctggacccgaggatgcagggaaaccatgtggtattgattttgaagtgaagagcttttgtgccgaaaatcccgaggagacagtctccaagagggattacgtgcggcttgtcgtaagaaaagtgcaattcgcccccccggaagctgggcccggccctagcgcgcagaccataagaagatttttgctctctgcgcaacccctgcaactccaggcatggatggatagagaagtccactatcatggagaacctatatcagttaatgtgtcaatcaataattgcacaaataaagtcataaagaagataaaaatctccgtagaccaaatcacagatgtggtcctctatagccttgataagtacaccaagactgtctttatccaggaatttacggagaccgttgccgcaaactccagcttttctcagtcattcgctgtgacccccatcctggctgcatcttgtcaaaaacggggactcgccttggatggtaagctgaagcatgaggatactaacctggctagttccaccatcatcaggcccggcatggataaagagcttttaggaatcttggtgagctataaagtacgtgtgaatttgatggtgagctgcgggggcatcctgggcgacctgaccgcgtctgatgttggtgtggagttgcccctggtgctgattcacccgaagccatcccacgaggctgctcggtag

SEQ ID NO: 179462 - DNA, 993 bp, synthetic construct
  misc_feature 1..993: note = Description of Artificial Sequence: Synthetic coding sequence
  source 1..993: mol_type = other DNA
atgggcgagaagcccggcacccgggtgttcaagaagagcagccccaattgcaagctgactgtgtatctggggaaaagagacttcgtcgatcacctggataaggttgatcctgtcgacggtgtcgtcctggtggacccggactacctgaaagacaggaaggtttttgttacgctcacttgcgcgttccggtacggaagggaggacttagatgtgctcggattaagcttccggaaggacttattcattgctacttatcaagcattcccccctgtgcctaacccaccccgtccgccgacacggctgcaggataggctcctgaggaagctggggcagcatgctcaccccttttttttcactataccccaaaatttgccgtgctctgttaccctgcagcctggaccagaggacacaggcaaggcatgtggcgtagatttcgaaatccgagctttttgcgccaaatctttggaagaaaaaagccacaaacgaaacagcgtcagactcgtgattaggaaagtgcaatttgctcctgagaagccaggccctcagccaagcgctgaaaccacaagacatttcctaatgagcgatcgatcgttacacctagaggcgtccctcgataaagagctctactaccacggcgaacctcttaacgtgaacgttcatgtcacaaacaactctacgaaaaccgttaagaaaattaaggtcagcgtccgacagtacgctgatatttgcctgttctcaactgctcagtataaatgcccagttgcccagctggagcaggacgatcagcgggaggggggctgccagcagggtggtgctggcaacccaggggtgctgcagggccaaggcgaggctgggggagtatcacgtcgtggatgcctgtgcggggccgccttctgctcatatgcaccccaggcccctaggcctcatccgccccctcaaacacccgtatctcggtccggggacaggtgtccttgtggacaccaaccacactag

SEQ ID NO: 179463 - DNA, 1245 bp, synthetic construct
  misc_feature 1..1245: note = Description of Artificial Sequence: Synthetic coding sequence
  source 1..1245: mol_type = other DNA
atggtgctgggcaaggtgaagagcctgaccatcagcttcgactgcctgaacgattcaaatgtgcccgtatactcttccggagatacagtgagcggccgggttaacctggaagtgactggtgagatccgagtcaaaagccttaaaattcatgcaagggggcatgctaaagtcaggtggaccgagagtaggaacgcgggtagtaatactgcttatactcagaattacaccgaagaagttgagtactttaaccacaaagatattctgataggccatgagagggacgacgacaactctgaagagggattccacaccatccacagtggtcgccacgagtatgcattttcgtttgagctaccacagacccctttagctaccagcttcgaaggcagacatgggtccgtgcggtactgggtaaaggccgagctgcataggccatggctcctacctgttaagctcaaaaaagaattcacggtattcgagcatatcgatatcaataccccctctctactgtcccctcaggccggcaccaaagaaaagacactgtgctgctggttttgtactagtgggccaatcagtctcagcgcaaaaattgaacgaaaggggtacacacccggtgagagcatacagattttcgctgagatagagaactgctcctctagaatggtcgtccccaaggcagccatctaccagacccaggctttttatgccaagggcaagatgaaggaagtcaaacaactcgttgccaatctccgcggagagtctctcagctcaggcaaaacagagacatggaacggcaagctgctgaagattcctccagtcagccctagcatcttggactgttctattattagggtggagtacagcctaatggtttacgtcgacatccccggcgccatggatctcttcttgaatctgcctctggtcattgggaccatccctctacacccattcggctcaaggactagctcagtatcatcccagtgttctatgaatatgaattggctcagcctgtcacttccggaacgaccagaagcgccaccatcctacgctgaagtcgttaccgaggaacaacgcagaaacaatttagctcctgtgtcagcttgcgacgacttcgagcgagctcttcagggcccacttttcgcctatatacaggaatttcggttcttgcccccccctctctatagtgagatcgaccctaatcccgaccagtctgcggacgaccgcccaagttgtccgagtagatag

SEQ ID NO: 179464 - DNA, 1233 bp, synthetic construct
  misc_feature 1..1233: note = Description of Artificial Sequence: Synthetic coding sequence
  source 1..1233: mol_type = other DNA
atgggcgacaagggcacccgggtgttcaagaaggccagccccaacgggaaattaacggtttacctcggaaaacgagacttcgtggaccacattgacctggtcgacccggttgacggagtggtgctagtcgaccccgagtacctaaaggagcgtagggtgtacgttacgttaacatgtgccttccgctacggccgggaggatctggacgtgctcggcctaactttccgaaaagacctctttgttgcaaacgtacaatcatttcctcccgcaccagaggacaagaagccgctgacacgcctgcaggagaggctgatcaagaagcttggagaacacgcttatcctttcacattcgagatcccacccaacttgccctgctcagtgaccctccagccaggccctgaagatacaggaaaggcatgtggcgtcgattatgaagtcaaagccttctgtgccgaaaatctggaagaaaagatccacaaacgcaattccgtccggctggtgattcgaaaggtgcagtacgcacccgagcggccaggccctcagccaactgccgagacaacccggcagtttctgatgtccgacaaaccactccacttagaggctagcctggacaaggagatttattatcatggagagcccattagcgtcaatgttcatgtcaccaacaacactaataagactgtgaagaagataaaaatctcggtacgccaatatgcggacatttgcctgttcaatacagcacagtacaaatgccctgtggcaatggaagaagctgacgataccgtagccccatccagtactttctgtaaggtgtatacactgaccccattcctcgccaacaatcgcgaaaaaagaggcctggctcttgatggcaaactgaaacacgaggacacaaatctggcttcctctacactcctccgcgagggcgctaatcgggagatactgggtatcatagtctcctacaaagtgaaagtcaaactggtagtgtcgcgtgggggggacgttgccgtagagcttcctttcactctgatgcatcctaaacccaaggaagagcctcctcatagagaagtgcccgagaacgagacccccgtggacaccaacctgattgagttagatactaatgatgacgacattgtttttgaggatttcgcccgtcagaggctgaaaggtatgaaagacgacaaagaagaagaagaggatggtaccggctctcctcaattgaataaccgctag

SEQ ID NO: 179465 - DNA, 1257 bp, synthetic construct
  misc_feature 1..1257: note = Description of Artificial Sequence: Synthetic coding sequence
  source 1..1257: mol_type = other DNA
atgggcgacaagggcacccgggtgttcaagaaggccagccccaacggaaaactgacagtttacctcggaaagagggacttcgtggatcacatcgatcttgttgatccggtagatggtgttgttctagtggatccagaatatctgaaagagaggagagtttatgtgaccttgacgtgtgctttccgatatgggcgcgaagacctggatgtgcttgggcttacctttaggaaggatcttttcgttgctaacgtgcagagtttccctccagctcccgaggacaaaaaacccctgactcgactccaggagcgactaataaaaaaattaggtgagcatgcctacccttttacctttgagatcccccccaatctgccatgctcggttactttgcaacctggcccagaggataccggaaaagcctgtggtgtagattacgaagtgaaagctttctgcgccgagaacttggaagaaaagatccacaagcggaactccgtccgtctggttatcaggaaggttcagtacgctccagagcgcccagggccccaaccaacagcggaaaccaccagacagtttctgatgtcggataagcccctgcatctggaagcatccctggataaggaaatttattaccacggtgagccaatttcagttaacgtgcacgttacaaataataccaataaaacagtcaagaagattaagatctctgtgcggcagtacgcagatatttgtttgttcaatacagctcagtataaatgcccagttgcaatggaggaggcagacgataccgtagccccgtcatcgactttctgcaaagtgtacacattaacccctttcctggccaataatagagagaagagaggcctcgccctcgacggcaaactgaagcacgaagataccaacttagccagctccacactgttgcgggagggagcaaacagggaaatactgggaataatcgtctcatacaaagtgaaagtcaagctcgtagtgtcccggggcggactgctgcgaggtctgtgtttctctgacgtggcagtggagctccctttcactctgatgcaccccaagcccaaggaggaacctcctcatagggaggtgccagagaacgagacccctgtcgatactaacttgatcgagctggacactaacgacgacgatatcgtgttcgaggatttcgctcggcagcgtctgaagggcatgaaggatgataaagaggaagaggaggatggtaccggcagcccacaactcaacaacagatag

SEQ ID NO: 179466 - DNA, 1257 bp, synthetic construct
  misc_feature 1..1257: note = Description of Artificial Sequence: Synthetic coding sequence
  source 1..1257: mol_type = other DNA
atgggcgacaagggcacccgggtgttcaagaaggccagccccaacggtaaactgactgtgtacttgggaaaacgggatttcgtggaccatatagacttggtcgacccagttgatggagtggtgctggtagatcccgagtatctgaaggagcgaagggtgtacgttactcttacatgcgcgttcaggtacgggcgcgaagacttagatgtgctgggtctcactttcagaaaagacctgtttgtggccaatgtgcaatcttttccaccagccccagaggataaaaagccgctcacgagattacaggaaagactaattaagaagctgggggaacacgcttatccctttaccttcgagatacctcccaatctgccctgcagcgtaacactgcagcctggaccggaggataccggaaaggcctgtggggtggattacgaggtgaaggcgttctgtgccgagaacctggaggagaaaatccataaacgaaattcagtgagactcgtgatcagaaaggtgcagtatgcgccggagcggcccggaccacagcctacagctgaaactacgcggcaatttttgatgagcgataaacccctgcatctcgaggcttctctggacaaggaaatctattatcacggcgagcctatcagcgtaaatgtgcacgtgaccaataataccaataaaacggttaaaaagataaagatatctgtacgacagtacgccgatatctgcctgttcaacactgctcagtacaaatgcccggtggctatggaggaggccgatgataccgttgccccttcttccaccttttgtaaagtatataccctgacccctttcctggcgaataacagggagaaaagaggcctggctttggacggtaaattgaaacacgaggatactaacctggcaagcagtactctgttgcgagaaggagcgaacagggaaatcctgggcatcatcgtgtcatacaaagttaaggtcaagctggtggtgtcacgcggggggctgctgggggatctggctagcagtgatgttgcagtggaactcccattcacgctgatgcacccaaagcccaaggaggagcccccccacagagaagtgcccgagaacgaaactcccgtggacaccaacctgattgaactcgataccaatgatgacgatattgtgttcgaagacttcgcgaggcaaaggctgaaggggatgaaagatgacaaggaagaagaagaggatggcacgggtagtcctcaactgaataacagatag

SEQ ID NO: 179467 - DNA, 1230 bp, synthetic construct
  misc_feature 1..1230: note = Description of Artificial Sequence: Synthetic coding sequence
  source 1..1230: mol_type = other DNA
atgggcgagaagcccggcacccgggtgttcaagaagagcagccccaactgcaagctgacagtgtacctggggaaacgggattttgtagaccatctcgacaaagtggatccagttgatggcgtagtgcttgtggatcccgattacctgaaggacagaaaagtattcgtgacgctgacatgtgctttcagatatggtcgggaagatctggacgtgctcggtctttcctttcgaaaggacctttttattgccacataccaggcctttccccccgtgcccaaccctccccgcccgcctactcggctgcaggataggctgctgcgcaagctggggcagcacgcccaccctttcttcttcacaatcccccaaaacctgccatgctctgtgacccttcagccaggccccgaggataccggtaaggcatgcggcgtcgatttcgagatccgcgctttctgcgcgaagtccctagaggagaagagccacaaacggaattcggtcaggttggtcatcaggaaggtgcaattcgcacctgagaagcccgggccacagcccagcgcagaaactacaagacatttcctaatgtcggacagatccctgcatcttgaggcctctcttgataaggaactctactaccacggcgaaccgctgaatgtcaacgtgcatgttaccaacaatagtacgaagactgtaaagaaaataaaagtctccgtgcgtcaatacgcggatatttgcctcttcagtacagcccaatataagtgccctgtcgcccagctggagcaggacgatcaggtttcgccatccagcacgttttgcaaagtttatacaattacaccactgcttagcgataaccgtgaaaagcggggtctggcccttgacggtaaactgaagcacgaggatacaaatctggcgtctagcactatagtgaaggaaggcgcaaataaggaggtacttggcattctggtatcctacagagtcaaggtgaagctggtcgtctctcgaggcggggacgtgtcagttgagctgccattcgtcttaatgcacccaaaaccccacgatcacatacccctcccaagacctcagagcgccgcccctgaaactgatgttccggtggacaccaaccttatcgagtttgacacaaactatgccaccgatgatgatattgtgtttgaggacttcgccaggctgcgtctgaagggcatgaaggacgacgattatgacgatcagctatgctag

SEQ ID NO: 179468 - DNA, 1185 bp, synthetic construct
  misc_feature 1..1185: note = Description of Artificial Sequence: Synthetic coding sequence
  source 1..1185: mol_type = other DNA
atgggcgagaagcccggcacccgggtgttcaagaagagcagccccaactgtaagctcacagtatatctcggcaagcgagacttcgtagatcatttagataaagttgatcctgttgtcttcgtcacactgacttgcgcgttcagatacggacgggaagacttggatgtgctgggactcagctttcgaaaggacctctttatagcaacttaccaggcctttccgcccgtgccgaatcctcccagaccccctacacgactgcaggacaggttgctgaggaagctcggccaacacgcacacccgttttttttcaccattccccagaacttgccttgtagcgttaccctccagccagggcccgaggacaccggaaaggcgtgcggcgttgactttgagatccgcgcgttctgtgccaagagcctagaggagaagtcacataaacgcaactccgtgcgactggtgatcagaaaagtgcagtttgctcctgagaagccagggccccagccttctgccgaaaccactcgtcacttcttaatgtcagaccgttccctccacctagaggccagcctggacaaagagttgtactaccacggagagcctttgaatgtcaacgtgcatgtgactaacaacagtactaagactgtgaagaaaataaaagttagtgtgcggcagtacgctgacatttgtcttttctcaactgcccagtacaaatgtccagtcgcccaactcgagcaggacgatcaggtgtctccatcctcaactttttgcaaagtctacactataacccctttgcttagcgacaatcgagagaagaggggcctggccttggacggtaagctcaagcacgaggacaccaatcttgcctcgagcacaattgttaaagagggagccaataaagaggtcctcggtatcctggtgagctatagagtcaaagtgaaactggtcgtgtctcgcggcggcgacgtgtccgtggaactgcccttcgtactcatgcaccccaagcctcatgatcacatacctttgcctcgaccccagtcggcggcacccgagacagacgtgcctgttgacactaacctcattgagtttgacactaactatgccacagacgacgatatagtttttgaggattttgcgagactgaggctgaaagggatgaaagatgacgattacgacgatcagctgtgttag

SEQ ID NO: 179469 - DNA, 1266 bp, synthetic construct
  misc_feature 1..1266: note = Description of Artificial Sequence: Synthetic coding sequence
  source 1..1266: mol_type = other DNA
atgggcgagaagcccggcacccgggtgttcaagaagagcagccccaactgtaagctgaccgtgtacctcggaaagagggacttcgttgaccacctcgataaggttgatcctgtggatggggtggttctggtagatccagattatctgaaggaccgtaaggtctttgtgacattgacctgcgcttttcgttatggccgagaagatctggacgtattaggtctatctttccgaaaggatctgttcatcgccacctaccaggccttccctccagtccctaatccgccaagacccccgacccgcctgcaggatcgcttacttagaaagctggggcagcacgctcacccgttctttttcacaatcccacagaacctcccatgctctgtgacgctccaacctggcccggaagacactgggaaggcatgtggggtggattttgagatccgcgctttttgtgcgaagagcctggaagaaaaaagtcataagagaaattccgtgagactggtgatacgcaaggtccagtttgccccagaaaagccgggaccacagccttcagctgaaactactcgccatttcctaatgagtgatcggagtttacatctcgaagcctcactagataaggaactgtactatcacggcgagcctcttaatgtgaatgtgcatgtgaccaataattctacaaagaccgtcaagaaaattaaggtgtccgtgagacagtacgctgacatctgcttgttttccaccgcccagtacaaatgcccagttgcccagctagaacaggacgatcaggtgtctccaagctcaacattttgtaaggtttatactataactcctcttctgtccgacaaccgagaaaagcgggggcttgccttagacggaaagttgaaacacgaggatactaatttggccagcagcacaatcgtcaaggaaggcgcaaataaggaggtcctcggcatcctagtgagctatagggtaaaggttaagctggtcgtgtccagagggggcgacgtctcagtggaactgcccttcgtgcttatgcacccgaagcctcacgaccatattccattgccgcggcctcagagcgctcctacacccactcctcctcttccagtgccccccgctgcccctgagacagacgtgcctgtggacacaaatctcattgaattcgatactaactatgccaccgatgatgacattgtcttcgaggattttgcacggctgaggctcaagggcatgaaggacgacgactatgatgaccagttatgctag

SEQ ID NO: 179470 - DNA, 1233 bp, synthetic construct
  misc_feature 1..1233: note = Description of Artificial Sequence: Synthetic coding sequence
  source 1..1233: mol_type = other DNA
gccgccaaccgggccggcggcggccgggcccaccacggcggcgagacccgtgaccagctcacagtatatcttggcaagagggattttgtcgatcacctggacaaagtggaccctgtggacggagtggttctggtggatccagattatctcaaggaccgaaaggtgttcgtaactctgacttgcgcatttcgatacggacgcgaagatctcgacgtgctgggcctgtcctttagaaaggacttgttcattgctacatatcaggctttcccaccagtgcccaatcctccgcgaccaccgacaagattacaagacagactcttacgaaagctcggccaacacgcacatccattcttctttactatcccacaaaacctaccgtgctccgtcacactccagcccggacctgaggacacgggaaaggcgtgtggtgtcgatttcgagattcgagctttttgcgccaagtcgttagaggagaaatcccacaagcgcaacagcgtgaggcttgtcatccggaaagtgcagtttgcccccgaaaaacccggccctcagcctagcgctgagactactaggcactttctgatgtctgatagaagtctgcacctggaagcatccttggataaggaactgtattaccacggcgaacccttgaacgtaaatgtacacgtgacaaataacagtaccaagaccgttaaaaagattaaggtgtcggttaggcagtatgctgatatatgtctgttctctacggcccagtacaagtgtcctgtggcacagctggaacaagacgaccaggtctcgccatccagcactttctgcaaagtgtacacaataactcctctgctgagtgacaatcgagagaaacgaggcctggcgctggacggtaagctgaagcacgaagacaccaatctcgccagcagcaccatcgtgaaagaaggggcgaacaaagaggttctgggcatcctggtctcttatagagtgaaggtcaaactggtggtgtcacgcggcggggacgtgtcagtagagctgccctttgtgctgatgcacccaaagccccacgatcacatacctctcccccgaccacagtcagcagcacctgagactgacgtgcctgtcgacacaaacttgattgaattcgacacaaattacgcaaccgacgacgatatcgtgtttgaggacttcgccagactacgacttaagggcatgaaagatgacgactatgatgaccagttatgctag

SEQ ID NO: 179471 - DNA, 1047 bp, synthetic construct
  misc_feature 1..1047: note = Description of Artificial Sequence: Synthetic coding sequence
  source 1..1047: mol_type = other DNA
atggccgccggcgtggccggctggggcgtggaggccgaggagttcgaggacgccccagatgtggaacccctggaaccaaccctttccaatattatcgagcaacggtccttaaagtggatcttcgtgggaggcaaagggggagtgggcaagacaacctgcagctgtagcctggctgtgcagctgagtaaagggagggagtctgtcctgatcatttctacggatcctgcccataacatctcagacgccttcgaccagaagttcagtaaggtccccacgaaggttaaaggatatgacaacttgttcgcaatggaaattgacccctccttgggggttgccgagttgcctgatgaatttttcgaagaagacaacatgctgtcaatgggaaaaaagatgatgcaagaggccatgagcgctttccctggcatagatgaagctatgtcttacgcagaggtgatgagacttgtgaaggggatgaactttagtgtggtcgtgttcgacactgcacccactgggcataccctccgtcttctcaactttccaaccatagtcgaaagaggcttggggcgcctcatgcagataaagaaccagataagtcctttcatctctcagatgtgtaacatgttggggctgggcgatatgaacgcagatcagctggcttcgaagctggaggaaaccctccccgtgatcagatctgtttctgagcagttcaaagatccagaacagacaactttcatatgcgtatgtatcgccgaattcctttctctatatgagacagagagactgattcaggaactggcaaaatgtaaaatcgatactcacaacattattgtgaatcagttggtgttccccgatcctgagaagccctgcaagatgtgcgaggccagacacaagatccaggccaagtatctggatcagatggaggatctgtacgaggattttcacatcgttaagctgcctttgctgccacacgaggtgagaggagctgacaaagtcaataccttctctgccctcttactggagccctataagccaccctcagctcagtag

SEQ ID NO: 179472 - DNA, 1047 bp, synthetic construct
  misc_feature 1..1047: note = Description of Artificial Sequence: Synthetic coding sequence
  source 1..1047: mol_type = other DNA
atggccgccggcgtggccggctggggcgtggaggccgaggagttcgaggatgcaccagacgtggagccgctggagcccaccttgagtaatatcatagaacagaggagcctgaaatggatttttgtggggggaaaagggggtgttggaaagacgacttgctcctgttctctggccgtgcagctatcgaaaggtcgcgaaagcgtcttgatcatctctactgatccagcccataacatctccgatgccttcgaccagaagttttcgaaggtgccgacaaaggtcaaaggctatgacaacctcttcgctatggagattgacccaagcctgggggtagccgagctgccagatgagtttttcgaggaagacaacatgttgagtatgggcaagaaaatgatgcaggaggccatgtcagcatttccaggaattgacgaggcaatgagttacgccgaagttatgcgactggttaaggggatgaacttctctgttgttgtttttgacaccgcacccactggccacaccctacgcctgctgaactttccaacaatcgtggagcgcggcctcggtcgcctgatgcagatcaagaaccagatctctccatttatatctcaaatgtgtaacatgctgggattgggcgatatgaacgcggatcagcttgcgtctaaactagaggagactctccccgtaatccgcagtgtgagcgagcagtttaaagaccccgaacagaccacatttatctgtgtatgtatagccgagttcctgtctctgtatgagaccgaaagattgatccaggaactggctaagtgcaagattgatactcacaacatcattgttaatcaactggtgtttcctgatcctgaaaagccctgcaaaatgtgtgaggcccgccacaagatacaggccaagtacctagatcagatggaggatttgtacgaggactttcacattgtgaaactgcctctgcttcctcatgaagtgcgcggagcagacaaggtcaatacttttagtgctcttctgttggaaccatataagccacctagtgcgcagtag

SEQ ID NO: 179473 - DNA, 1128 bp, synthetic construct
  misc_feature 1..1128: note = Description of Artificial Sequence: Synthetic coding sequence
  source 1..1128: mol_type = other DNA
atggccgccctgcgggacgccgagatccagaaggacgtgcagacctattatgggcaggtgctcaagagaagcgccgacctgcagaccaacggatgtgtaactacagcccgtccagttccgaaacacattcgtgaggccctccagaacgtgcacgaggaagtcgccctccgctactatggctgcggccttgtgattccagaacatctggaaaactgctggatactggacctgggctcgggcagtggaagggattgttacgtgctgtcccagctagtgggcgagaaaggtcacgtgaccggaattgatatgacgaaagggcaggtggaggtcgcagaaaaatacctggattatcatatggaaaaatatggctttcaggcgagcaatgtgacctttatccatgggtatattgagaaacttggagaggccggtatcaaaaacgaatctcatgacatcgttgtgtctaattgcgtgataaacctggttcccgacaagcaacaggtcctgcaagaagcctatagagtcttgaagcacgggggggaactctatttcagcgatgtgtatacgagcctggaactccccgaggagattagaacccataaagtgttatggggggagtgcctgggcggggcactgtactggaaagaattggcagtacttgcacagaaaattggattttgtccgccgcgcctggtcacggcgaatctgattactatacagaataaagagctggagcgagtcatcggcgactgtcggttcgtcagtgccacttttagactgttcaagcactcaaaaactggtccgaccaaaaggtgtcaagtgatctacaatggcggcattaccgggcatgaaaaagagctgatgttcgatgctaactttactttcaaggaaggggagatcgtggaagtcgatgaggagaccgctgcgatcctcaagaattcgaggttcgcccaggatttccttattaggccaatcggcgaaaagctgccaacgtccggtggatgcagcgccctcgagctgaaggacatcatcacggacccatttaagctggccgaggagagtgacagcatgaagtccagatgtgtccccgatgccgccggcgggtgttgcggtaccaagaaaagctgctag

SEQ ID NO: 179474 - DNA, 816 bp, synthetic construct
  misc_feature 1..816: note = Description of Artificial Sequence: Synthetic coding sequence
  source 1..816: mol_type = other DNA
atgggcaacggcggccggagcggcctgcagcagggcaagggcaacgtggatggcgtggccgctaccccaacagcagcgtctgcctcttgccaataccgatgtattgagtgtaatcaagaagcaaaggagctgtatagggattacaatcacggtgtgctcaaaatcaccatctgtaagagctgccagaagcctgtggacaaatacatcgagtacgaccctgtgatcattctcattaacgccatactgtgcaaagcccaggcgtaccgccacattctgttcaatacccagataaacatccacggtaagctgtgtatcttctgcctcctctgtgaggcctacctgcggtggtggcagctgcaggacagcaatcagaacactgcaccagacgacctcattcggtacgcaaaggaatgggatttctacaggatgttcgctattgccgccctagagcagacagcatatttcatcggaatctttaccttcctttgggtggaaagacccatgaccgccaagaagaaacctaatttcattcttctattgaaggccctgttacttagctcttacggcaaactgctgctgatccctgccgtcatctgggagcatgactatacaagcgtctgtttgaagctgataaaggtctttgtcctgacctccaactttcaggccatccgcgttaccctgaacattaacagaaaactctcatttctggcagtgctgagcggactgctgttggagtccattatggtatatttttttcagtcaatggagtgggatgtgggctcggattatgcaatctttaaatctcaggatttctag

SEQ ID NO: 179475 - DNA, 807 bp, synthetic construct
  misc_feature 1..807: note = Description of Artificial Sequence: Synthetic coding sequence
  source 1..807: mol_type = other DNA
tgaggccggagcggcctgcagcagggcaagggcaacgtggacggcgtagccgccaccccaacagcagcttctgctagctgtcagtacaggtgcatcgagtgtaaccaggaggcaaaagagctgtatagggattacaatcacggagtgttgaaaataacaatatgcaagagttgccaaaagcctgttgacaaatacattgagtatgacccagtgattatcctgattaatgcaatcctctgtaaagcccaggcgtaccgccacatcttgtttaatacacagattaacattcatggaaaactgtgcatcttctgccttctatgtgaggcctatctgcgctggtggcagctgcaggattcaaaccagaatacagctcccgacgatctgatacgatatgccaaagagtgggatttttatcgcatgttcgccatcgctgccctcgagcaaacggcgtattttataggcatcttcacattcctgtgggtggaacgccccatgactgcaaagaaaaagccgaacttcatactgctccttaaggccctgctgttgagctcctatggcaagctcctgctgatccctgcggttatctgggagcatgactacactagcgtgtgcctcaagcttataaaagtcttcgttcttacttctaacttccaggccattcgggtcaccctgaacataaacagaaagctgagcttcctggctgtgttgtctggtctcctgctggagtctataatggtttactttttccagtctatggaatgggatgtggggagcgattatgcaatatttaagtcccaggatttctag

SEQ ID NO: 179476 - DNA, 2547 bp, synthetic construct
  misc_feature 1..2547: note = Description of Artificial Sequence: Synthetic coding sequence
  source 1..2547: mol_type = other DNA
atgaacagcagcagcgccaacatcacctacgccagccggaagcggaggaagccagtacagaaaaccgtcaagccaatcccggcggaagggatcaaaagcaatcctagcaagagacatagggatcggctcaatacagaactcgaccggctggcatctctgctgccgttcccgcaggacgtgatcaacaaactggacaagctgagtgtgcttcggctgagcgtctcgtacctgcgtgcaaaaagttttttcgatgtcgcacttaagtcgagccccacagagcggaacggggggcaggataattgtcgtgccgctaacttcagagagggcctgaacttacaggaaggagagttcctgctgcaggcattaaacggatttgttctcgtggttacaacagatgccctggtgttttacgctagctcaacaattcaagattatctgggctttcagcaaagtgatgttattcatcagagcgtttacgaactaattcacacagaagatcgagccgagttccaaagacagctgcactgggctcttaatccctcacagtgcacagaatcagggcagggaatagaagaggccaccggactaccccagaccgttgtgtgctacaacccagaccagatccctcctgaaaattcgcctctcatggaaagatgcttcatctgtagattgagatgcctcctggataattcctcagggtttctggcaatgaacttccagggcaaacttaagtatctacatggccaaaagaagaaaggaaaagatggcagtatcctcccaccacagctcgcgctgtttgctatcgcaacgcctttgcagcctccttccatcctggaaatccgcacaaaaaatttcatcttccggactaaacacaaactggactttactccaataggatgtgacgccaaaggccggatcgtactggggtatacagaggctgagctatgcactcgcggatcaggctaccaattcattcacgctgcggacatgctttattgtgcagagtctcatataaggatgataaaaactggcgaaagtgggatgatagtcttccgtttgctcactaagaacaatagatggacttgggtccagagcaatgcacgcctgctgtataagaatggtcgacccgactatatcatcgtcactcagagacccctaaccgacgaggagggcacagagcatcttaggaaacgtaacacaaagcttcccttcatgttcactacaggcgaggcagtattgtatgaggccaccaacccattcccagctattatggatccccttcctctgcggactaaaaacggcacaagcggaaaggactctgctactactagtactctgagcaaagacagcctcaacccaagttccctgctcgctgcaatgatgcagcaggacgagtccatttatctgtatcctgcctcatctactagcagcacggcacccttcgagaacaatttcttcaatgagtccatgaatgagtgtcgcaactggcaggacaataccgcaccaatgggcaacgatacaatactaaaacacgaacagattgaccaaccacaagacgtcaactcgtttgcgggaggacatccaggcttgttccaagacagtaagaacagtgatctgtatagcattatgaagaacttgggaattgattttgaagatatccggcatatgcagaacgaaaagtttttcagaaatgacttcagtggcgaagtggactttagagatattgacctgacagatgagatcttgacctatgttcaggacagcctgagtaaatccccattcatcccatcggattatcagcaacagcagtcgctggcccttaactccagctgcatggtgcaggagcatctccatctggagcagcagcagcagcaccaccagaagcaggttgtcgtggaaccgcagcagcaattgtgtcagaagatgaagcacatgcaggtgaacggcatgtttgaaaattggaattcaaaccaatttgtgccatttaactgtcctcagcaagatccccagcagtataatgtgttcacagaccttcacggtatttctcaagaatttccctacaagagtgaaatggattcgatgccctatactcagaactttatctcatgtaatcagcccgtgctgccccaacactcaaaatgtacagaactcgattatcctatgggctcctttgagccaagtccctatcccaccacatcatccctcgaagacttcgttacttgtcttcagctgccagagaaccagaagcatggactgaaccctcaaagcgccattatcaccccccagacttgttacgccggagcagtcagcatgtaccaatgccagccagagccccagcacacacacgtgggccaaatgcaatacaatcccgttttgccaggtcagcaagctttcctgaacaagtttcagaacggcgtgctgaacgagacatatcctgcagagcttaacaacataaacaacactcagaccaccacgcaccttcaacctctacatcatcccagtgaagccaggcccttcccggacttaacgtcttcaggctttctgtag

SEQ ID NO: 179477 - DNA, 2547 bp, synthetic construct
  misc_feature 1..2547: note = Description of Artificial Sequence: Synthetic coding sequence
  source 1..2547: mol_type = other DNA
atgaacagcagcagcgccaacatcacctacgccagccggaagcggaggaaaccagtgcaaaaaaccgtgaagcctatacctgcggaagggattaagtccaacccctctaaacgacacagagataggctgaacacagaactagatcggttggcaagtctgttgcccttccctcaggatgtcatcaataaactcgataagctgagcgttctacgcctgtctgtgtcttacctaagagctaagagttttttcgacgtggccctgaaaagcagtcctacagaaagaaacggcggtcaagataattgccgcgccgctaatttccgcgaagggctaaacctgcaggagggcgagtttttattacaggcactgaacggcttcgtgctggtggtgacgactgatgcactggttttttacgctagtagcaccatccaggattatttaggatttcagcagtctgacgtgattcaccaatctgtctatgaactcattcataccgaggatagggcagaatttcaacgccagctgcactgggccctcaatccatcgcagtgcacagagagcggtcagggcattgaagaagcgacgggacttcctcagaccgtggtatgctacaatcctgaccagataccccctgagaacagcccattgatggaaaggtgtttcatctgtagactgaggtgtctactggacaactcctctggtttcttagctatgaacttccaaggtaagctgaaatatcttcacggtcagaagaagaaaggcaaagatgggagcatactccctccccagctagcactctttgccattgccaccccactgcaaccaccctccatcctggagatccgcaccaagaatttcatcttccggactaaacacaaactggatttcacccctataggctgcgacgcaaaaggtcgaatcgtcttgggatatactgaggctgagttgtgtactcgcggatccggctaccagtttattcatgccgcggacatgctgtattgtgctgaaagtcatatcaggatgataaaaactggggaatctggcatgatagtgttcaggctgctaacaaaaaacaataggtggacatgggttcagagtaatgcacgactgctgtataaaaatgggagacccgactatatcatcgtcactcagaggcctctgacagacgaggaaggcacagaacatctgcgtaagaggaacactaaactcccattcatgttcaccacgggagaggccgtgttatacgaggccacaaatccctttcctgcaatcatggaccctttgcctctgcggaccaaaaacgggacttcaggaaaggattctgccactacaagcacactgtctaaggattcactgaatcctagtagcctgcttgccgccatgatgcaacaggatgaatccatatatctttacccagcgtcatcaacttctagtacagcacctttcgaaaataatttcttcaatgagtccatgaatgaatgccggaactggcaggacaacaccgcgcccatgggcaacgacacaatcctgaaacacgaacagattgaccagcctcaggacgtgaactcgttcgctggggggcatcccggactgttccaggactctaagaatagcgatttgtattcaattatgaaaaaccttggcatcgacttcgaggatatcaggcacatgcagaatgagaaatttttccgcaacgacttctccggcgaggtggattttcgggacatcgatctgactgacgagatattgacttacgtccaagatagcctgtctaagtcccccttcataccgagcgattaccagcagcagcaaagcctggccctgaattctagctgcatggtgcaggaacacctgcaccttgagcaacagcagcagcaccatcagaagcaggttgtcgtagaaccgcagcagcagctgtgtcagaaaatgaagcatatgcaggtgaatggtatgtttgaaaattggaactccaaccaatttgtgcctttcaattgtccccagcaagatcctcagcagtacaacgtttttactgacctccatggcataagccaagaatttccatataagagcgagatggatagtatgccttatacacagaattttatttcctgcaaccagcctgtgctgccccagcactccaaatgcactgagttggactaccctatgggatctttcgaaccttctccgtaccccacgaccagcagccttgaagattttgttacttgcctccagttgccggaaaaccagaaacatggcctgaaccctcaatccgcaattataaccccccaaacatgctatgcaggagccgttagcatgtaccaatgccaaccagaacctcagcatacccacgtggggcaaatgcagtataatccagtcttgccaggacagcaagcgttcctaaataaatttcaaaatggagtgctaaacgagacctaccctgccgaactgaacaacatcaacaatacccagactactacacacctgcaacccctacaccatcccagtgaggcccgccccttcccggatctaacaagttccgggttcctctag

SEQ ID NO: 179478 - DNA, 993 bp, synthetic construct
  misc_feature 1..993: note = Description of Artificial Sequence: Synthetic coding sequence
  source 1..993: mol_type = other DNA
atggccgacatcatcgcccggctgcgggaggacggcatccagaagagagtgatccaggaaggaagaggagagctccctgattttcaggatggtacaaaagctaccttccactaccgcactctgcattccgatgacgagggcacagtactggacgactcacgggctcgcggaaagcccatggaactgatcatcggaaagaagtttaagctgcctgtttgggagaccatcgtctgcaccatgagagagggcgaaatagcccagttcttatgtgatatcaagcacgtggtgctgtacccgttggtggccaaatcccttaggaacattgctgtgggtaaggacccactggagggtcagaggcattgctgtggggtagcacagatgcgggagcattcgagcttgggacacgccgacctagacgcactgcagcagaatccgcaacccctgatctttcatatggaaatgctcaaggtggaatcaccaggcacttatcagcaggatccctgggccatgacagacgaagagaaagctaaagcagtgcctctgattcaccaagaaggaaaccggctgtaccgggagggtcatgttaaggaagccgctgccaaatattatgatgctatagcttgcctcaagaatctgcaaatgaaggaacagcctggctccccagagtggattcagctggaccagcaaataactccactactgctcaactactgccaatgtaaacttgtcgttgaggaatattacgaagtgctggatcactgctcatctattttaaacaagtacgacgacaacgtcaaggcctactttaaaagaggaaaggctcatgctgccgtctggaacgcccaggaagcccaggctgattttgccaaggtccttgagctggacccagctcttgccccggtcgtaagccgggagctgcaggcactggaagcccggatccgtcagaaggatgaagaagataaagcaaggtttagggggatcttcagtcattag

SEQ ID NO: 179479 - DNA, 966 bp, synthetic construct
  misc_feature 1..966: note = Description of Artificial Sequence: Synthetic coding sequence
  source 1..966: mol_type = other DNA
atggacgccgccctgctgctgaacgtggagggcgtgaagaagaccatcctccatggtggaaccggtgagttacctaatttcatcaccgggtctcgggtgatcttccactttagaaccatgaaatgtgatgaagaacgaacggtgatagatgattcacggcaagtagggcagccgatgcacattatcatcggtaatatgttcaaactggaagtgtgggagatactgctgacaagcatgcgagttcatgaggtcgctgagttctggtgtgataccattgtggacgccccctcagattaccaacgtgagacctggaacctgagtaaccatgaaaagatgaaggccgttcctgtgctccatggggaaggcaatcgtctctttaaactgggtaggtatgaggaggcctctagcaaatatcaagaagccatcatctgcctgcgaaacctgcagaccaaggagaagccttgggaagtccagtggttgaaattagaaaagatgattaatacacttatcctaaactattgccaatgtctgctgaaaaaagaggaatactacgaagtgcttgagcacacaagtgatatcttgagacatcatcccggaatcgtgaaggcctattacgttcgcgcccgggcgcatgccgaggtctggaatgaagccgaggccaaggctgacttgcaaaaagtcctggaacttgaaccaagcatgcaaaaagctgtccgcagagaattgcgcctactggagaatcgcatggcagagaagcaggaggaggagcggctccgctgtaggaacatgctgtcgcagggcgccactcagccccctgcggaacctcccaccgaaccaccggcccagtccagtacggagcccccagccgaaccacccactgccccgtccgcagagttaagcgctgggcctcctgccgagccagctaccgaaccccctccttcccctggccactccttacagcactag

SEQ ID NO: 179480 - DNA, 975 bp, synthetic construct
  misc_feature 1..975: note = Description of Artificial Sequence: Synthetic coding sequence
  source 1..975: mol_type = other DNA
atggacgccgccctgctgctgaacgtggagggcgtgaagaagaccatcctccatggcggaaccggtgagctacctaattttataacggggtcaaggcacactggcgtctatcctattcttagtagatctctgaggcagatggcccaaggcaaagatcccacagagtggcacgtccatacgtgcggactggcaaatatgttcgcctaccatactctgggctatgaggacctggacgaactccagaaagaaccacagcccttagtattcgtcatcgagttattgcaggtggacgcccccagtgattatcaacgggagacttggaatctgtctaatcacgagaagatgaaggcagttccagtgttgcatggtgaaggtaacaggctgttcaagctaggccgatatgaggaagccagctcaaaataccaggaggcaattatctgcctgcgcaatttacaaacaaaagaaaaaccctgggaagttcagtggctaaaactggaaaagatgataaatacccttatactaaactactgccagtgcctactgaaaaaggaagagtattacgaggtactcgaacacacatccgacatactgagacaccacccgggcatagtgaaagcttattatgtgcgcgccagggcccacgcagaagtgtggaatgaggcagaagctaaggccgacttgcagaaggtcctagagcttgaaccttccatgcaaaaggctgtgagacgtgagctgcgcctcctggaaaatagaatggccgagaagcaagaggaagagcggctgcgctgtcggaacatgcttagccagggcgccactcagcccccagctgaaccacccaccgagccaccagcccaatctagcacggagccaccggctgaacccccaactgccccaagcgccgaacttagcgcaggtccgcccgcagagcccgcaaccgagccacccccatcccctggtcacagcttgcagcattag

SEQ ID NO: 179481 - DNA, 1155 bp, synthetic construct
  misc_feature 1..1155: note = Description of Artificial Sequence: Synthetic coding sequence
  source 1..1155: mol_type = other DNA
atggacgccgccctgctgctgaacgtggagggcgtgaagaagaccatcctccacggaggtaccggcgaattaccaaatttcatcacaggatccagggtgatctttcactttaggactatgaagtgcgatgaggagcgcaccgtcattgacgacagtcggcaggttggtcaacctatgcacatcattattggaaacatgtttaaactggaagtctgggagatattattgacttccatgagagtgcacgaagtagctgagttctggtgcgacaccatacacactggggtgtatccaattctgtcaagatccctacgacaaatggctcaaggcaaagaccccacagaatggcatgtacacacatgcgggttagccaacatgtttgcgtaccataccctgggctatgaagacttagacgagctgcagaaagaaccacagcccctggtgtttgtgatagagctgctccaagtggacgccccctcggattaccagagggaaacttggaacctcagcaatcatgaaaaaatgaaagctgtgcctgtcctgcatggcgaaggtaaccgcctgtttaaactaggcaggtacgaagaggcatcatctaaataccaagaggctatcatttgcctcaggaacttgcaaacgaaggaaaagccctgggaagtgcagtggcttaaactggagaagatgatcaatactttgatcctgaattattgccagtgtctactgaagaaagaagaatactatgaggtcctggagcacaccagtgacatcctacgtcatcacccggggatagtgaaggcatactatgttcgagccagagcgcacgccgaggtttggaacgaggcggaggccaaagccgacctccagaaagtgctcgaattggagcccagcatgcaaaaagccgtgcggagagaactcaggctgcttgaaaaccggatggccgaaaagcaagaagaggaaaggctcagatgtcgcaacatgctctcccagggcgccacccagcctcctgctgagcccccaaccgaaccacccgcacagagcagcacagaaccccctgcagagcctcctactgctccttcagccgagctgagcgctggtccacccgccgagcctgcgaccgagccccctcctagtcctgggcatagcttgcaacactag

SEQ ID NO: 179482 - DNA, 981 bp, synthetic construct
  misc_feature 1..981: note = Description of Artificial Sequence: Synthetic coding sequence
  source 1..981: mol_type = other DNA
atggacgccgccctgctgctgaacgtggagggcgtgaagaagaccatactgcacggtggcaccggagagcttcccaatttcattacaggctcacgggttattttccattttaggaccatgaagtgcgacgaagagcggacagttattgatgattcccggcaagtgggacagcccatgcatatcatcatcgggaacatgtttaaattagaggtttgggagatcctgctgacaagcatgcgtgtccatgaggtggcagaattctggtgtgacactattcacaccggcgtctacccgatcctgagtaggtccctgcgtcaaatggcacaagggaaagaccctactgaatggcatgtccatacttgcggattagctaacatgtttgcttaccataccttgggatacgaggatctggatgaacttcagaaagagcctcagccgctcgtgttcgtcatagagctactccaggtggatgcgcctagtgactaccaacgggagacctggaatttgagcaaccatgaaaaaatgaaggcagtgcccgtgctccatggcgaaggaaacaggctgtttaagctgggaaggtatgaagaggctagcagcaagtaccaggaggcaattatctgcttgaggaacctccaaacgaaggagaagccatgggaggtgcagtggctaaaattggaaaaaatgattaacaccttgatcctcaactactgtcaatgtctcctaaaaaaggaagaatattatgaagtgctggagcacacctccgacattctgagacaccatccgggcatcgtcaaggcctattacgtgcgggccagggcacacgccgaggtgtggaatgaggccgaggccaaggcagacctgcaaaaagtgctcgagctcgaaccgagcatgcagaaggctgtcaggcgtgagctgaggctccttgaaaatgcctggaggagatcacgtcgtagatccggctgtgcggccggtacctgctag

SEQ ID NO: 179483 - DNA, 975 bp, synthetic construct
  misc_feature 1..975: note = Description of Artificial Sequence: Synthetic coding sequence
  source 1..975: mol_type = other DNA
atggacgccgccctgctgctgaacgtggagggcgtgaagaagaccatcctacatggcggcacgggggaactgccaaatttcattacaggctctagacacacaggagtctacccgatcctttcccggtctttgcggcagatggcccagggcaaggacccaacagagtggcacgtgcacacgtgcggactggctaacatgtttgcttaccataccctcggttacgaagacttagatgagcttcagaaggaaccgcagccacttgtatttgtcattgagctccttcaagttgacgccccttccgattaccaaagggagacctggaacctgtcgaatcatgaaaagatgaaggccgtaccagtcctgcacggcgagggaaaccggctgttcaagctgggcagatacgaggaagcatcatcaaagtaccaagaggcgatcatctgcctgagaaatttgcagacaaaggaaaaaccttgggaagtgcaatggctaaagttggaaaagatgattaatacattgatattaaactactgccagtgcctgcttaaaaaggaggagtactacgaagtgctcgaacacacttcagatattttacggcatcacccgggcatcgtgaaagcgtactacgtccgagccagagcgcacgctgaggtctggaacgaggcggaggccaaagctgacttacagaaggtgctggaactggagccctccatgcaaaaggccgtacggcgggaactacggcttcttgaaaatcgaatggcagaaaagcaggaagaagagcgtctacgctgtagaaacatgttatcccagggagcaacgcaacctcctgcagaaccacctacagagccccccgcccagtcatcaactgaacctcccgccgaaccaccaactgctccatcagcggagctcagcgcagggccacccgcagaaccggcgaccgagcctccaccgagtccagggcatagccttcaacactag

SEQ ID NO: 179484 - DNA, 1251 bp, synthetic construct
  misc_feature 1..1251: note = Description of Artificial Sequence: Synthetic coding sequence
  source 1..1251: mol_type = other DNA
atggccgccaccaccgccaaccccgagatgaccagcgacgtgcccagcctcggtcccgccatcgcttctggcaatagcgggccaggcatccagggggggggagccatcgttcaacgcgccatcaagagaaggccggggttggatttcgacgacgacggggaggggaactcgaagtttctgcggtgcgacgacgaccaaatgtccaatgacaaagaacggtttgccaggagcgacgacgagcaatcgagcgctgacaaagaacgcctggcccgcgagaaccattctgagatagagcggcgacgtcgaaacaaaatgactgcctacatcaccgaactgtcggacatggtccctacctgttctgcgctcgccaggaagcccgacaaactgacgattcttcgcatggcagtgtcgcacatgaagagcctcaggggaacaggaaatactagtaccgatggaagttataagccgtccttcctcaccgatcaggagttgaagcatctgatccttgaggctgcagatggatttctgttcatagtgtcttgcgagacaggtcgggtcgtgtatgtgtccgatagtgtgacgcctgtgctcaaccagccccaatccgagtggtttggtagcactctatacgaccaagtccaccctgacgatgtggataaacttagggagcagctctcaacatccgaaaacgccctcacaggacggattctggaccttaagaccgggaccgtgaagaaggagggccagcaatcatctatgcggatgtgtatgggatccagaaggagcttcatctgccgtatgcggtgcggatcaagctctgtcgatcctgtgtccgttaaccgactgtctttcgtgagaaataggtgcagaaatggtttggggtccgtgaaggacggcgaacctcatttcgtggtcgtgcactgtacagggtatatcaaagcctggccaccggcaggcgtctcactcccagatgatgacccagaagccgggcaaggcagcaagttctgtcttgttgccatcggccggctccaggtaacgtcaagccctaactgcacagacatgtccaatgtgtgccagcctaccgagttcatatccaggcataatattgaggggatcttcactttcgtcgatcaccggtgtgtcgcaactgtaggttatcagcctcaggagctactcggcaaaaacatcgttgagttctgtcaccccgaagaccagcagctgctccgggatagctttcagcaggagctttag

SEQ ID NO: 179485 - DNA, 2223 bp, synthetic construct
  misc_feature 1..2223: note = Description of Artificial Sequence: Synthetic coding sequence
  source 1..2223: mol_type = other DNA
atgtaccaccactgggtgcagcccctgcccctggagaccctggacctcgaattcaaagtggaagagcctctctcacgcggtctgctgtctggtgatcaggcggggttgaagtacctccttctggccttcctgcggctggattttgacgatgacggcgaaggaaacagtaaatttctgcggtgcgacgatgaccagatgtcaaatgacaaggagaggtttgcacgtgaaaaccatagcgaaatcgaaaggagacgccggaacaaaatgactgcctatatcacagagctgtccgacatggtacccacctgctctgccctggccaggaagccggataaactgaccatactgcgtatggccgtctcacatatgaagagtctgcggggcacaggaaataccagcaccgacggtagttataaaccctctttcctgaccgatcaggagctaaagcaccttatcttagaggcagctgacggatttcttttcattgtgtcatgcgagacaggtagagttgtatacgtctcagacagcgtgactccggtgctgaaccaaccacaaagcgaatggtttggatctaccttgtacgatcaggtgcaccccgacgacgtggacaaactgcgcgaacagctgagcacgtccgagaacgccttaacaggaagaatactcgatctcaaaacaggtaccgtgaaaaaagagggccaacagtcgagcatgaggatgtgcatgggttcccggcggtcgttcatctgtcgaatgaggtgtgggagttcatccgttgacccagtgagtgttaacaggctgagcttcgtgaggaataggtgtcgcaacggattggggagtgtgaaggatggggagcctcacttcgttgtggtccattgcacaggctatatcaaggcctggcctccagcaggtgtgagtcttcctgatgacgacccagaggcaggacagggctctaagttctgcttggtcgccattgggaggttgcaggtgacaagctctccaaattgcacagacatgagcaacgtttgtcagccaactgagtttatctcacgccacaatattgaaggaatctttacctttgtagaccatcgctgcgttgcaacagtgggctaccagccgcaagagctcctgggtaaaaacattgtcgaattctgtcatccagaggatcagcagctactcagggactctttccagcaggtcgtgaagttaaagggacaagtgttaagtgttatgttcaggttccgcagtaagaaccaagagtggctatggatgcgcacttctagcttcactttccagaacccttactctgacgagatcgaatatataatctgtaccaatacaaacgttaaaccgttgacttataggcaacagcagcagcagacagaactggacatggtgccgggccgggatggactcgcttcatacaaccatagccaggtggtccaaccagtaaccactacgggtcctgagcacagcaaaccactcgagaagagcgacgggttgttcgcccaggatcgcgacccccggttctccgaaatttaccacaacattaatgctgaccagtccaagggaataagctctagcaccgtgccggccactcaacagctctttagtcagggtaacacattccctcccactcccagacccgccgaaaattttaggaattcaggacttgcacctcccgtaaccattgtccaaccctcagcctctgctggccagatgcttgcccagatttcacggcacagcaacccgactcagggggcaactcctacatggacgccaacaacaaggagcggcttcagcgctcaagtcgctacccaggccaccgctaagacccggacttcccagtttggcgtgggcagctttcagaccccctcttccttcagttcaatgtccctacctggcgcaccaaccgccagtcccggtgctgcggcttatccctccttaaccaatagggggtcaaacttcgcccctgaaacaggacaaaccgccggccaatttcagactcgtaccgccgagggagtcggggtttggccgcagtggcaggggcagcaacctcaccacaggtcttccagttccgaacagcatgtacagcaacctcccgcacaacagccgggacagcctgaagtttttcaggaaatgctttccatgctaggcgaccaatccaattcgtataataatgaggaatttccagatctgaccatgttccccccattctctgaatag

SEQ ID NO: 179486 - DNA, 1251 bp, synthetic construct
  misc_feature 1..1251: note = Description of Artificial Sequence: Synthetic coding sequence
  source 1..1251: mol_type = other DNA
atggccgccaccaccgccaaccccgagatgaccagcgacgtgccctctttgggtcccgctatcgcaagcggcaacagcgggcccggaattcaaggaggcggagcaatcgttcagcgcgccatcaagagacgccctggcctcgactttgacgacgatggtgagggcaatagtaagtttctcaggtgcgacgatgaccagatgtccaacgataaggagcgtttcgcacgttccgacgatgagcagtctagtgccgacaaagagagactggctcgagaaaaccatagtgagatcgaacggcggcgcagaaacaagatgaccgcctacatcacggagctgagtgatatggttcctacatgcagcgccctcgccagaaaacccgacaagctcaccatcctcagaatggctgtttcacacatgaaatcccttcgtgggacaggtaatactagcacagatgggagctataagccttcattcctgacagatcaggaactgaaacacctgatcctcgaggctgcagacgggtttctcttcatcgtgagctgcgagacaggtagggttgtgtatgtgagcgacagcgtgacgccggtcctgaatcagccgcagtctgagtggttcggatctaccctttacgaccaggtacaccctgacgatgttgacaagctgcgtgagcagctgagcaccagtgagaatgctttgaccggtcgtatcttggacttgaaaacggggacagttaagaaggagggccaacagtcctcaatgcggatgtgtatggggagtcgccgttccttcatatgtcggatgagatgcggcagcagctctgtggatcctgtttccgtcaatcgattatcctttgtgcgtaacaggtgccggaatggactcggatctgttaaggatggcgaaccacattttgtggtggtgcactgcacgggctatattaaggcctggccaccagctggtgtatctcttcccgatgacgatcccgaagccggtcagggctccaagttttgcctagtggcaatcggcaggttgcaagtcacatcttcccctaattgtactgacatgtcaaatgtgtgccagccaaccgaatttatttctaggcataatattgaggggattttcaccttcgtggaccatagatgcgttgctaccgtcggttatcagccacaggagcttctcggcaaaaacatcgtagagttttgccatcccgaggatcaacaattactgagggatagctttcagcaggagctgtag

SEQ ID NO: 179487 - DNA, 2325 bp, synthetic construct
  misc_feature 1..2325: note = Description of Artificial Sequence: Synthetic coding sequence
  source 1..2325: mol_type = other DNA
atggccgccaccaccgccaaccccgagatgaccagcgacgtgcccagcctgggtcccgccattgcatcgggaaacagcggacctgggatccaagggggaggcgcaattgtgcagcgggccataaaacggagacccggcttggacttcgacgacgatggggaaggcaactctaagtttctgcggtgcgacgacgatcagatgtctaacgataaggaacgttttgcccgcgaaaatcatagcgagatcgagcgcagacggcgaaataaaatgacagcttacatcaccgaactgagtgatatggttcctacatgctcagcgctcgctagaaagcccgataagctaaccattctccgcatggccgtatcccacatgaaatccttgagaggcacaggaaacacttcaaccgacggctcatataagccatccttcctgacagaccaggagctaaagcaccttatcttggaagcggcagacggctttctattcatcgtcagctgcgaaactgggcgagtggtttatgtgagcgatagcgtaaccccggttctcaatcaacctcagtcggaatggttcggcagtaccctgtatgaccaggtccacccggatgatgtggacaagcttcgcgaacaactgtcgaccagcgagaatgcgttgaccggtagaatacttgacttaaagacgggtacagtaaagaaagaggggcagcaaagcagcatgcgcatgtgtatgggctccagaagatcttttatctgccggatgaggtgtgggtcttccagcgtggatccagtgagtgtaaatcggctcagctttgttcggaatagatgtcgcaatgggctcggatctgtaaaggatggggagccacatttcgtcgtggtgcactgtactggctacatcaaagcatggccccccgcaggagtgtccctgccagacgatgatcccgaggctggtcaaggaagcaaattttgcttggtcgccataggtagactgcaggtcacgtcttcaccaaactgtactgacatgagtaacgtctgtcagccaacggaatttatctctcgtcataatatcgaaggcattttcacctttgttgaccatcgatgtgttgctactgttggctaccaacctcaggagctattgggaaagaatatagtggagttctgccatcctgaagatcagcagttgctcagagactctttccagcaagttgtgaaactcaaaggccaagttctttccgtcatgttccgcttcagatctaaaaaccaagagtggctgtggatgcgaacttctagttttacttttcagaatccctacagcgacgaaattgaatacattatctgcaccaacaccaacgttaagaatagttcacaggaacccaggcctacattatcaaatacaatccagagaccacaactgggcccgaccgctaatttacccctggagatgggcagcggccagctcgcccctcggcagcagcagcaacagaccgagctggacatggtgcccggccgagatggtctcgcctcctacaatcattcacaggtcgtccagcccgttacaacaacaggccccgaacactctaaaccactggagaagtctgatggtcttttcgctcaggaccgcgatcctcggttcagtgagatttatcacaatattaacgcggatcaatccaagggcatctcatccagcactgtgcccgcaacccaacagctattcagccagggaaataccttccctccaaccccccgaccagccgagaacttccgtaacagtggtctggctccccccgtgactatcgtccagccgtctgccagcgcgggccaaatgctggctcagatctcaagacactctaacccaacgcagggagcaaccccaacttggacacctactactagatctgggttttcagcccaacaggtggcgacccaggctaccgctaagacaaggaccagtcagttcggtgttggatctttccaaacccctagcagtttttccagcatgtcactgccaggagccccaactgcatcccctggagccgcggcatacccgtccctgaccaataggggtagtaatttcgcccctgagacaggccaaaccgcaggacagtttcaaacccgcactgccgaaggggtgggggtgtggccccagtggcagggtcagcaaccgcaccaccggtcttcctcatccgaacagcacgtgcagcagccacccgcccagcagccgggccagccagaggttttccaggaaatgctctccatgctcggagatcagtctaactcctataataacgaagagtttccagatttaactatgtttccacctttttctgagtag

SEQ ID NO: 179488 - DNA, 2328 bp, synthetic construct
  misc_feature 1..2328: note = Description of Artificial Sequence: Synthetic coding sequence
  source 1..2328: mol_type = other DNA
atgaccagcgacgtgcccagcctgggccccgccatcgccagcggcaatagcggtccagggatacagggaggaggtgctatcgtccagcgagccataaaaagacggccggggctggattttgatgacgacggagaaggaaatagcaagtttctgcgatgtgatgacgaccagatgtcaaatgacaaagaaaggtttgcccgatcggatgatgaacagtcctcggccgataaggagcgactggctcgtgagaaccattcggagatagaaaggaggcgcaggaacaaaatgactgcgtacatcaccgaattgtccgatatggttccaacttgctccgcattggccagaaaaccagataaactcactattctgcgcatggcagtgagtcatatgaaaagcttgcgggggacaggtaacacttccaccgatgggagttacaagccttccttcctgacggaccaggagctgaagcatctgattttagaggctgccgacggatttctctttatcgtgtcttgcgaaactggtagagtcgtgtatgtgagcgactcggtcactcccgtgctgaatcagccgcagtccgagtggttcggctccacactgtatgaccaggtgcacccggacgatgtggataaactgcgggagcagctttccacgagcgaaaatgcactgaccggccgcatcctcgaccttaagactggaacagtgaaaaaggaaggccagcagagctcgatgagaatgtgcatggggagcagacgtagttttatctgccgaatgcgctgcggctcatcctccgttgacccagtgagtgtcaaccggctctctttcgttaggaaccgctgccggaatggacttggctctgttaaggacggcgaaccccactttgtagtggtgcactgtacaggatatatcaaggcctggcctcccgccgatgatgatccagaagctgggcaggggtcaaaattttgcttagttgccatcggaaggctgcaggtgaccagttctcccaattgcactgatatgtcaaatgtgtgccagccaaccgagttcatttcacggcacaatatcgaggggatcttcacgttcgtggatcatcgctgtgtggcgacagtaggataccagccccaggagttacttggcaaaaacattgtagaattctgtcaccccgaggaccaacagctcctccgggactccttccagcaggtagtaaaactgaaaggacaggttctgagcgttatgttcaggttccgtagtaagaaccaggagtggctatggatgagaacctcctccttcactttccagaatccgtattcagatgaaatcgaatacattatctgtactaacacaaacgtgaagaattccagccaggaacccagacctactttaagcaatactatccagcggcctcaactcgggcccaccgctaacctgcccctggagatgggatccggccagctggcacctcggcagcaacaacagcaaactgaactggatatggtccctgggcgtgacggtctcgcttcctacaatcattctcaagtggtgcagccggtcactactactggccctgagcactctaaacccctcgaaaagtctgacggtcttttcgcccaggatagagatccacgcttctctgaaatataccataatatcaacgccgatcagtctaagggcatttcatcttcaacagttcccgctacacaacagttgttttctcaggggaacacctttccccccactccccgacccgccgagaactttagaaactctgggcttgcccctcccgtaacaattgtccagccgtccgcgtccgccggacagatgctggctcagatctcacgccatagtaatccaacccagggtgcaacacctacctggactcccaccactcggagcggattctcagcgcaacaagtggcgacacaggcaactgcaaaaaccagaacttcccaattcggggttggttcattccagaccccctccagcttctcatcaatgtcactgcctggggccccaaccgcctcacctggcgccgcagcctatccaagcctcaccaacaggggaagtaacttcgctcccgaaaccggccagacagccgggcagttccaaacacggacggcagagggggtgggcgtgtggccgcagtggcaaggccagcagccacatcataggtcatccagttccgaacagcatgtacaacaacctcctgctcagcagcccggccagcccgaggtattccaggagatgctaagcatgctcggtgaccagtctaattcttacaacaacgaggagttccctgacctaacaatgttccctcccttcagtgaatag

SEQ ID NO: 179489 - DNA, 1428 bp, synthetic construct
  misc_feature 1..1428: note = Description of Artificial Sequence: Synthetic coding sequence
  source 1..1428: mol_type = other DNA
atgagcgccaccgccgccgcccggaagcggggcaagcccgccagcggcgcaggggctggcgctggagccggcaagcggaggcgtaaggctgatagtgcgggagaccgcggcaaatctaaaggcggaggcaagatgaacgaggaaatttctagcgacagcgaatctgagtccctggctcccaggaagcccgaggaagaggaagaagaggagcttgaagaaaccgcacaggagaagaaactgcgcctggcaaaactgtacttagaacagctccgccaacaagaggaggagaaagccgaagctcgggcattcgaggaagatcaagttgcgggacgtttgaaagaggacgttctggagcagagagggcgtctgcagaaattagtggccaaggagattcaagccccggcaagcgccgacatacgcgtcctgaggggacaccagctgtcaatcacttgcctggttgtgacgcccgacgactccgcaattttttcggctgctaaggattgttcaatcattaagtggtccgtcgagagcggaagaaaattgcacgtgatccccagggctaagaaaggtgctgaaggtaaaccccctgggcactcaagtcatgtcctatgtatggccatcagctccgacgggaaatacctagctagcggggatcgatccaagttaatacttatatgggaagcccagtcatgccagcacctgtacacgtttaccggccaccgggacgctgtcagcgggctagcctttaggagaggtacacatcagctttacagcactagtcacgacaggtctgtgaaggtttggaatgttgcggaaaatagctatgtggagacattattcggccaccaggacgccgtcgccgccctcgacgccctgagccgagaatgttgtgtgacagccggcggcagggacggcaccgtgcgcgtttggaaaatccctgaagagtcccagctggtcttctatggccaccagggaagcattgattgcatccacctgatcaacgaagagcatatggtgagtggcgccgatgacggaagtgtcgcattgtgggggctgtccaaaaaacgacccctcgctctgcagcgagaggcgcacgggttacgcggggagcctggcctggaacagcctttttggatttccagtgtggctgccctcctgaacactgatctcgtggctactggctcacatagtagttgtgttcggctgtggcagtgcggcgaaggtttccgtcaattagatctgctgtgtgatattccccttgtggggttcatcaatagtctcaaattcagctcttctggagactttctggtcgctggcgtaggacaagagcatagacttggccgctggtggaggatcaaggaggccaggaattctgtctgtataatacccctccgacgggtccctgtgccgccagccgccggcagttag

SEQ ID NO: 179490 - DNA, 2154 bp, synthetic construct
  misc_feature 1..2154: note = Description of Artificial Sequence: Synthetic coding sequence
  source 1..2154: mol_type = other DNA
atggccacccccgccgccgtgaacccccccgagatggccagcgacattccaggcagtgtgacccttccagttgcacctatggctgcgaccggacaggttagaatggccggcgccatgcccgcgcgaggaggcaagcggcgtagcgggatggacttcgatgacgaggatggggaggggccttcaaagttttcgagggagaaccattccgagattgaacgccggagacggaacaaaatgacccagtatatcactgagctttctgatatggtgccgacatgctccgcactggccagaaagcctgacaaactaacgatcctaaggatggcagtgagtcacatgaaatccatgcgtggcactggtaacaaatctaccgatggtgcttataagcccagctttcttacggagcaggagcttaagcaccttatactggaggctgccgacggattcctttttgtagttgctgccgagaccggtcgggtgatttacgtctccgactccgtgacacccgtcttgaaccagccacagagcgagtggttcggcagcaccctgtatgagcaggtacacccagacgatgtcgaaaagctgagggagcaactgtgcaccagtgagaactcaatgacgggtcgtatactggacctgaaaacgggtacggtcaaaaaggaaggacagcagtcatccatgagaatgtgtatgggttcccggaggtcatttatatgtaggatgagatgcggtaatgctccattggaccatctacccctcaaccgaatcactacaatgcgtaagcgtttccggaacggtctcggccctgtcaaggagggcgaggcgcagtatgcagttgtccactgcaccggttatattaaagcctggcccccggccgggatgacaattccggaagaagatgcagatgtcggccagggcagcaaatattgtctagtagcaatcggacggctacaagtgaccagttccccagtctgcatggacatgaacggaatgtcggtccccactgagttcctgagcaggcacaattcagacgggataattaccttcgtggacccccgatgtatttctgtaattggataccagccccaggatcttctgggaaaagacattctggaattctgtcaccctgaggaccaatcccacctgcgagagagctttcagcaggtggtgaaacttaagggccaagttttatctgtcatgtaccgattcaggacaaagaatagggaatggatgttgattaggactagctctttcacgtttcagaacccttactccgacgaaattgaatatataatttgcaccaacacaaatgtgaagcagctgcaacagcaacaggctgaattagaggtgcatcaacgagatgggctgagctcctatgatctgagccaagtccctgttcccaaccttcccgccggtgtccatgaggctggaaagtctgtggaaaaagctgacgcgatcttcagccaagaacgagatcccagattcgcagagatgtttgctggcattagtgctagcgagaagaaaatgatgtcatcagctagcgccgccggcacccagcagatatacagccagggctcacccttcccttctggccactctgggaaggcattcagtagctccgttgtccatgtcccaggtgtaaacgacatacagtcttcaagcagtacagggcagaatatgtctcagatctccagacagctgaatcagtcccaagtcgcctggactggctctcgaccacccttcccaggccagcaaattccgtcccagtcttcaaaaactcagtcgtccccattcggaattggcacatctcacacttaccctgccgatccatcttcttactcccctctatcttcccctgccacttcatctccctctggtaatgcctactcctccctcgccaatagaacacccggattcgccgaaagcggtcagagttcgggccaattccaaggcaggccctctgaagtgtggagccagtggcaaagccagcatcacggacagcagtccggcgagcaacacagccaccagcagccgggacagacagaagtctttcaagatatgctgcctatgccgggagaccccacacaggggacaggtaactataacatagaagactttgcagatctgggaatgttcccaccattcagcgagtag

SEQ ID NO: 179491 - DNA, 2118 bp, synthetic construct
  misc_feature 1..2118: note = Description of Artificial Sequence: Synthetic coding sequence
  source 1..2118: mol_type = other DNA
atggccagcgacatccccggcagcgtgaccctgcccgtggcccccatggctgctacgggacaggtgcggatggccggggcaatgccagcaaggggtggcaagaggaggtcaggcatggacttcgacgatgaagacggggaagggccaagtaaattttctcgcgagaatcactctgagatcgaaagacggcgccggaataaaatgacgcagtacatcactgaactgagcgatatggtgccaacatgcagtgcgctggctagaaagccagataagctgaccattttgaggatggcggtttcacacatgaaatctatgaggggcacaggcaataaaagcacagacggagcatataagccttcgttcctcactgagcaggaattaaagcaccttatcctggaagctgcggatggctttctgttcgtggttgctgctgagaccggcagggtgatctatgtgagcgactcagttacccctgtcctcaatcaaccacagagtgagtggttcggatcaacactgtacgagcaggtccatccagacgacgtggagaagctccgtgaacagctttgcacctctgagaattcaatgactggaaggattcttgacctcaaaacaggcactgttaaaaaggaaggacaacagagtagtatgcggatgtgtatggggtccagacgatccttcatttgccgcatgcgctgtggaaatgcaccattggaccatctgccactgaatagaatcacgactatgagaaaacgcttccgaaatgggctcggcccagtaaaggaaggggaggctcaatacgctgtggttcactgcacagggtatattaaagcgtggccacctgctgggatgacgatccctgaggaggatgccgatgtcggtcaaggctccaagtattgtctcgtagcgatcggacggctgcaggtgaccagcagtcctgtttgcatggacatgaacggcatgtccgtgccaacagaattcctgtctcggcacaactccgacggaatcataacttttgtcgatccaagatgcatcagtgtgatcggataccagccacaggacctactcggcaaggacatcctggaattctgccatcctgaagaccagtctcatctaagggagtccttccagcaggtggtgaagctgaagggccaggtcctgtctgtgatgtataggttccggactaagaaccgtgagtggatgctgattagaacctcctctttcacgtttcagaacccgtatagcgacgagattgagtacatcatttgcaccaataccaatgtcaaacagctgcaacagcagcaggccgagctcgaagtccaccaacgcgacggtctctcctcttacgatctctcccaggtccccgtaccaaatttgcccgccggcgtccatgaagccggaaagagcgtcgagaaggccgatgctatcttctctcaggaaagggatccccgtttcgccgagatgttcgccggcatcagtgcatctgaaaaaaaaatgatgtcctcagcttccgctgctggtacccaacaaatctatagccagggatccccatttccttccggccatagcggcaaggccttcagttcttccgtcgtccatgtcccaggtgtcaacgatatccagtctagcagcagtaccggccagaacatgagtcagatttctcggcagctgaaccaaagtcaggtggcctggacagggtctcggccaccttttcctggtcagcagatcccaagtcagtcgagcaagacccaaagtagtcctttcggtatcgggacaagccacacgtatccagcagacccaagctcctattcacctctgagctctcctgctacgtcttcaccctcaggcaatgcatacagttctcttgcgaacaggacccccggcttcgccgagtccggccaatcatccgggcagttccagggacgacccagcgaggtctggagccagtggcagtcccaacaccacggccagcaatccggagagcagcattcacaccagcagcctggccagactgaagtctttcaggacatgctgcctatgccaggggaccccaggaatgagtggtggtctccgcactcaaggcagcatttccgccagcctatctcttacgcccgcatgtag

SEQ ID NO: 179492 - DNA, 2121 bp, synthetic construct
  misc_feature 1..2121: note = Description of Artificial Sequence: Synthetic coding sequence
  source 1..2121: mol_type = other DNA
atggccagcgacatccccggcagcgtgaccctgcccgtggcccccatggcggctacagggcaggtgaggatggccggcgccatgccagcaaggggggggaagaggagaagcggcatggacttcgatgacgaagacggcgaaggcccatccaagttcagtcgggaaaatcactctgagatagagcgtcgaagacgcaacaagatgacccagtatataaccgagctgagtgacatggtgcccacatgctctgccttagcccggaagccagataagctaacaatcctgcggatggccgtatcacatatgaagtccatgagagggaccggtaacaaaagcaccgacggcgcatacaagccatcatttttgacggagcaagagctgaaacacttgatcttagaggcggccgacgggttcctgtttgtggtggccgcggaaactggaagggtcatttatgtgtctgactcagtcacacctgtgctaaatcagcctcagagcgagtggtttgggtctacgctttacgagcaagttcaccccgacgacgtagagaagctaagggagcaactttgtacttctgaaaatagcatgaccggtcgcattctagacctcaaaactggcacagtgaaaaaggaaggccaacagtcatctatgagaatgtgcatgggaagtcgacggagcttcatctgcagaatgcggtgcggcaatgcccccttagaccaccttccgcttaaccggattactactatgagaaagcgtttccggaacggcctgggacccgtgaaggaaggcgaggctcagtacgcggttgttcactgtaccgggtatatcaaggcgtggccaccggcaggcatgactattcctgaagaggacgccgacgtcgggcaagggagcaaatattgcctggttgctatcggccgcctgcaggtgactagctccccagtatgtatggatatgaacggaatgtctgtccccaccgaatttctgagccggcataattcggacggaattatcacgttcgtggatcctagatgtatcagcgtgattgggtaccagccacaagacctgctcggcaaggacattctggagttttgccatcccgaagaccagagccacttaagggagtctttccagcaagtggtgaaacttaaaggacaggttctgagtgtgatgtataggtttcgaacaaagaacagggagtggatgttgattcgcacgtctagcttcactttccaaaacccgtactccgacgaaattgaatacatcatatgcaccaatactaacgttaagcagctgcaacagcagcaagcagagctggaagtccatcaaagggacggccttagttcctacgacctgtcgcaggtacctgttcctaatctgcccgccggcgttcatgaggccggtaagtcggtagagaaggccgacgcaatattctcacaagaaagagatccacggttcgccgagatgtttgccggcatcagtgccagcgaaaagaagatgatgagcagtgctagtgccgctggtacgcaacagatttatagtcaaggctctccgttcccatccggtcacagtggcaaagcattctcaagctccgtcgtgcacgtgcccggcgttaatgatatccagtctagctcctcaacaggacagaacatgagccagatctcccgccaactaaatcaatctcaggtggcttggaccggctcacggcccccttttcccggccaacaaatcccttcccagtcaagcaagacccagtctagtccattcgggatcggaacatcacacacctatccagccgacccatcgtcctacagccccctgtcgtcacctgccacgagctcgcctagcggaaatgcttacagttccttagccaacagaacacctggtttcgccgagtcaggccagtcttctggacagttccaggggaggcccagcgaagtctggagccagtggcagtctcagcatcatggacagcagagcggtgaacaacactcacatcagcagcctgggcagaccgaggtgttccaagatatgctccccatgcctggagacccaacacaagggacagggaattacaacatcgaagactttgctgacttggggatgtttcccccattttcagagtag

SEQ ID NO: 179493 - DNA, 2121 bp, synthetic construct
  misc_feature 1..2121: note = Description of Artificial Sequence: Synthetic coding sequence
  source 1..2121: mol_type = other DNA
atggccagcgacatccccggcagcgtgaccctgcccgtggcccccatggctgctacaggacaggtccgcatggcgggcgcaatgcccgcgcgggggggaaagcgtcgctcaggcatggactttgatgatgaggacggggagggacccagcaaattctcacgggagaatcactccgagattgagagacggcgcaggaacaaaatgacacagtacatcacagaactgtctgacatggttcccacatgcagtgccctcgcccgaaagcccgacaagctgacgatcctgcgcatggcggtgtctcacatgaagtcaatgaggggcactgggaacaagagcacggatggcgcctataagccaagcttcctcacagaacaggagctgaagcatttgatcttggaggctgccgacggctttttatttgttgtagcagccgagaccggcagggtaatttatgtatctgattcagtcacacccgtgctcaatcaaccgcagagcgagtggttcggttcaaccctttatgagcaagttcacccggatgacgtggaaaagttgagggagcagctttgcacgtctgagaattcaatgacagggcggatcctagatctgaagaccggtacggtgaaaaaggaaggccagcagtcatctatgaggatgtgcatgggaagcagacgcagcttcatttgccgcatgcggtgtggcaacgcgccattggatcatctgccactgaatcggattactaccatgcgcaagcgcttcagaaatgggcttgggccagtaaaagaaggggaggcacaatacgccgtggttcactgcaccggatacattaaagcttggccacccgccggtatgacaattcctgaggaggatgcagacgtaggccagggctccaaatattgtctcgtggctataggcagactgcaagtaactagcagcccagtctgcatggacatgaatggaatgtctgtccccacagagttcctgagccggcataacagcgacgggattattactttcgtcgacccacgttgcatctctgttattggctaccagccacaggatctgttaggaaaagatatcctggaattctgccaccctgaggatcagtcacaccttcgtgagtcattccagcaagtggttaagctgaagggtcaagttctgtcagttatgtatagattcaggacgaaaaatcgcgagtggatgttaatccggacttccagttttacctttcagaacccttattccgacgagatcgagtatataatctgtacgaataccaatgtgaaacagctgcagcagcagcaggccgagcttgaggtacaccagcgcgatggactgtcttcctatgatcttagtcaggtccccgtacctaatctgcccgccggagtccacgaggctggcaaaagcgtcgagaaagctgacgccatattctcccaggaaagagatcctcggttcgccgaaatgtttgctgggatcagcgcgtctgaaaaaaagatgatgagcagcgcatcggcggcaggcacacagcaaatttacagccagggatccccgtttccctcaggccattcgggaaaggccttcagcagctcagtagtccatgtgcctggcgttaatgatattcagtcatcgtcctcgactggccagaatatgagtcagatctcccgccaactgaaccagtcccaggtcgcctggaccgggtctcgtcctcccttccctggccagcagattccctcccaatctagcaaaacacagtcttctccatttggcattggaaccagccacacctaccccgccgacccgagtagctattcccctctgtcctcacccgcgacgtcgtcccccagtggtaatgcctattcgagtctggcaaaccggacacccgggttcgcagagtcgggacagtcatccggtcagtttcaggggagacctagtgaggtgtggagccagtggcagtcacagcaccatgggcaacagtcaggtgagcaacactcgcatcagcagcctggccagactgaagtgttccaggacatgctgcctatgcccggagacccgacccaggggacgggcaactataacattgaggactttgccgatttggggatgttcccccctttttccgagtag

SEQ ID NO: 179494 - DNA, 1701 bp, synthetic construct
  misc_feature 1..1701: note = Description of Artificial Sequence: Synthetic coding sequence
  source 1..1701: mol_type = other DNA
atggccacccccgccgccgtgaacccccccgagatggccagcgacatcccgggctccgttacccttccagttgctcctatggctgccaccgggcaagtgaggatggccggtgccatgccagccagaggagggaagcgtcgctccggaatggatttcgacgacgaggacggagaggggccatctaagttttcccgggaaaatcattctgaaatagagcgccgccgccgaaacaaaatgactcagtacattactgaactgagtgacatggtccccacctgctctgcccttgcaagaaagcccgataagctcaccatcttgagaatggcagtgagtcatatgaagagcatgcgcggcaccggaaataagagtacagacggagcttataagccttcttttttgaccgaacaagagctgaagcacttgatactcgaggccgccgacggcttcctgtttgtggtggccgccgagactggcagggtaatttacgtgtccgattcagtcactcccgtgcttaaccagcctcaatctgaatggttcgggtccacactgtatgagcaagtacaccccgatgacgtcgaaaaactccgggaacaactgtgcacaagtgagaactctatgacaggcaggatcctcgacttaaagacaggcacagtcaaaaaggagggccagcagagcagtatgagaatgtgtatgggctcccgaaggtccttcatctgccgcatgcgctgcggcaatgccccgttagatcatttacctttgaatcggatcaccaccatgaggaagagatttcgaaacgggcttggacctgtgaaggagggagaagcgcagtacgccgtagtgcactgtaccggctatatcaaagcttggccaccagcgggcatgacaatccccgaagaggacgccgatgtcgggcagggaagcaagtactgcttggtcgctataggacgcctacaggtgacaagcagccctgtctgtatggatatgaacgggatgtcagtgccgacagaattcctcagccggcataacagcgacgggatcattacatttgtggatccacggtgcattagcgttattgggtaccaaccacaggacttgttaggcaaggatatcctggaattttgccatcccgaagaccaatctcatctgcgcgagtccttccagcaagtcgtcaagttgaagggacaggtcctgagtgtcatgtaccgcttccgcacgaagaatagagagtggatgttgatccgcacctctagcttcactttccagaacccttattcagacgagatcgaatacatcatttgcactaatacaaacgtaaaacaactgcaacagcagcaggcggagctcgaagtgcatcagcgcgacgggctttccagctatgacctatcacaggtgccagtgccgaatctcccggccggagtgcacgaggctgggaagtctgtggagaaggccgatgccatatttagtcaagaaagagatcctcgcttcgctgaaatgtttgctggcatctccgcctccgagaagaagatgatgtccagcgcaagcgcagccgggacccagcagatctactcccaaggcagcccgttcccctcaggacactcagggaaggcgtttagctccagtgtggtacacgtccctggcgtcaatgacatccagagcagcagtagtacaggacaaaacatgagtcagatctctggcagttag

SEQ ID NO: 179495 - DNA, 2160 bp, synthetic construct
  misc_feature 1..2160: note = Description of Artificial Sequence: Synthetic coding sequence
  source 1..2160: mol_type = other DNA
atgccccggaccatgatcccccccggcgagtgcacctacgccggccgcaagcggcggcgccccctgcagaagcagagacccgccgtcggtgctgagaaatcaaacccttctaagaggcatagagatagactgaacgcagagctggatcacctggcgtcacttcttccattccctccggatataatttcgaaactagacaagctgagcgtcctaagactgtcagtgagctatctgcgcgtgaaaagtttcttccaggttgtgcaggaacagagctctcgacagccggctgcaggggccccatcccctggagactcctgccctctggctggttccgctgtactcgagggccgccttctgttagagtctctgaatggctttgctcttgtggtatctgccgaaggcacaatcttttatgcttctgctactattgtggactatcttgggtttcatcagacagatgtgatgcatcagaacatttatgattatattcatgtagacgacaggcaagatttctgtcggcagttgcactgggcgatggacccgcctcaggtcgtgtttggacagccgcctcctcttgagacgggagacgatgcaatcctggggcgtctccttcgtgcgcaggaatggggcacgggtactccgaccgagtacagtgcattccttacacgttgctttatctgccgcgtgcgttgtctccttgactccaccagtggcttcctggctagaggatctcaggcatggcaattgcgcttatgttgtcctgagccgctcatgacaatgcagttccaaggaaagctcaaatttttgtttggacagaaaaagaaagctccttctggagctatgctccccccccggttgagcctgttttgcatagccgccccagttctcctgcctagtgccgccgagatgaaaatgaggtctgctctgttgcgagcgaagccaagagccgataccgccgctaccgccgatgctaaggtaaaagcaacaacttctctgtgtgagagcgaactccacggaaaacctaactattccgccgggagaagctcaagggagtccggtgttcttgtgctgcgtgaacagactgacgccggaaggtgggcgcaggttcctgccagagcaccatgtctttgtctccgtggcggaccagacctcgtcctggaccctaagggaggttccggagacagagaggaagagcagcacagaatgctgtccagagcgtctggggtgacagggcggagggaaactcccggacccaccaaacctttgccttggacggctggcaagcacagtgaagacggggcccggcctcggctgcagccctccaagaacgatcccccatccctgcggcctatgccccgagggagctgtttaccttgtccttgcgtgcagggaacctttaggaatagcccaatctcccaccccccatctccttcaccctccgcgtatagctcacggacctcccgtcccatgcgcgacgtcggagaggatcaggtccaccccccactctgtcatttcccccagagatctttacagcatcaactaccacaaccaggggcacagcgcttcgctacccgcggctatccaatggaagacatgaagctgcagggggttcctatgccgcccggtgacctatgtggcccgacgctgctgctggatgtatctattaagatggagaaggactccggctgtgagggtgcagctgacggatgcgtgcctagtcaagtatggcttggcgcgagcgatcggtcacatccggccacctttcctacgaggatgcacctgaagacggaacctgatagccgacagcaggtctacattagtcatctcggtcacggggtacgcggggcccaaccacacggcagagctaccgccggcaggtcccgggaattgactcccttccatccagcacattgtgcctgcctggaaccaactgacggtctccctcagagtgaacctccacatcaactttgcgctcgagggaggggagagcagagctgcacatgccgcgccgctgaggccgcaccagtggtgaaaagagaacccctggattcaccccagtgggccacccatagtcagggcatggtccccggcatgttacccaagtccgccctggcaaccctggtccccccgcaggcatcagggtgtacttttcttccttag

SEQ ID NO: 179496 - DNA, 2106 bp, synthetic construct
  misc_feature 1..2106: note = Description of Artificial Sequence: Synthetic coding sequence
  source 1..2106: mol_type = other DNA
atgccccggaccatgatcccccccggcgagtgcacctacgccggcaggaaacggaggcgccccctgcaaaaacagcgacctgctgtgggagcagagaaaagcaaccccagtaaaagacacagggataggttaaacgcggaactcgatcatctcgctagcttactcccttttcctcccgatatcatttctaaactggataagctgtcggttctgagactgagcgtctcttacctcagagtgaagagcttctttcaggttgttcaggagcagtcctctcgacagcccgccgccggtgcccctagcccgggcgatagctgtccgctagcgggtagcgcggtgcttgaaggaaggctcctgctggaaagtctgaacggattcgcgttagtggtttccgccgagggcacgatcttctacgcctctgccaccatcgtggattacctgggttttcatcagacggatgttatgcaccagaatatttacgattacattcacgtggatgaccggcaggatttctgccgccagctgcactgggccatggacccccctcaggtggtctttgggcagcccccccccctggagaccggagacgatgccatccttggtcgactccttcgagcacaggaatggggcactgggacacctactgagtatagtgcatttctgacacggtgctttatctgtcgcgtgaggtgcctcttagactctaccagtgggttcctaaccatgcaatttcaagggaagctgaagttcttgtttggacagaaaaaaaaggcccccagcggggccatgcttccgccaagactcagcctgttttgtattgccgctccggtactgctccctagcgcagctgagatgaagatgagaagcgcgctgttgagagcaaagcctagggctgatacggcagcgactgcagatgccaaggtgaaggctacaaccagtctctgcgagtccgaactgcatggaaaaccgaattacagcgccggacgctccagtcgtgagagcggagtgctggtgctgagagaacagaccgacgcagggagatgggcacaagttccagcccgggcaccatgcctgtgcctgaggggcggccccgacctggtgctcgatcccaagggcggtagtggagatagggaggaagaacaacatagaatgctctctcgggccagcggcgtgactgggagacgggagacaccagggcctacaaaacctttgccctggacagcaggtaaacatagcgaagatggtgctagaccaaggttacagcccagtaagaacgaccccccttctctgcgtccgatgcctcgggggtcatgcctgccctgcccttgcgttcagggtacctttaggaacagccctatttcccatccaccctccccatcgccatcagcatactcttctcgcacatcaagacctatgagggacgtaggtgaggaccaggtgcacccacctttgtgccacttcccacaacggagtcttcagcatcaacttcctcagcccggggcccaacgcttcgctaccaggggttaccccatggaggatatgaagctgcagggagtccctatgccacccggcgacctgtgcggcccaacgttgctcctggacgtgagcattaaaatggaaaaggactcaggctgcgagggggccgccgatggttgcgtgccctctcaggtgtggttgggcgcttccgacaggagtcaccctgcaacctttccgacccgtatgcacctaaagactgagcctgactcgaggcagcaggtttacatttcgcacctgggacacggggtgaggggcgcccagccacacgggagggcaactgccggccggagtagagagctcactccattccaccctgctcactgtgcgtgtcttgaaccgacagacggtctgccccaatcggagccaccccaccagttgtgtgcacgcggacgaggagaacaatcatgcacatgccgcgccgctgaggcagcccccgttgtgaagagggaacctcttgactctcctcagtgggctacgcacagccagggaatggtgcctggtatgttgccaaaatcagctctcgcaaccctagtgccaccacaagcttccggttgtaccttcctaccatag

SEQ ID NO: 179497 - DNA, 2205 bp, synthetic construct
  misc_feature 1..2205: note = Description of Artificial Sequence: Synthetic coding sequence
  source 1..2205: mol_type = other DNA
atgagcggcttcgacgaccccggcatcttctacagcgacagcttcggcggagatgcgcaagcagacgagggtcaggcccggaagagtcagctccaacggaggttcaaggagttcctccgtcagtacagagtcggaacggatcgtaccgggtttacctttaagtacagagatgaactcaaacgccactacaacttgggagaatactggattgaggtagaaatggaggacctagccagctttgacgaagatctcgctgactatctgtacaagcagcctgccgagcatctccagttgctggaggaagcagctaaagaagttgccgacgaggtgacacgccctcggccatccggcgaagaagtgttgcaagacatacaggtaatgttgaaatctgatgcttccccaagctccatcagatcccttaagtctgatatgatgtctcacctcgtgaaaatacctggcattattattgccgcgtcagccgttcgcgctaaagcaacaagaattagcatccagtgcagatcctgtcggaatacactgaccaacatcgccatgcgtccaggactggaaggctacgctctgcctcgcaaatgtaacacggaccaggcaggaaggccaaagtgtccactcgatccgtattttatcatgcccgacaagtgcaagtgtgtggactttcagactctgaagttgcaagagctgcctgacgcagtcccacacggggagatgccaaggcatatgcagctttactgtgacaggtacctgtgcgataaagtggtgcccggcaaccgtgtgacgatcatgggaatctactctataaagaaatttgggctgaccacatcaaggggaagagacagggtgggggtgggtattagatcctcatatatccgagttttgggaatccaagtagacaccgatggttccgggcgcagcttcgccggggccgtgagcccacaggaggaggaagaattccgtcggcttgccgccctgcctaacgtctatgaggtaattagtaagtctatcgcccccagcatcttcggaggaacagacatgaaaaaagctattgcctgtctgcttttcggagggtctcgaaagcgactccccgatggcctcacacgccgcggtgatattaatctgcttatgctgggcgatcccggtaccgcaaagtctcaactgctgaaatttgtagagaagtgcagcccgatcggcgtgtatacatccggcaaaggtagctctgcagcaggtttgactgccagtgttatgcgtgacccaagtagccggaactttatcatggagggcggagcgatggtcctggctgatggcggagtggtttgtatagatgaattcgataaaatgcgcgaagacgacagagtagccatacacgaggctatggagcagcagaccattagcattgctaaggccgggattacaacgacattaaatagtcggtgctctgtgctggctgccgctaacagcgtgtttggaagatgggatgaaacaaaaggagaggacaacattgacttcatgcctaccatccttagccgtttcgacatgatatttatcgttaaggatgagcacaatgaggagcgggatgtgatgttggccaagcatgtgattactctccatgtctccgcactgacccaaacacaggcggtggaaggcgagattgacctagccaaactgaagaagtttatagcgtactgccgcgtgaagtgtggtccgcgcttaagcgccgaggcggcggagaagctgaaaaataggtacatcattatgaggtccggcgcccgacagcacgagagagattccgatagacgctccagcattcctataaccgtgcgccagctagaggcgattgtgcgcattgcagaggctctctcgaagatgaagcttcagcccttcgccaccgaggccgacgtggaggaggctttgcggttatttcaggtctctacattggacgccgccttaagcgggaccctctcaggggtggaagggttcacctcacaggaggatcaggagatgttgtcccgaattgagaagcaactgaagagacgattcgcaatcggctctcaggtttcagagcacagtataatcaaagactttacaaagcagaagtaccccgaacatgctatccataaggtccttcagctaatgctgcgacgaggagagatccagcatcggatgcagcgaaaggtgctgtatcgactgaaatag

SEQ ID NO: 179498 - DNA, 1530 bp, synthetic construct
  misc_feature 1..1530: note = Description of Artificial Sequence: Synthetic coding sequence
  source 1..1530: mol_type = other DNA
atgagcatgggcgccccccggagcctgctgctggccctggccgccggactcgcagttgcacgccctcctaacattgtcttgatcttcgcggatgatctgggctacggtgatctgggctgttatggacacccaagtagtaccacacccaacttggaccagctcgccgcaggcggcctgcgatttaccgatttctatgttcccgtgtcactgtgcaccccctcacgagcagctctgttgacaggcaggctgcctgtcagaatgggaatgtatccaggcgtgttagtcccatcttctcgggggggactgcctcttgaggaagtgaccgtggcagaggttctcgccgcccgcgggtacctgactggcatggcgggtaaatggcacctgggcgtgggcccggaaggcgcttttctaccaccccaccagggattccaccgatttctcggaattccctattctcacgatcaggggccatgccagaatctgacctgttttccgccagccaccccatgcgatggagggtgtgaccaggggctcgttcccattccactgcttgcgaatctgtcagtggaggcgcaaccaccctggctccccggactggaggcgcgttacatggcttttgcacatgacctgatggcagatgcccaacgacaagaccggccattcttcctgtactatgccagtcatcacacacactatccacaattctcgggccagagtttcgcagagagatcgggacgtgggccttttggtgacagcctgatggaattagacgctgccgtgggaaccctgatgacagccatcggcgatcttggtctgctggaagagacgctagtgatcttcactgccgacaacggcccagagacaatgcgcatgagtaggggcggatgcagtggactgctgagatgcggcaaaggcaccacttacgaggggggtgtgcgagagcccgccctcgccttctggccggggcacatagcccccggagtcacccacgagttggcttcaagcctggacctgcttccaaccctggctgccttggctggggctccgttgcctaacgttacgctcgacgggtttgatctctctcctttgctgctggggacaggcaagtctcctaggcaaagtctgttcttttacccgtcataccctgacgaggtgcggggagtgtttgccgtgcgaaccggcaaatacaaggcccattttttcacgcagggatcagctcacagtgatacaacggccgatcccgcctgtcacgccagttcatcactgacagctcacgagccgccactgctgtacgacctttccaaagaccccggcgagaactacaacctgctgggaggagtggcaggagccacacccgaagtgctgcaggccctgaaacagctgcagctgctgaaggcacagcttgatgctgcagtgaccttcggcccatcccaggttgcgagaggggaggatcccgcgctccaaatttgctgccaccccggctgcacaccgcgccctgcttgctgccactgccccgatcctcatgcatag

SEQ ID NO: 179499 - DNA, 1530 bp, synthetic construct
  misc_feature 1..1530: note = Description of Artificial Sequence: Synthetic coding sequence
  source 1..1530: mol_type = other DNA
atgagcatgggcgccccccggagcctgctgctggccctggccgccggcctggccgtggcacggccgcccaatatcgtacttatatttgctgacgacttgggatatggagacctgggctgctacggtcatcccagtagtaccacccctaacttggaccagctggccgctgggggactgagattcactgacttctacgtcccagtcagtctgtgcacgcctagcagggccgccctcctcacgggtcggctgccggtgaggatgggaatgtaccctggggtgctggtgcccagttccagggggggcctcccgttagaagaagtgacggtggctgaggtactcgcagctagaggctatctcaccggcatggctggcaagtggcacctcggcgtgggacctgaaggtgcctttctgccccctcatcaggggtttcataggtttctcgggatcccatactcccacgaccagggcccatgccagaatctaacctgtttccctccggcaaccccctgcgatggcgggtgcgatcaggggctggttcctatacccttgctggcaaacctgagcgtcgaggcccaacctccttggttgcccggtcttgaggcccgttatatggctttcgcacatgatctgatggctgacgctcagcgacaagatcgcccgttctttttatactacgccagtcatcacacccactacccacagttcagcggacagagtttcgccgaaaggtcaggccgcggacccttcggagactccttgatggagctggatgcggcagttggcacgctcatgacagccatcggtgatctcggtcttctggaggagactctcgtcatcttcacggccgataacggcccagaaacgatgcgtatgtccagggggggatgcagcgggctgctgcgctgcggcaaggggaccacctatgaaggcggagttcgtgagccagctcttgctttttggcccggacatatcgcgcccggcgtgacccacgaactggctagctcactggacctcctgccgacactggctgcattagcaggggctcccctcccaaatgtcacccttgatggctttgacctgagccctttgctgctggggaccgggaaatcaccccgccaaagcctgttcttttacccgtcgtatcccgatgaagtgcgcggagtcttcgccgtgaggaccgggaaatacaaggctcatttttttacacagggatctgcacatagcgacacaaccgccgatcccgcttgccatgccagttcatccctcactgctcacgagccccccctcctgtacgatttgagtaaggatcctggggagaattataacctgctaggaggggttgcaggggccacaccagaggttttgcaggcattgaagcagctgcaactgctcaaggcccaactggacgctgccgttacatttggacctagccaagtcgctagaggtgaagacccagctctgcagatttgctgccatccaggatgcaccccaagacccgcctgctgccattgtccagacccacatgcatag

SEQ ID NO: 179500 - DNA, 1530 bp, synthetic construct
  misc_feature 1..1530: note = Description of Artificial Sequence: Synthetic coding sequence
  source 1..1530: mol_type = other DNA
atgagcatgggcgccccccggagcctgctgctggccctggccgccggcctggcagtcgctagaccccctaatatcgtgctaattttcgccgacgatttgggctatggagaccttggttgctacggccaccccagctctacgacgcccaatctggatcagctggccgccggtggcctgagatttactgacttctatgttcctgtgtccctatgcacacccagcagggccgccctgctaactggccgtctgcctgttcgcatgggcatgtacccaggcgtactggtaccgtcgtccagaggaggacttccgctggaggaagtgacagttgcggaggtgctggcagcgcgcggctatctgacaggaatggccggaaaatggcatcttggcgtggggcctgagggcgctttcctgccaccgcaccagggcttccacagattcctaggcatcccttatagccacgaccaggggccttgccagaacctgacctgcttcccacctgctacaccatgcgacggtggttgtgaccaagggttagtcccaatccccttgctggccaacctttcggtggaagcccagccgccatggctccctggactggaggcgcgatacatggcgttcgcccacgacctaatggcagatgcgcagagacaagatcggccttttttcttatattatgctagccatcatacccactacccccagttcagcgggcagtcattcgccgagcgaagtggacgaggcccatttggagatagcctgatggaactggatgcagctgttgggaccctaatgactgccatcggcgacctgggccttcttgaagagacgctggtcattttcacagctgacaatgggccagagacgatgagaatgtctagaggcgggtgtagcggactcctgcgctgtggaaagggaaccacctatgaagggggcgtgcgcgaaccagctcttgcgttctggcccggccatattgcgcctggtgtcactcacgagctggcaagcagcctagacctgttgcctaccctggcagccctggccggagcccccctgcctaacgtcacactggatgggttcgatctgtcacctttgctgctcggcaccggcaaatcgccaagacaatccttattcttctacccttcttacccggatgaagtgcgtggggtgtttgctgtgagaaccgggaagtataaggcacattttttcacacaaggtagtgctcacagcgacacgactgctgatcccgcctgccacgcctctagcagcttgaccgcccatgagcctcccctgctatacgatctcagcaaagatccgggcgagaattataacctcttggggggcgtggcaggcgctactccagaagtgttacaggcattgaagcaactgcagctcctgaaagcccagttggatgcagcggtcaccttcggtccatcccaggtcgcgcggggcgaggaccctgctcttcaaatctgctgccaccccggatgtaccccaaggccagcctgctgtcactgcccagaccctcatgcttag

SEQ ID NO: 179501 - DNA, 1272 bp, synthetic construct
  misc_feature 1..1272: note = Description of Artificial Sequence: Synthetic coding sequence
  source 1..1272: mol_type = other DNA
atgggcatgtaccccggcgtgctggtgcccagcagccggggcggcttgcccttagaagaggtgactgtagctgaagtgctggccgcgaggggctacctaacagggatggcaggcaagtggcatctgggagtcggacctgaaggtgcatttctgccccctcatcagggttttcatcgcttcctgggtataccctactcccatgatcagggcccctgccaaaatcttacttgttttcccccagcaactccatgcgatgggggctgcgatcagggactcgtgccaatccctctcctggctaacttgtcggtcgaggctcaaccaccttggctacccggccttgaggcaagatacatggccttcgcccatgacctgatggcggatgctcagagacaagacagacccttttttctgtactacgcatctcatcacacgcattatccccagttctctggacagtcatttgcagagcggtcagggcgtgggcccttcggggattctttgatggagctggacgcagccgtcggtacattaatgaccgccattggcgacttgggccttctggaagaaacactcgtaatatttacagcggacaacggacctgagacaatgagaatgtccaggggagggtgtagcggcttactgagatgcggcaagggaaccacctacgaaggaggtgtccgcgaaccagctctggccttctggcccgggcatatcgccccgggagtgacacatgaacttgcctctagtcttgatttgttgcctacgctggccgcgcttgctggggctcccctgccgaatgtgaccctcgacggcttcgacctcagtccgcttctgctgggaacaggaaagagtcctagacagagcttgtttttctacccttcttatcccgacgaggtgaggggcgtgtttgctgtccggactgggaagtacaaggcacatttttttacacagggtagcgcgcatagcgacacaaccgcagaccctgcctgtcacgctagcagctcactgaccgcccacgagccaccgctgctgtacgacttatcaaaggaccccggcgaaaattataaccttcttggaggagtggccggcgcaactcctgaagtgctccaagcacttaagcagctgcagcttctgaaagcgcagctggatgcagccgtaacgtttggacccagtcaggtggcccgcggtgaggatccagccctgcagatctgctgtcatcctggctgtacaccccggcccgcatgttgccactgtccagaccctcacgcctag

SEQ ID NO: 179502 - DNA, 1524 bp, synthetic construct
  misc_feature 1..1524: note = Description of Artificial Sequence: Synthetic coding sequence
  source 1..1524: mol_type = other DNA
atgggcgccccccggagcctgctgctggccctggccgccggcctggccgtcgctagaccaccaaacattgtgctgattttcgcggacgacctggggtatggcgacctgggatgttacggccatccttcctcaacaactcctaatctcgatcagcttgcagcaggcggtctgaggttcactgacttttacgttccggtgtcactctgcacaccatctcgggctgcgttgctgacgggccggctcccggtcagaatgggcatgtatccaggtgtactggtgccctcaagccgcggagggctcccactggaggaggtcacagtcgctgaagttctggcggcacgaggttacctaaccggcatggccggcaaatggcatctcggagtgggtcccgaaggagcctttctacctccccatcaaggtttccaccgattcctgggtatcccttatagccacgaccaggggccatgccagaatctcacctgttttccaccggccacgccatgcgatggtggatgtgaccagggtctcgttcccattcccctcctggctaacctaagtgtggaagcacagcccccctggctgccaggtttagaggccagatacatggcctttgctcacgacctaatggccgatgctcagcgacaggaccggcctttttttctgtattacgcttcccatcacacccattatccccaattctcaggccagtcctttgctgagcggtctggcagaggacccttcggagactccctgatggagctcgacgccgccgtaggcactctgatgacagctatcggggaccttggactgctcgaggagacattggttatctttaccgctgataatgggcccgagaccatgcgaatgtcgaggggaggctgcagcggcctgctacgctgcggtaaaggcactacgtacgaggggggggtacgcgagccggccctggcgttttggccaggccatatcgctcctggtgtgacccacgagttagcttccagcttggatctccttcccactctcgcagccctggctggggctcccctgcctaacgttactttggatgggttcgacctgtctccccttctattaggaactggcaagtccccacggcagtcccttttcttttatcctagttaccctgacgaggttcgaggggtttttgcagtccgcacgggcaaatataaggcccacttctttacacagggaagcgcccatagcgatacaactgccgaccccgcctgtcatgcgagctcctctctcacggcccacgaacctccattgctctatgatctgtccaaggacccaggggagaactataatctcttgggcggcgtcgccggcgcaacacctgaggtcctacaagccttgaagcagcttcagcttctcaaggctcagctggacgcagcagtgacttttgggcccagccaggttgcaagaggcgaggacccagctctccagatctgttgccatccgggttgtaccccaagaccagcctgctgtcattgtccagacccgcacgcatag

SEQ ID NO: 179503 - DNA, 1524 bp, synthetic construct
  misc_feature 1..1524: note = Description of Artificial Sequence: Synthetic coding sequence
  source 1..1524: mol_type = other DNA
atgggcgccccccggagcctgctgctggccctggccgccggcctggctgtagcacgacccccgaatatcgtgctgatattcgcagacgatttaggctatggtgatctggggtgctatggccacccaagctcaaccacccccaacctggatcaacttgccgcaggaggcctgaggtttacagatttctacgtgcctgtgagtctgtgtacccctagccgcgccgccttactgactggaaggctaccagtcagaatggggatgtatccaggggtgctggtgccctcttctcggggaggcctgcccctcgaggaggtaacagtggcagaagttctggccgcacgcggatacctcaccggcatggcagggaaatggcatctgggggtaggcccggagggcgccttcctgccaccacaccagggcttccaccgatttctgggcattccttacagtcacgatcaaggcccctgccagaatctcacgtgtttccccccagccaccccctgcgatggggggtgcgaccagggcctggtgccaatcccacttcttgctaatcttagtgtcgaagctcagcccccatggctgcccggtcttgaggcccgctacatggcctttgcacatgatttaatggccgacgctcagcgtcaggacaggccctttttcctgtattacgcctctcaccacacccattaccctcaattcagtggtcaatcgttcgcagagagatccggtcgaggtcccttcggagactcgctgatggagctggacgcagcggtgggtacactcatgacagccatcggggacttgggtctgctagaggagacactggtcatatttactgctgataatgggccagaaacaatgcgtatgtccagaggaggctgctcaggcctcctgaggtgcgggaaagggaccacgtatgaaggcggggtacgggaaccagcactggctttttggccagggcacatagctccaggggtgacccacgagttagcctcctccctggacctgctgcctaccctagctgcacttgctggggcccctttgcctaatgttactttagacggcttcgatttgagtccactactgctggggacgggaaagtctccccgccaaagccttttcttttatccctcttaccctgacgaggtcagaggcgttttcgccgtgaggaccgggaagtacaaggcgcacttcttcacccagggttccgcccactctgataccaccgccgaccctgcttgtcatgcttccagttctctgaccgcacacgagcctcctctgctgtacgacctttcgaaggaccctggggaaaattacaatctgctggggggcgttgcgggtgccacccccgaggtgctacaagcgctcaagcagctgcaactgctgaaagcccaacttgatgctgcagtcaccttcggcccctcccaggtcgctcgaggtgaagatcctgctctgcagatatgctgccacccaggatgcacacctcgtccagcctgctgccattgtcccgaccctcatgcatag

SEQ ID NO: 179504 - DNA, 1782 bp, synthetic construct
  misc_feature 1..1782: note = Description of Artificial Sequence: Synthetic coding sequence
  source 1..1782: mol_type = other DNA
atgcggagcgccgcccggcggggccgggccgcccccgccgcccgggattccctccctgtcctgctgttcttgtgtctcttgctgaagacatgcgagcctaagactgccaacgctttcaaacctaatatcctcctgatcatggctgatgacctgggcacgggagatctgggctgctacggaaacaacaccttgagaacgcccaatattgaccagctagccgaagaaggagtccgcttgactcagcacctcgcggctgcccctttatgtaccccaagcagagcagcattcctcaccggcaggcatagctttcggtccggaatggatgcatccaacggataccgggccctacagtggaacgctggatctggaggattacccgaaaatgaaaccacattcgcccgcattctgcaacagcatggatatgcgacgggacttattggcaagtggcaccaaggagtgaactgtgcctctcggggagatcattgtcaccacccacttaaccacggctttgattacttttatggcatgccctttaccctcacaaatgactgcgacccaggtagaccacctgaagtggatgctgcactgcgggcacagctgtggggctatacacagtttctcgccctaggtatcctgaccctcgctgcaggtcagacatgtgggttcttcagtgtctccgccagagctgtcacagggatggccggggtaggctgcctctttttcattagctggtattctagctttggctttgtccgacgctggaactgcatcttaatgaggaaccacgatgtcaccgaacagcctatggtcttggagaagacagcttcgcttatgttgaaagaagccgtgtcctatatagaacggcacaagcatggacctttcctgctttttctttctttgcttcatgtacatatacccctggtgaccaccagcgcttttctgggcaagagccagcacggcctgtatggggataacgttgaagaaatggactggctcatcgggaaagtcctgaatgcgatcgaagacaatggactcaagaatagcacctttacatacttcacttctgaccacggtggccaccttgaggccagggacggccatagccagcttggtggctggaatgggatttacaaaggtgggaagggtatgggtggatgggaaggtggcatccgagtgccaggcatttttcattggcccggcgtcctgcctgccggccgtgtcattggcgagcccacttcccttatggatgtgttcccaaccgtggtacagttagtgggcggcgaggttccgcaggacagggtcatcgacggccactcattggttcctcttctccagggtgcggaagccaggtcagcccacgagtttttatttcattactgcggacagcacctgcatgcggcgaggtggcaccagaaagacagtggctcagtgtggaaagtccattataccacgccacagttccatccagaaggcgcgggagcttgctatggccgcggggtttgcccatgctcaggggagggagtgacccaccacaggccaccgttattgtttgacctgagccgcgacccaagtgaagctcgtccactcacacctgactcggagccactctatcatgcagtgatcgctcgcgtgggcgcggcagttagcgaacataggcagacactgtctcctgtgccgcagcagttttccatgtcgaatatcttatggaaaccatggctgcagccatgttgcgggcacttcccattctgctcctgccacgaggacggggatgggaccccatag

SEQ ID NO: 179505 - DNA, 1770 bp, synthetic construct
  misc_feature 1..1770: note = Description of Artificial Sequence: Synthetic coding sequence
  source 1..1770: mol_type = other DNA
atgctgcacctgcaccacagctgcctgtgcttccggagctggctgcctgccatgttggccgttttgctgtctcttgcgccttcggctagttctgacatttcagccagcaggcccaacatcctgcttctgatggcggacgatctgggtatcggagacataggttgttatggtaacaacacaatgcgaacccccaacatagacaggctggcagaggatggagtgaagttaacacagcacatttctgctgctagtctttgtacaccttccagagcagcctttttgacgggtagatatccagtccgatctggcatggtgtcctctattggataccgcgttttgcaatggacaggggcatcaggtgggctcccaaccaacgagaccacgttcgctaagatcctgaaggagaagggctatgcgacggggttgattggcaaatggcacttgggtctgaactgtgagtcagcgtccgatcattgccatcacccactgcatcatgggttcgatcacttctatggtatgcctttttctttgatgggcgattgtgcccgatgggagctgagcgagaaaagagtgaatttagagcagaagctgaacttcctctttcaagttttggccttagtcgctctcactctggtcgcaggcaaattgacacatctcattccagtttcctggatgccggtcatctggagtgccctttcagcagtactcctcttagcaagcagctatttcgtcggcgccctgattgtccatgccgattgcttccttatgcgaaaccacaccattacagagcagcctatgtgtttccagcgcaccactcccctaattctacaagaagtggctagtttcttaaaaaggaataagcatggccctttcctgctctttgtgagcttccttcatgtgcacatccctttgattaccatggagaactttctcgggaaatcgctccacggactgtacggagataacgtggaagagatggactggatggtcgggcgaatcttagacactttagacgtggagggcctctcgaatagcaccctgatctatttcacctcagaccatggcggctcactggagaatcagttgggtaacacgcaatatggggggtggaacggtatttataaaggaggcaaggggatggggggatgggagggcgggatcagagtgcctggaatttttcgttggccaggagtgctgcctgctgggagagtaatcggggagcctacaagccttatggatgtgtttccaactgtggtgcggctggcaggtggagaagtgcctcaagatcgggtcatcgatgggcaggacctgcttcctcttctcctcggtacagcccagcacagcgaccacgaatttctgatgcactattgtgagcgcttcctgcatgccgccaggtggcatcaacgagatagaggcacgatgtggaaggttcattttgtcactcctgttttccagcccgagggagccggagcctgttacggccgcaaggtgtgtccttgttttggagaaaaggttgtgcaccacgacccccctttactatttgatttatctagggatccatctgaaacccatattttgacacccgcgtcagagcctgtgttctaccaggtgatggagagggtacagcaggctgtttgggaacatcagcggacgctctctcccgttcctctacaactcgatcggttaggcaatatttggaggccatggctccagccatgctgcgggccttttcccttatgttggtgcctgcgtgaagatgacccgcagtag

SEQ ID NO: 179506 - DNA, 537 bp, synthetic construct
  misc_feature 1..537: note = Description of Artificial Sequence: Synthetic coding sequence
  source 1..537: mol_type = other DNA
atgctgcacctgcaccacagctgcctgtgcttccggagctggctgccggccatgctagccgtgttgctgagtctcgccccatccgcctcctccgacatctccgccagccgacctaacattctattgctcatggccgatgacttggggattggcgatattgggtgttacggaaataataccatgcgaacccctaatatcgaccgtctcgcagaggacggggtgaagctcactcagcacatctcagccgcctccctttgcactccttccagagcagccttccttactggaagatatcccgtcaggtcgggaatggtgagtagtattggctatcgggtgcttcagtggaccggcgcaagcgggggactgcccactaacgaaacaacgttcgcaaagatcctgaaggaaaaggggtatgccactgggctgatcggaaagtggcaccttggactcaattgtgagtccgcttctgaccactgtcatcacccactgcaccatggattcgatcatttctacgggatgccattctccttgatgtag

SEQ ID NO: 179507 - DNA, 1635 bp, synthetic construct
  misc_feature 1..1635: note = Description of Artificial Sequence: Synthetic coding sequence
  source 1..1635: mol_type = other DNA
atgagcggcagccgggagcgggacaacatgctgcacctgcaccactcctggacacccaacatagatcgacttgccgaagatggcgtgaagctcactcagcacatctcagccgcatccctctgtacaccgtcaagggctgctttcctgaccggacgttaccccgtaagatctggaatggtgagttcaataggataccgtgtgctgcagtggaccggcgcaagcggcgggctccctactaatgagaccacattcgccaagatcctcaaggaaaaagggtacgccaccggcctcattgggaaatggcaccttggtctgaactgcgaatctgcgtcggatcattgccaccatcctctccatcatggctttgaccatttttacggcatgccctttagtctgatgggcgattgcgccagatgggaactctctgagaagagggtgaacctggagcagaaactgaacttcttattccaggtcctagccctcgttgccctaacactcgtcgcgggaaagcttactcacttgataccggtctcctggatgccagtgatctggtcggccctctctgcagtcttgttactggcaagttcctactttgtgggtgcccttatcgtccacgcagactgcttcctcatgcgaaatcacactatcacagaacaacccatgtgttttcagaggaccaccccactcatactccaggaagtggcttcgttcctgaagcgcaacaaacacggcccctttttgctctttgtatcatttcttcatgtccacataccacttatcaccatggaaaatttcctggggaagtcactgcatggcctctacggcgacaacgtcgaagaaatggactggatggtgggtcgtattctcgacactctcgatgtggaggggttgagcaattctactctgatatactttacttcagaccacggcggctcgctcgaaaatcagcttggcaatactcagtacggcggctggaacggaatttacaaaggggggaaaggaatgggtggatgggagggaggcatccgtgtccctggcatatttaggtggccgggcgttcttcctgccgggcgagttataggggagcccacatctctaatggacgtgttccctactgtggtgaggttggccggcggagaggtgcctcaggatcgcgtgatcgatggacaggatctgctgcccctcttactgggtacagctcaacactctgatcacgagtttcttatgcactactgcgaacgattcttacacgccgcccggtggcatcagcgcgacagagggacgatgtggaaagtgcatttcgtgacaccggtgttccagcccgaaggagcaggggcttgctacggaaggaaggtatgtccttgtttcggcgagaaagtggtgcaccacgatcccccattactgttcgatctttcccgcgacccctccgaaacccacattttgacacctgcgagcgagcccgtgttttaccaggttatggagagggttcaacaggccgtgtgggagcaccagcgaacattgtctccagtgcctctgcaactggaccggttaggcaacatctggcggccctggttgcaaccctgctgtggccctttccctttgtgctggtgcctaagagaggatgacccacagtag

SEQ ID NO: 179508 - DNA, 1845 bp, synthetic construct
  misc_feature 1..1845: note = Description of Artificial Sequence: Synthetic coding sequence
  source 1..1845: mol_type = other DNA
atgcggcccgtgatcaaccggtgcgcccccggcagcctggacctgatgttaccccaggccgcatctgagggcattgtttttcattcactgcagatcagcttgtgtttcaggagctggctgcctgccatgctcgctgtgctactgtctctcgccccctctgcttcaagtgatatttctgcctcccggccaaacatcctgctgctgatggcagatgacctagggattggagatataggttgctacggaaataatacaatgcgcactccgaatatagaccgactcgcagaggatggcgtgaagttgacccagcatattagcgctgcgagcctctgtacaccaagcagagcagcctttttgacaggccggtaccccgtgcgctccggtatggtgtcctccattggctaccgagtcctgcaatggactggtgcgtcaggaggactccccaccaacgagacaactttcgccaagatcttgaaagagaaaggttacgccaccgggctcattgggaagtggcacctcggattaaattgtgagagtgctagcgaccactgtcatcaccccctgcaccacggcttcgatcatttttacggtatgcctttttctctcatgggcgactgtgcacgctgggaactttcagagaagcgggtaaatctcgagcagaagttaaatttccttttccaggttctcgccctggtcgctctcaccctggtggccggtaaacttactcatctcatccctgtgagttggatgccagtgatttggagcgcactgagcgctgtgttactcttagcctcttcctacttcgtaggcgctttgatagtccacgccgactgtttcctgatgcgaaatcatactatcacggaacagccgatgtgctttcaacgcaccacccctctgatacttcaggaagtggcatcctttctgaaaagaaacaagcatggacccttccttttattcgtgtccttccttcacgtccacattcccctgattacaatggagaatttcctcggcaagagtcttcatggcctatatggggataatgtagaggaaatggattggatggtaggccgcattctggataccttggacgtggaaggactttccaactcaacactgatttacttcacgtccgaccacgggggtagcctggagaaccagctcggtaacactcaatatggtggatggaacggcatttacaaaggaggaaagggaatgggcggttgggagggcggcattcgggtccctggcatctttcgttggccaggtgttctgcccgccggccgggtcattggtgaaccgacctccttaatggacgtattccccactgtggttcggctggccggcggtgaagtgccgcaggatagagttatcgacgggcaagatcttctgccactcctgctagggactgctcagcacagtgatcatgaatttctgatgcattattgcgagcgcttcttacatgctgctaggtggcaccagagagacagaggaacaatgtggaaagtgcactttgttactcctgtcttccaaccagagggagccggcgcctgttacggccgcaaggtgtgtccctgttttggcgagaaagtggtgcaccacgatccacccctgttgtttgacctcagccgggatccgtcggagacccacatcctgacccctgcctccgagccagttttttatcaagtcatggagcgggtgcaacaagccgtgtgggaacaccagagaacactgagtccagtcccattgcagctggaccggctgggaaacatctggcgcccatggttgcagccttgctgtggtcccttccctttgtgttggtgcctccgagaagacgacccccagtag

SEQ ID NO: 179509 - DNA, 1773 bp, synthetic construct
  misc_feature 1..1773: note = Description of Artificial Sequence: Synthetic coding sequence
  source 1..1773: mol_type = other DNA
atgcggccccggcggcccctggtgttcatgagcctggtgtgcgccctactcaacacctgccaggcccatcgcgttcatgatgacaagcccaatatcgtgctgatcatggtagacgacctgggcatcggggatctgggctgttatggtaatgacacaatgaggaccccccatatcgaccgcctcgctagggagggtgtccggcttacccagcacatcagcgctgcttcgctgtgttctccatcccgctccgccttcctaaccggacgctatcctataagatctgggatggtgtcatcggggaaccggcgtgtgatacagaaccttgcggtgcccgctgggctgccgctgaatgaaaccaccctggctgcattactgaagaagcaggggtattccaccggcctgattggcaaatggcatcagggactgaattgcgacagccgtagcgatcaatgccaccatccttataactatggatttgactactattacggaatgccctttacgctggtagactcatgctggcctgaccccagcagaaacactgagctagctttcgagtcccagctttggttgtgcgtccagttagtggccatcgctattctgacactcacattcggcaagctgtccggttgggtgagcgtgccatggcttctgattttttcgatgatcctctttattttcctccttggctatgcctggtttagttcccacacatcaccgctgtactgggactgtctcctcatgaggggccatgaaattaccgaacagccaatgaaggcggagcgcgctgggagtataatggtgaaagaagctatcagttttttggaacgacactctaaggagactttcctactttttttctcttttctgcacgtgcatacacccctgccaacaacagacgactttactggaacaagtaaacacggcctctacggggacaacgtggaggagatggatagcatggttggtaagattttagacgctatcgacgacttcggcctgcggaataatacgttggtatattttaccagtgaccacggaggacacttagaggcacggcgaggccatgcccagcttggtggttggaatggcatttacaagggcgggaaaggaatgggcgggtgggaggggggcatcagagtccccgggattgtgagatggccaggcaaggtgcctgcaggtaggttgattaaggagccaaccagcctgatggatatcttgcctacggtcgccagcgttagtggcgggagtctgcctcaggaccgggtaatagatggccgcgacctgatgccattgctgcaaggcaatgtccgccactctgagcatgaattcttgtttcactactgcgggtcttacctgcacgccgtccgctggatcccaaaggatgacagtggttccgtttggaaagctcattacgttacccccgtgttccagcctccggcctctggaggatgctacgtgaccagcttgtgcagatgtttcggcgaacaggtgacctaccataatcctccattactgttcgatctctcacgcgacccctccgagtcaactccactgaccccagctaccgaaccactccatgatttcgtaatcaaaaaggttgccaatgctcttaaagagcaccaagaaaccatcgtgccagtgacctatcagttgtccgaactaaaccagggtcgaacgtggctgaagccatgctgcggggtctttcccttctgtctgtgcgacaaagaggaagaggtgtcacagccgcgtggccctaacgaaaaacgctag

SEQ ID NO: 179510 - DNA, 1773 bp, synthetic construct
  misc_feature 1..1773: note = Description of Artificial Sequence: Synthetic coding sequence
  source 1..1773: mol_type = other DNA
atgcggccccggcggcccctggtgttcatgagcctggtgtgcgcccttttaaacacctgtcaagcccaccgcgtgcacgacgataagcctaatatcgtgctgatcatggtggacgatttggggatcggggatctgggctgctacggcaatgacaccatgcggactccacatatcgatagactagcgagagagggcgtgcgtttaacacagcacatctcagctgcatctctgtgcagcccttcacgcagcgctttcctgaccggcagatacccaattaggtcaggcatggtgtcatctggaaatcgcagagtgattcagaacttggccgtgcccgcaggactccctctgaatgaaacaacgctggccgccctcctgaagaaacaggggtattctactggacttattggtaaatggcaccaagggctgaattgcgatagccggtctgaccagtgccaccacccctacaattatggctttgactactactacgggatgcctttcaccctggtcgatagttgctggcctgatcccagccgcaacacagaacttgcatttgagagtcaactgtggctctgcgtccagctggtggcgatcgccatactgaccctcaccttcggaaagctgagcgggtgggtgagtgtcccatggctgttgatcttctcaatgatcctatttatttttttactcgggtacgcatggttttcatctcacacctctcctctctattgggactgccttttgatgaggggccacgagatcactgaacaacctatgaaggctgagagggccggaagcataatggtaaaggaagcgatttcattcttagagaggcattccaaagagacctttcttctgtttttctctttcctccacgtccacacaccgctgccgacaaccgatgatttcacgggcacgtcaaagcatggactctacggggataacgtggaggagatggattccatggtgggcaagattcttgatgcaattgatgactttggcttacgcaacaataccctagtgtactttactagcgaccacggcggccacctggaggcaagaaggggccacgcccagctaggagggtggaacggcatctataaaggtggcaagggtatgggggggtgggaaggcgggatccgggtgcccggcattgtgcgttggcctggtaaagtgccagctggacggctgattaaggaacctacctctctgatggatattcttccaacagttgccagcgtgtcaggggggagtctgccccaagatagagtcatagacggtcgggacttaatgcctctcctgcaaggtaacgtgcgtcactcagagcatgagtttctcttccactactgcggctcctacctgcacgcagtgcggtggatccccaaggacgactctggctctgtctggaaggcccactacgtgactcctgtcttccagcctccggcttcaggaggatgctacgtgacctcactgtgtcgttgttttggcgaacaagtgacatatcataaccctccgctgctgttcgacctttcaagagacccctccgaatcaacgcctttaacgccagccacggaaccactgcacgacttcgtgataaaaaaagttgccaatgctctcaaagagcatcaggaaaccattgttccagtcacatatcagctgagtgaactgaatcagggaaggacctggctgaaaccgtgctgtggagtgtttccgttttgcttgtgtgataaggaggaggaggtcagccagccccggggacccaatgagaagaggtag

SEQ ID NO: 179511 - DNA, 1773 bp, synthetic construct
  misc_feature 1..1773: note = Description of Artificial Sequence: Synthetic coding sequence
  source 1..1773: mol_type = other DNA
atgcggccccggcggcccctggtgttcatgagcctggtgtgcgccttgcttaatacctgtcaggctcaccgggtgcatgatgataaacctaatattgtgctgatcatggtagatgacctgggcataggcgatctgggctgttacgggaatgacactatgaggacccctcatatcgatcgcctggcccgcgagggtgtgaggctaacccagcatatctccgccgcctcattgtgttcacctagtcgcagcgctttcttgaccggaagatacccaatcagatctggcatggtttcaagcggaaacaggcgcgttattcaaaaccttgccgttccagcaggcctgccactcaacgagaccaccctcgccgccctattaaagaaacagggctattcaactgggctgattggtaaatggcatcagggcttgaactgcgattcccgcagcgaccagtgccaccatccatacaactacggtttcgattactattatggcatgccattcaccctggtggattcatgctggcctgatccttccaggaataccgaactggccttcgagagccagttgtggctctgcgtgcaacttgttgctatcgctatcctaacactgacctttgggaaactgagcggatgggtatctgtgccctggctactgatcttctcaatgatcctcttcatctttctgctgggatacgcttggttttcttctcacacaagtcccctttattgggattgcctgcttatgcgaggtcacgaaatcaccgagcagccgatgaaagcagagcgcgcgggcagtatcatggtcaaagaagccattagttttctagaaagacattcgaaagagacgttcctgctcttcttttccttcctccacgtccacacgcccctgccgacaaccgatgactttacaggcaccagtaagcatgggctttacggagataacgttgaggagatggacagcatggtcggaaagatcttggatgcaattgacgacttcggattgcgaaacaatactctggtatacttcacctccgatcacggcggtcacctggaggctagaaggggtcacgcccaactcggcggatggaatggtatctacaagggcggcaaagggatgggaggttgggagggggggatccgcgttcctgggatcgtgagatggcctgggaaggtgccagccggcagactcattaaggaacctacaagtctgatggacatcctgcccaccgtcgccagtgttagtgggggttccctgccacaggatcgtgtcatcgacgggcgtgatctcatgccgctcctacaggggaatgtacggcatagtgagcatgagtttcttttccattattgcgggtcctacttgcatgccgtgaggtggattcccaaagacgattctggctcagtctggaaggctcactacgtgactcccgtttttcagccgcctgcctcaggtggctgttatgtgaccagtctgtgccggtgcttcggtgagcaggttacataccataacccaccactcctgttcgacctttctagggacccaagtgagagtacacccctgaccccagctacagagcccttgcacgacttcgtgatcaagaaggttgccaacgccctgaaggagcaccaggaaactatcgtccctgtcacataccagttgtctgagttgaatcagggccggacatggctcaaaccatgttgcggagtgttcccattttgtttgtgtgataaggaggaggaggtgtcccaacctcgaggacccaacgagaagagatag

SEQ ID NO: 179512 - DNA, 1689 bp, synthetic construct
  misc_feature 1..1689: note = Description of Artificial Sequence: Synthetic coding sequence
  source 1..1689: mol_type = other DNA
atgacccggaacgcccggcccaacatcgtgctgctgatggccgacgaccttggcgtcggggacctgtgttgctatgggaacaatagcgtgtccacccccaacatagaccgtctcgcgtctgagggggttcggttaacccaacatcttgctgctgcttctatgtgcacacccagccgggctgccttccttacaggcaggtatcctattagatcaggcatggtgagcgcgtataatttgaatcgggcatttacatggcttggcggcagtgggggactgccgaccaacgagacaaccttcgcaaaacttctgcagcatcgggggtatagaaccggactgatcggcaagtggcacctgggcctatcatgtgcctctcgaaacgatcattgctaccatccactgaatcatggcttccactatttctatggagtgccgttcggccttctgagcgattgtcaagccagcaagactccagaactgcatagatggctgcggattaagctgtggattagcacagtggctttggccctggtgcccttcctgctgcttatcccgaagttcgctcgctggtttagcgttccctggaaagtgatcttcgtattcgctctactggcatttctcttttttacatcttggtacagcagctacggcttcactcggagatggaactgtattctcatgcggaaccacgagattatccagcagccaatgaaagaggaaaaagtggccagtctgatgctcaaggaagctctggccttcatcgaacgatataaacgggagcccttccttttattttttagcttcttgcatgtccatacgccgctgatttcaaagaagaagttcgttggccgttcaaaatatgggcgctatggggacaacgtggaagagatggactggatggtggggaagatcctggatgctctggatcaggagcgacttgctaaccatactttggtttacttcacatccgacaacggtgggcacctagaaccactcgacggggcagttcaactgggaggttggaacggaatttacaagggtggaaagggtatgggcgggtgggaagggggtattagagttccgggaattttcagatggcccagtgtgcttgaggccggccgggtaattaacgaaccgacatcattgatggatatatacccaacccttagctacatcggtggcgggatactatcacaggatcgcgtgattgatgggcagaacctgatgcccctgctcgaaggcagagcaagccacagtgatcacgaatttttattccactattgcggggtttacctgcataccgttaggtggcatcaaaaagattgtgccactgtgtggaaagcgcactatgtaactcctaaattttatcctgagggaactggagcttgttatgggtcaggcatctgtagctgttctggcgacgtcacttaccatgaccctcctctgctgttcgacatttctcgcgacccctcagaggcactccccctaaatcctgataatgaacccttgttcgacagtgtcataaagaagatggaggccgctattagagagcaccgacgcacactgacgcccgtcccacagcaattttccgtattcaatactatctggaagccttggttgcaaccctgctgtgggactttccctttctgcgggtgcgacaaggaggatgacatcctgccaatggccccctag

SEQ ID NO: 179513 - DNA, 1710 bp, synthetic construct
  misc_feature 1..1710: note = Description of Artificial Sequence: Synthetic coding sequence
  source 1..1710: mol_type = other DNA
atgcacaccctgaccggcttcagcctggtgagcctgctgagcttcgggtacctgtcttgggactgggcaaagccatcattcgttgctgatggacctggcgaagcgggcgagcagccaagtgccgcccccccccaaccccctcatatcatctttatattaacggacgaccaaggttaccatgatgtcggataccacggctctgatattgagaccccgaccttagatagattagctgctaagggcgtaaagttggagaattactacattcaaccaatttgcactccttccagatctcaactgcttacagggagatatcagatccatacaggccttcagcattccatcataagacctcaacaacccaattgtctgcccctggaccaagtcacccttccccaaaaactacaggaggccggttacagtacacacatggttgggaagtggcatctgggattttaccgcaaagaatgtctgcccactcggaggggattcgacaccttcctgggaagcctgacaggtaatgtggattactacacctacgacaattgtgatggcccaggtgtttgcggctttgatcttcatgagggcgaaaacgtagcttggggcctgagtggacaatacagtactatgttatacgcacagcgagccagtcatattttagcttctcattcccctcagcgtccactgttcctctacgtagcctttcaggctgtccacacgcccctgcagtcccctcgggaatacctgtaccgctacaggacaatgggtaacgtggcccgccggaagtacgcagccatggtgacctgtatggatgaagcagtccggaacatcacatgggcactcaagaggtatgggttttataataactctgttatcatcttctctagtgataacggcggtcagactttttctggaggatccaactggccactccgtggacggaagggaacatattgggagggaggcgtaagagggctcggtttcgttcatagccctctactaaaacggaagcagcgaacttcacgtgccctcatgcatatcaccgactggtatcccacccttgtggggcttgcagggggtaccacaagtgccgccgacgggctggatgggtatgacgtctggccggccatctccgagggaagagctagtcctagaacggagattttgcataatatagaccccctgtataaccatgcacagcacggctccctggagggaggcttcggcatctggaacactgccgtgcaagcagccatcagggtgggcgaatggaagctcttgaccggcgatccagggtacggcgattggattcccccccagacccttgcaaccttcccaggaagttggtggaacttggagaggatggcctctgtgcggcaggctgtttggctattcaacattagcgcagatccttacgaacgggaggacctggccggacagcgtcctgacgtagtccggacattgctggccaggttagctgagtataaccgcacagccatcccagtgcgctaccctgctgagaacccgagagcccaccctgatttcaacgggggggcgtggggtccctgggcctccgacgaggaggaagaggaagaagagggtcgcgcgcgttcattttcacgaggaagacgcaagaagaagtgcaagatttgtaaactcaggtcctttttccggaagcttaacacgcgcctcatgtcacagagaatatag

SEQ ID NO: 179514 - DNA, 261 bp, synthetic construct
  misc_feature 1..261: note = Description of Artificial Sequence: Synthetic coding sequence
  source 1..261: mol_type = other DNA
atggtgggcaagtggcacctgggcttctaccggaaggagtgcctgcccacacgcagaggcttcgacacctttcttggatcccttacaggaaacgtggattactatacctatgataattgcgacgggcccggggtgtgcgggtttgacctacacgaaggagaaaatgtggcatgggggctgtctgggcaatactccaccatgctctatgctcaaagggcttcgcatattctggcttctcattccccacagcggccactatag

SEQ ID NO: 179515 - DNA, 1281 bp, synthetic construct
  misc_feature 1..1281: note = Description of Artificial Sequence: Synthetic coding sequence
  source 1..1281: mol_type = other DNA
atggtgggcaagtggcacctgggcttctaccggaaggagtgcctgccgacacgaagaggattcgacacctttctggggtctctaactggcaacgtggactactatacctatgataactgcgatggacctggtgtgtgtgggttcgatttacacgaaggtgagaatgtagcctggggcctcagcggccagtacagcacaatgttgtacgctcagcgagccagccacatcctggcttcccatagcccacagcggcccctctttctgtatgtcgccttccaagcagtgcatactccactgcaatccccgcgcgaatatttatatcgctacaggactatggggaacgtggcaagaagaaagtacgcggccatggtgacatgcatggacgaggccgtgagaaacattacttgggctctcaaaagatacgggttctacaacaattcagttatcattttcagttctgacaatggagggcaaaccttttctggagggagcaattggccgctgcgtgggcgaaaagggacctactgggaggggggcgtgcgcggcttggggttcgttcattcccccttactgaagcggaagcagagaacaagccgggcactgatgcacattaccgattggtatcctactctggtaggattggccggcggcactactagtgccgcagacgggctcgatggctatgacgtatggcccgccatttccgagggccgggcctctcctcggaccgaaatccttcacaatattgaccccctctataaccacgcacagcacggatccctggaaggtggctttggcatatggaatactgcggttcaggccgcaatccgtgtgggtgaatggaagctgctgacaggcgaccccgggtatggggactggattccaccacagacactggccaccttccctggatcttggtggaacctggaacgaatggcctcggtgcggcaggctgtgtggctcttcaacatatcggccgacccttatgagcgcgaggatctggccgggcagcgtcccgatgtggtgcgaaccttgttggcccgactcgcggaatataatcggaccgctatcccggtccgataccccgcagaaaacccgagggctcaccccgatttcaacgggggcgcctggggtccctgggccagtgacgaggaagaggaagaggaagaaggacgggcccgatcattctctagggggagacgtaaaaagaagtgcaaaatttgtaaactccgtagcttcttccgcaagctgaacacccgcctaatgagtcagagaatctag

SEQ ID NO: 179516 - DNA, 1800 bp, synthetic construct
  misc_feature 1..1800: note = Description of Artificial Sequence: Synthetic coding sequence
  source 1..1800: mol_type = other DNA
atggccccccggggctgcgccggccacccccccccccccagcccccaggcctgcgtctgcccagggaagatgttggcaatgggagccctcgccggtttttggatcctctgcctgctgacttacgggtatcttagctggggccaggccttggaagaagaagaagaaggtgcacttttggctcaggccggtgaaaagctggagccgagcacgactagcacgtcacagccgcacctgatttttattttagccgacgatcaggggttccgggacgtgggataccatggctcagagattaagacccctacactcgacaagctggccgcagaaggggtcaaactggagaactattatgtccagccgatctgtactccctcccggtcccaatttattaccggcaagtatcagatccacacggggttgcagcatagcatcatccggcccacccagcctaactgtctgccactcgacaatgccaccctgccgcagaaactgaaagaggtcggctatagcacacatatggtgggaaaatggcatctcggtttctataggaaggaatgtatgcccactagaaggggctttgacacattttttggctctctactggggagcggtgactactacacacactataagtgcgattccccaggcatgtgcggctatgatctgtatgagaatgacaatgccgcatgggattatgacaacgggatttacagcacacaaatgtatacgcagcgagtccaacagatcctggcctctcataatccaactaagccaatcttcctgtacatcgcctatcaggccgtgcatagccccctgcaggctccagggagatacttcgagcactatcgctccataattaatatcaatcgtagaaggtatgctgctatgctctcttgcctggacgaggccatcaacaacgttacgttagctctgaaaacttacggcttctacaacaatagcatcattatatactcctctgataatggtggtcagcctacggcaggcggatccaactggcccctccggggctcaaagggcacttactgggagggaggtattcgcgctgtgggcttcgtgcattcccccctgctgaagaacaagggaactgtgtgcaaagagctggtacatatcacagattggtaccccacgttaatttccctcgcggagggacaaatcgacgaggacattcagctggacggctacgacatctgggagacaatctccgagggcctgaggagcccccgcgtggacatcctccacaacattgacccgatctataccaaggcaaaaaatggcagctgggctgcgggctatgggatttggaataccgctatccagagcgcgataagggttcaacattggaagttgctgaccgggaaccctggctattccgactgggtcccccctcagtccttctccaaccttggccctaatcgctggcataatgaaagaattacactgtccactggaaagagcgtgtggctgttcaatatcacagccgatccctatgagcgggtcgatctctctaaccggtatccaggtatcgttaagaaacttctcagacgattgtcccagttcaacaaaaccgccgttcccgttcgctacccccccaaggatccacgctctaaccctagactgaatggcggtgtctgggggccatggtacaaggaggagaccaagaagaaaaagccctctaaaaatcaggcagagaagaagcaaaaaaagtccaaaaaaaaaaagaaaaagcagcagaaggcagtttccggctctacctgtcactctggagtgacctgtggctag

SEQ ID NO: 179517 - DNA, 1791 bp, synthetic construct
  misc_feature 1..1791: note = Description of Artificial Sequence: Synthetic coding sequence
  source 1..1791: mol_type = other DNA
atggccccccggggctgcgccggccacccccccccccccagcccccaggcttgtgtgtgccctggcaaaatgcttgccatgggcgctctcgccggtttctggatcctctgcctactgacgtacggctatttatcatggggtcaagctttggaggaggaagaggaaggggctctactggcccaggccggggagaagttggaacctagcactaccagtacttcgcaacctcatctgatctttatactggccgacgaccagggtttccgagacgtgggatatcacggctccgagataaagaccccaaccttggacaagctcgcagcagaaggtgtaaagctcgagaattactatgtccaacctatttgtaccccttcccgcagtcaatttataacgggaaagtaccagattcacactggtctgcaacactccattataagacccacacagcccaattgtctaccactcgacaatgccacgctgcctcagaaactgaaagaggtgggatactcaacccatatggtagggaaatggcatctgggattctacaggaaagagtgcatgcctacgagacgcggattcgataccttttttggatccctcctcgggagcggggactattacacacactataaatgtgattcccccggaatgtgtgggtacgatttatatgagaatgataacgcagcgtgggactacgataacggaatctactctactcaaatgtatacacagcgggtgcaacaaatcttggcctcacacaaccccaccaagccaatctttctgtacatcgcttaccaggcagtgcactcaccactgcaagcacctggacgatattttgaacactaccgcagcataataaacatcaacagacggagatacgctgccatgttgagctgtctggatgaagctattaacaacgtgaccctagccttgaagacgtatggcttctataacaattcaatcattatctattcatcagacaatggtgggcagcccaccgccggcggcagtaactggcccctgcgggggagtaaaggcacttattgggaaggcgggattagagccgtggggttcgtgcattctcccctactgaagaacaaagggacggtctgcaaggagcttgtacacatcacagactggtaccctacccttatctcgctggcagagggccagattgacgaagacatacagctggatggatatgatatctgggagactatttctgagggcctgaggagccccagggtagatatcctgcacaatatagatcccatttacacaaaagcaaagaatgggtcttgggctgccgggtacgggatctggaacaccgctatccagtctgctataagagtgcaacattggaagctgctaaccggaaatcccggttatagtgattgggtcccgccacaatcttttagcaacctcggaccaaatcggtggcacaacgagagaataactttgtctaccggcaagtcagtgtggctgtttaacataaccgccgatccttacgaaagggttgatctaagtaatcgttaccccggcatagtcaagaagctgctgagaagactgtctcagttcaacaagacagcagttccggtgagatatccccccaaggacccccgatcaaaccctcgtctcaacggcggcgtttggggcccctggtacaaagaagaaacaaaaaagaagaagccatctaagaatcaagcagaaaaaaagcaaaagaaatccaagaagaagaaaaaaaagcagcagaaggccgtgtctggtaagcccgccaacttagcccggtag

SEQ ID NO: 179518 - DNA, 507 bp, synthetic construct
  misc_feature 1..507: note = Description of Artificial Sequence: Synthetic coding sequence
  source 1..507: mol_type = other DNA
atggcccccggccagcaggccatgggcagcggcaccctgcagagctctcagccctctgagtgctcaacgggtttgttaacgggtaacccaggatactccgactgggtgcccccacaatctttcagcaatttgggcccaaaccgatggcataatgaacgtatcacgctgtcaactggaaaatctgtatggctctttaatataaccgctgatccttacgagcgcgtggatctatcaaaccggtatccaggaattgttaagaagctgctgcgacgtctcagtcagtttaacaaaacagctgttcctgtgcgctacccacccaaggatccccgcagcaatccacggctgaacggtggggtgtggggaccctggtacaaagaggagaccaagaagaagaaaccatccaaaaaccaagctgagaaaaaacaaaaaaagtccaaaaagaagaaaaaaaagcagcaaaaagcggtgtctggcagcacatgtcactctggagtgacttgcggttag

SEQ ID NO: 179519 - DNA, 1611 bp, synthetic construct
  misc_feature 1..1611: note = Description of Artificial Sequence: Synthetic coding sequence
  source 1..1611: mol_type = other DNA
atgctgctgctgtgggtgagcgtggtggccgccctggccctggccgtgctcgcacctggagccggtgaacaacgtagaagagcagctaaggcgcctaacgtagtgttggtcgtgtccgacagttttgatggcaggctgaccttccacccaggcagccaggtggtgaagctgccatttataaactttatgaagacccgtggaacttcatttctcaacgcctacactaactcaccgatctgttgcccgagccgagctgcaatgtggtcgggtctgtttactcatttaacagagagctggaataacttcaaggggcttgaccccaattacactacatggatggacgttatggaacgccatggttaccgcacccagaaatttgggaaactagactacacttcgggccaccattcaattagcaatcgagttgaggcctggacccgcgatgtggcgtttctgctgaggcaggagggtcggcccatggtgaacctgatacggaatcggacaaaagtccgggtgatggaacgagattggcaaaacacagacaaagctgtgaattggctccgcaaggaggcaatcaattataccgagccattcgtgatttatctgggactcaatctacctcacccgtatccttcaccttcttcaggcgaaaactttggctcctccactttccacacatccctgtactggttagaaaaggtgagccacgacgcgattaagatccctaagtggtctcccctgagtgaaatgcaccctgtcgattattatagctcctacaccaaaaattgtaccggcagatttacgaaaaaagagatcaaaaacattcgggccttttattatgcaatgtgcgccgagaccgacgccatgcttggagagattatactcgccctgcaccagttggatctcctgcagaagaccattgtgatctacagttctgaccacggcgaactggccatggagcataggcagttttataaaatgtcgatgtacgaggcttctgctcatgtcccactcctgatgatgggacctggcataaaggctggactccaggtgagcaacgtcgtgtccctggtggatatctatcctaccatgctggatatagcaggaattccactcccgcagaatctgtctgggtactctctcctgcccctctcttctgaaactttcaaaaacgaacacaaggtgaagaacctgcatcccccgtggatattgtctgagtttcatggttgtaacgtgaacgcctccacctacatgctgcgcactaaccactggaagtacatcgcatattccgacggtgcctcaatcttgccacagctgtttgacctgagcagtgacccagatgagctcacaaatgtggccgtgaagtttccagaaatcacatacagcctggaccagaaactccactccataattaattatcccaaagtgtccgcctctgtccaccagtacaataaggaacaatttatcaaatggaagcagtccatcggccaaaactacagcaacgtgattgcaaatttacggtggcatcaggattggcagaaggagccaagaaagtacgaaaatgcgatagatcagtggctcaaaactcacatgaatcccagggccgtttag

SEQ ID NO: 179520 - DNA, 561 bp, synthetic construct
  misc_feature 1..561: note = Description of Artificial Sequence: Synthetic coding sequence
  source 1..561: mol_type = other DNA
atgctgctgctgtgggtgagcgtggtggccgccctggccctggccgttctggctcccggggccggggaacagagacgacgggccgccaaagcgccaaatgtagtccttgtggtctcggattccttcgacggcaggcttaccttccaccccggctcccaagtggtgaaactccccttcatcaacttcatgaaaactcgagggacatcattcttgaacgcatatactaatagcccgatctgctgtcccagccgcgcagcaatgtggagcggactttttacacatctcacagaaagctggaacaactttaaaggattggatcccaattacacaacttggatggacgtcatggagcgacatggttataggacccagaaatttgggaagctggactataccagcggacaccactctatttccaatagagtggaggcttggacccgagatgtcgccttcttgctgcgacaggaggggcgaccgatggtgaatctcatccgtaaccggacaaaggtgagggtgatggagcgtgattggcaaaatacggacaaggctgttacaggctag

SEQ ID NO: 179521 - DNA, 1275 bp, synthetic construct
  misc_feature 1..1275: note = Description of Artificial Sequence: Synthetic coding sequence
  source 1..1275: mol_type = other DNA
atgtggggctgctgcgtgtgcggcgccctgttcgagggccagcggctgagactgttgcgggcccccggagatggactatccagccccttcaccgtggtctctaggaaatggcacctaggacatcacggtagctatcaccctaatttcagagggtttgattattatttcggcataccttactcccatgacatggggtgcaccgataccccagggtacaaccatcccccatgtcctgcatgtcctcagggggatggaccctccagaaatctgcaaagagactgttatacagacgttgctctccccctgtacgagaacctcaatattgtagagcagccagtcaatttgagcagcttagctcagaagtacgcggagaaggctacacagtttattcaaagggcaagtactagcggtcggcctttcctcctatacgtagccctcgcccacatgcacgtgcccttaccagtcacccagctccccgcggctccgaggggccgaagcctatacggggctgggctgtgggagatggacagcctggtcggacagataaaagataaagtggaccacacagtgaaggagaacactttcctttggttcaccggagataatggcccatgggcgcagaaatgcgaattggctggatcagttggccctttcaccggcttttggcagactagacagggcggctccccggccaagcaaacgacttgggaaggcggacaccgtgtacctgctctggcgtactggcccgggagggtaccagttaacgtgacatctactgccctactgtccgtcctagacatcttccctacagtagtggcgctggcgcaggcaagtctgcctcagggcagaagatttgatggcgtggacgttagtgaagtcttattcgggcgaagccagcccggtcaccgtgtgctgtttcatcccaatagtggcgccgctggggagttcggagccttacaaacggtgagactagagcgctataaagcattttatatcacgggaggtgcaagggcctgcgatggttccacaggtccagagcttcagcacaagtttccactgatatttaatctggaagacgacaccgccgaggcagtgccccttgagaggggaggcgcagaataccaggctgttctgccggaggttcgtaaggtacttgccgatgttttgcaggacattgccaacgataacatttcctcggcggactacacgcaggatcctagtgttaccccctgctgtaacccctaccaaatagcttgtagatgtcaggccgcgtag

SEQ ID NO: 179522 - DNA, 1578 bp, synthetic construct
  misc_feature 1..1578: note = Description of Artificial Sequence: Synthetic coding sequence
  source 1..1578: mol_type = other DNA
atgggctggctgttcctgaaggtgctgctggccggcgtgagcttcagcggctttctttaccccttagtggacttctgcatttccggaaaaacgaggggccaaaaaccaaattttgtgataatactcgcagacgacatgggatggggcgatctgggagcaaactgggccgagacaaaggacaccgccaaccttgacaagatggcctccgaggggatgaggttcgtagatttccatgccgctgcaagtacctgttccccatccagggcaagcctgctcacgggcagattaggcctccgcaatggagtgacccgcaactttgccgtcacctcagtggggggattgcccttgaatgagaccacccttgcagaggtgttacagcaggctggttacgtgacaggcataatagggaaatggcatctgggacaccacggatcttatcatcccaatttcagagggttcgattactacttcggtattccttactcccatgacatgggctgtacggacactccaggatataaccacccgccttgcccagcttgtccacaaggcgatggccccagtagaaatcttcagagagactgctacaccgatgtagccctccctctatacgagaacctcaacatcgtggaacagcccgtgaacttgtcaagcctagctcagaaatacgccgagaaagctacacaattcattcaaagggcaagcacatcaggtcgtccctttctgctgtatgtcgccttggcccacatgcacgttcctctgcctgtcactcagctgcccgccgcccctcggggccgctccctctacggggcaggtttgtgggaaatggactccttggtgggccaaattaaagataaagtggaccatacagtcaaagagaataccttcctgtggttcacaggcgacaacggaccatgggcacaaaagtgcgagttggctggctctgtgggtcccttcacgggattttggcagacaagacagggcgggtccccagccaagcaaaccacctgggaagggggccaccgcgtgccggcgctcgcctactggcccggaagggtgccggtgaacgtcaccagtacagcactactgagtgtgctggacattttcccgacggtggttgccctggcacaggcctccctgccacaaggccgaaggttcgacggcgtggacgtaagtgaggttctgttcggcaggtcacagcctggtcatagggtcctcttccatccaaactccggggctgctggagaattcggggccctgcagaccgtgcgcctggagcggtacaaagcgttttatatcactgggggcgcacgtgcctgcgacgggtccacagggcctgagcttcagcacaagtttcctttgatttttaatttagaagatgatactgccgaggccgtccccctggagagaggaggcgccgaataccaggcagtactgcccgaggtgcgaaaagtgcttgctgatgtgctgcaggatatagcgaatgataacatctcttcagccgattacacccaagacccatctgtgaccccatgctgcaatccctaccagatagcgtgccgctgccaggcagcatag

SEQ ID NO: 179523 - DNA, 747 bp, synthetic construct
  misc_feature 1..747: note = Description of Artificial Sequence: Synthetic coding sequence
  source 1..747: mol_type = other DNA
atgaccaagaccagcacctgcatctaccacttcctggtgctgagctggtatacttttctgaactattatatatctcaggaggggaaagacgaagtgaaacccaagatcctcgctaatggagcccgctggaaatatatgacgctcctcaatcttttgaaaaaccggacagccggatttgatatctaccagcccgggtctttcagacagctgctgcagacgattttttatggggtcacatgtcttgacgacgtgttaaaacgaactaaagggggaaaagatataaagtttctgactgcgtttagggacctgctctttactacactggcattccccgtgtcgactttcgtgtttttggcattctggatcctgttcctgtacaatagagacctcatctaccccaaggtactggacactgtgattccagtttggctcaaccacgccatgcataccttcatctttccaatcactctggctgaagtggttctccgccctcattcatatccaagcaaaaagacagggttaacattgctcgccgccgcctccatagcctacatatctcgcatcttatggctctacttcgagactggtacatgggtctacccagtcttcgccaaactttccctgctcggtctcgctgctttctttagtctatcatatgtgttcattgcctcaatctacctgctcggggaaaaacttaaccattggaagtggggcgacatgcggcaacctcgcaaaaagcgcaaatag

SEQ ID NO: 179524 - DNA, 609 bp, synthetic construct
  misc_feature 1..609: note = Description of Artificial Sequence: Synthetic coding sequence
  source 1..609: mol_type = other DNA
atggccaaggtgagcgtgctgaacgtggccgtgctggagaacccctccccatttcacagtccatttagattcgagatttccttcgaatgcagtgaggctctggccgatgacctggagtggaagataatctatgtgggatccgccgagagtgaagagttcgatcagatcctcgactcagttctggtgggcccggtacctgccgggcgtcacatgtttgtttttcaagcagatgcaccgaacccttctctgattccagagacggacgcagtgggtgtcacagtggtgctcattacttgtacctaccacggtcaggaatttattcgtgtgggttactacgtcaacaatgagtacctgaatcccgaactgcgagaaaacccacccatgaagccagactttagccagctccagaggaacatcctggcctcaaatccgcgcgtgacccgattccatatcaattgggacaataacatggaccgcctcgaagccatagagacgcaagatccctcactcgggtgtggactccctctcaactgcacccctataaagggcctagggctgcccgggtgtatcccgggactcctgccagagaattccatggactgtatctag

SEQ ID NO: 179525 - DNA, 1506 bp, synthetic construct
  misc_feature 1..1506: note = Description of Artificial Sequence: Synthetic coding sequence
  source 1..1506: mol_type = other DNA
atggacacccaggccggcagcgtggacgaggagaacggccggcagctcggggaagtggagttgcagtgcggcatctgcactaaatggtttacggctgatactttcggaatagatacctccagctgtttgcccttcatgactaattactcctttcactgcaatgtgtgccatcactctgggaatacgtacttcctcaggaaacaggccaatctgaaggagatgtgcctgagcgctctggcgaatctgacttggcagtctcggacgcaggacgaacacccgaagaccatgttttccaaggataaggacattattcccttcattgacaaatattgggaatgtatgaccactcgccagcggcctggcaagatgacatggcccaacaacatcgtgaaaaccatgagcaaagaaagggacgtgttcctggtgaaagaacaccctgaccctggctctaaggaccccgaagaggattatcccaaattcggacttctggaccaggatctctcgaatattgggcccgcctacgataaccagaagcagagcagcgcagtgagcacttccggcaacctgaatggcggcatcgccgcgggcagctccggaaaaggacggggcgccaagaggaagcaacaggacggcggcacgactgggacaaccaaaaaggcccgctcggaccccttgttctctgcgcagcgcctcccccctcacggctacccgttagaacaccccttcaacaaagatggatatcgttacatactggcagagccagacccccacgcccctgatccggagaagctggaactggactgctgggctggaaagcctatccccggcgatttgtaccgtgcgtgcctttacgaacgggtgctgctggcactgcacgatcgtgctccccagctaaagatttccgacgatcgcctcaccgtggtcggggaaaagggttattctatggtcagggccagccatggtgttaggaagggcgcatggtacttcgagatcacagtcgatgaaatgccccccgacaccgcagcgcgtctaggctggagccaaccattaggaaacttgcaagcgccacttggctatgataagtttagctacagttggcgcagcaagaaagggacaaaattccaccagtccatcggcaaacattattcgtcaggttacggccagggggatgttctggggttctacattaacctacctgaggacacagaaacagccaagtcactgcccgacacctacaaggataaggccctgattaagtttaagtcatacctatactttgaagagaaggattttgtcgataaggctgaaaagagcctgaagcaaaccccgcactctgaggtctctattaacttcggcccctgtttcaaatacccaccgaaggatctcacttaccgtcccatgtccgacatgggctggggcgcagtggtggagcacacccttgccgacgtactctaccatgtggaaaccgaggtcgatggaagaaggtcccctccctgggagccatag

SEQ ID NO: 179526 - DNA, 1887 bp, synthetic construct
  misc_feature 1..1887: note = Description of Artificial Sequence: Synthetic coding sequence
  source 1..1887: mol_type = other DNA
atggccgccgccggcgccggccccggccaggaggccggcgccggcccaggccccggcgccgtagccaacgccacaggcgcagaagagggagagatgaaacctgttgccgccggagccgccgctcccccaggggaagggatctccgcggcgcctacagtggaaccctctagcggcgaagctgagggtggagaagccaacttggtggatgtaagcggggggttggagaccgaatcctccaacggcaaagacacactggaaggcgcaggggatacatccgaagttatggatacgcaggctggctcagtggacgaggaaaatggaagacagttgggggaggttgaactacagtgtggaatttgcaccaagtggttcaccgctgacacattcggcattgacacaagttcgtgcttgccatttatgactaattatagttttcattgcaacgtgtgccaccatagcggaaatacctactttctccgtaagcaggcgaatttgaaggagatgtgtctcagcgctttagctaatctcacttggcagtcccggactcaggatgagcacccaaaaactatgttctccaaggataaggacatcattcctttcattgataaatactgggagtgcatgaccacccgccagaggccggggaagatgacttggcccaacaacatcgtcaagactatgtctaaggagcgtgacgtgttcctggtcaaggaacatcccgaccccggctccaaagacccagaagaggattatcccaaattcggtctgcttgatcaggacttaagtaacattggccctgcctatgataatcagaagcagagcagcgccgtgtccacgtccgggaatttgaatggcggcattgcagcaggctctagtggtaaaggccggggcgccaagagaaagcaacaggacggaggcacgactggaacaactaaaaaggcccgttccgacccattgttctcggctcagaggctaccaccccatggctacccgctcgagcacccatttaacaaggacggctaccgatatatcctggcggaacctgatccgcatgcacccgacccggagaaactggagctggattgctgggcaggaaaacctatccccggagacctatatcgagcttgtctgtacgaacgggtcctgctcgccctgcacgatcgagccccgcagttaaagatcagcgatgatagacttactgtcgtgggcgaaaaggggtattccatggttcgcgcatcccatggggtgcgtaagggagcatggtatttcgagatcaccgttgacgaaatgcctcctgataccgcagctcggctgggatggtcacagcctcttggaaacctgcaggcccccttgggatacgacaaattttcatattcatggaggtcaaagaaagggactaagttccatcagagcattggaaaacattactctagcgggtacggtcaaggcgacgtactgggcttctatatcaatctgccagaggataccgaaaccgctaaatcgctgcccgacacttataaggacaaggccttgattaagttcaagagttacttatactttgaggaaaaagacttcgtggataaagcagagaaatccctgaagcagactccgcattctgagatcatattctacaaaaatggcgtgaaccagggcgtcgcttataaagacatctttgagggagtgtattttccagcaatttccctgtataagagctgcaccgttagcataaatttcggcccctgtttcaagtatccaccaaaggatctgacctacaggccaatgtcagatatggggtggggcgcagtggtcgagcacactctggccgatgtgctgtaccacgtagagactgaggtagacgggcgtaggagtcccccttgggagccatag
